United States Patent Application Publication US 2010/0120627 A1 - sequence listing, part 12

SEQ ID NO: 27468 - DNA, 3750 bp, Homo sapiens
gattttctgctccggttggtgagcgcgcctgcgcgttgacggcgattttgcgttctgaggctgcagcgtcggcatcttgagctgccggttcgcgagttcgaggccaggttccgcctgtcgtgggttcgcaccccggacgcgatgctattcgacaaggtgaaagcgttctcggtgcagttggacggcgcgaccgcgggcgtcgagcccgtgtttagcggcggccaggccgtggcgggccgggtgctgctggagctgtcaagcgccgcgcgtgtgggtgccctgaggctgcgcgcgcggggccgcgcccacgtgcactggaccgagtcgcgcagcgcgggctcgagcacggcttacacgcagagctacagtgaacgcgtggaggtcgtgagccaccgcgccacgctcctggcgccaggtacggatggaggacccctgctccaacaccagttgtgtgcctcccaccacctggacggcggtacctccgtcagccctgggaccccagcgcaaccgctcagtcgcctcctttttctcctacctgcagataccggggagaccacgacgctgcctcctgggcgccatgagttcctgttcagcttccagctgcccccgtaagtcctctggggtgcagggttgccctaagcctgcagccccttccagattggtacctccaatactggatatctgggcacctctgagccccaagactctccccctgggaggcccccggagtgtctgtgtctccttctccctgcctgcttgtctctgtatcttgtcccctgaagtcccgtccctccaccctaggaccctggtgacatccttcgagggcaaacacggtagtgtccgctactgtatcaaggccaccctgcaccggccctgggtcccagcacgccgggcaaggaaggtgttcactgtcatcgagcctgtggacatcaacacgccagccctgctggtgagtggccacccttggggaggtaggttgggagtattgtaggaaggggcctgcctggctgctgggcgacaccaaccaataagatggaggtcataggtgggccctggcagggagggaggcaggtgtgggaatgcgtgtggaatccactgggatctgcacccatttgccgtgtgactctgggcaagtgtcttgaagccctctctgagcctcagatgcctcttctgtgaaatagaccagagctagggcttaccaagtgtgaattacacaccaaacacttggcttatacatttcatttctggctttataagatgggttgtgttcctggctctatttaacggatagttcctggattgttaaaaagaaaccaagccctgcccaaagtcctccctcagctgggggtggtttggaagctccacagcgactgtggtttgcacaaagtgactcatccatgtcactttcctctacaccgacaggcacctcaagcgggggctcgggaaaaggttgcccgatcctggtactgtaaccgtggcctagtctccctttcggccaagatcgaccgcaagggctacaccccaggtagcaggcggaccggactgggttgggacgggggctggtgttggggttgcaggaggggaaactgaggccccactgctccttgctgcaggagaggtcatccctgtctttgccgagatcgacaacggctccacacgtcctgtgctgcctcgggcagccgtggtgcagacacagacgttcatggcccgaggcgcccgaaagcagaaacgggcagtggtggccagcctcgcgggcgagccggtgggccccgggcagcgggcgctgtggcagggccgggcactgcggatccccccagtgggtccttccatcctgcactgccgcgttctacacgtggactacgcactcaaggtagggcatcctgctggccctgggggacagtgcctacattcaccctgtattccctcagactgggggaagctgaggcctcagtctccccaggcataggagggaggtgggggttggggaggctgcctgggcaccctcccttatggttccttcctccaggtctgtgtggatatcccaggaacgtccaagctgctgctggagctgccactggtgatcggcaccattcccttgcacccttttggcagccgttcctccagcgtgggcagccacgccagcttcctgctggactggaggctgggggccttgccggagcggcctgagggtaagctcccaccctgcttgcatgcagagggtgggtggatacacggagaggtggatgccgggtcaactctctcaccacgagtcccccggaatcccaaccaaaggacatacagcctggcagccccagagctggcacaagccagctcctggcccctggtcccttggagcagggctctctcctgccaacctcacccaccctgtctctcgcttccagctcctcctgagtactcggaggtggtagccgacactgaggaggcagccttggggcagagccccttcccgcttccgcaggaccccgacatgagccttgaaggcccgttcttcgcctacatccaagagttccgctaccgcccgccacccctgtactctgaggaggatccaaacccactcttgggggacatgaggccgcgctgcatgacttgctgaacggcacagggacccctcgaggaacaaggttgcacaccagctttcagccaccatgactgtggggagtggctggaccaagggctgacctccccgactgcatcaaagttggggaaccaagtctcagagtgaggcgggggcctttcggatatcacatgggacagaggaagagcccggctggaatctgacttacctggaccgctgtccttgtgaggcattgaatgcccagtgcagtatccgagagactgtttaataacctgtcttcccagccaattggtggtgctggaatcccctaggagccttcagtctgggagaaacagagccagacatagacagttccagcatcacagaaccagaagaagagacctgcaactgtgagagtccagacaggaagcagagaaggcgtccttgcggaaagggcattttagctgaggctttggagtacgaataggagctcagcaggcagacgaatgaggaataaaggtcagagaaggtcagagctgagtgacgtttggaatccaccccgtttattgtagaactgggggttcagagggcaggtgcctcagagttgaggccacacagtgaggtctggtgggtgaaaggacccaggaacgaggcgttcaggaaagcaggttgtcagagctatgtggagtctgtgggtggcaggggcagccgctccagcctttgaagactttgaaagccagagattcctggcgcaggcttggacttcctgggagctcctccaagtacccaggggcatcagagctgcctgggtgttacatggcccagggaacccaggttcagggtaggacaggcaagaccagatacccaatgtgcaaagtgaaaacactgggctccctgttaaacgatgaagaattcaagacagtgacagcattacgtcacccctggggacagaggtcagcctaaggtgacacacggggactactgtgcttccggaggctccctgtgtcctggaggagaaaagcattagagggggcagctggacaagctcccaactgcagagtcccagccctggctggggcagggccccggcctgggactcagcatttctgatatgccttaagaattcattctgttttgtacaattattttttaaaagtaaacgtgtggagaaagaa

SEQ ID NO: 27469 - protein, 41 aa, Homo sapiens [sequence omitted]

SEQ ID NO: 27470 - DNA, 431 bp, Homo sapiens
cgcgcgcggggccgcgcccacgtgcactggaccgagtcgcgcagcgcgggctcgagcacggcttacacgcagagctacagtgaacgcgtggaggtcgtgagccaccgcgccacgctcctggcgccaggtacggatggaggacccctgctccaacaccagttgtgtgcctcccaccacctggacggcggtacctccgtcagccctgggaccccagcgcaaccgctcagtcgcctcctttttctcctacctgcagataccggggagaccacgacgctgcctcctgggcgccatgagttcctgttcagagctggacaagctcccaactgcagagtcccagccctggctggggcagggccccggcctgggactcagcatttctgatatgccttaagaattcattctgttttgtacaattattttttaaaagtaaa

SEQ ID NO: 27471 - protein, 85 aa, Homo sapiens
MEDPCSNTSCVPPTTWTAVPPSALGPQRNRSVASFFSYLQIPGRPRRCLLGAMSSCSELDKLPTAESQPWLGQGPGLGLSISDMP

SEQ ID NO: 27472 - DNA, 1689 bp, Homo sapiens
gcatgatgatggcagtggatcagagtcccaaggacactggtgaagatcagagcaggactcacacaacctcagatccctgtggagtcagggtggaaccagagggaaggctgaaggctggagggtcctgagaggccttgcagaaagagaggacattggagctggggctttgatggatgaagaggaactagggaaaggcatttcaagcagagggaacagcctgtgcaaccacagcaggcagcccagcatgccagtgcttcctccatgaatttgaaagacatattggctgacctcatacctaaggagcaggccagaattaagaccttcaggcagcaacatggcaagaaggtggtgggccaaatcactgtggacatgatgtatggtggcatgagaggcatgaagggattggtctatgaaacatcagttcttgatcctgatgagggcatccgtttctgaggctttagtatccctgaatgccagaaactgctacccaaggctaagggtggggaagaacccctgcctgagggcttattttggctgctggtaactggatgtatcccaacagaggaacaggtatcttggctctcaaaagagtgggcaaagagggcagctctgccttcccatgtggtcaccatgctggacaactttcccaccaatctacaccccatgtctcagctcagtgcagctgttacagccctcaacagtgaaagtaactttgcccaagcatatgcacggggtatcagccgaacccaagtactgggagttgatttatgaagactctgtggatctaatcacaaagctaccttgtgtcgcagcaaagatctaccgaaatctctatggagaaggcagtggtattggggccattgactctaacctggactggtctcacagtttcaccaacatgttaggctatactgatcatcagttccctgagctcatgcacctgtacctcactatccacagtgaccatgagggcggcaatgtaagtgcccataccagccacttggtgggcagtggcctttcagacccttacctgtcctttgcagcagccatgaacgggctggcagggcctctccatggactggcaaatcaggaagtgcttgtctggctaacacagctgcagaaggaagttggcaaagatgtgtcagatgagaagttatgagactacatctggaacacactcaactcaggacgggctgttccaggctatggccatgcagtactaaggaagactgatccacgatatacctgtcagcgagagtttgctctgaaacacctgcctaatgaccccatgtttaagttggttgctcagctatgcaagattgtgcccaatgtcctcttagagcagggtaaggccaagaatccttggcccaatgtagatgctcacagtggggtgctgctccagtattatggcatgatggagatgaattactacacagtcctgtttggggtgtcacgagcattgggtgtactggcacagctcatctggagccgagccttaggcttccctctagaaaggcccaagtccatgagcacagagggtctgatgaagtttgtggactctaagtcagggtaaaactggagactgggggaaagtgactaccagaaagtgaggaagcctaaataaaaagtatacttttgtttcagggggcctttaaagacttaagattaaattatatctgaggcactgat

SEQ ID NO: 27473 - protein, 31 aa, Homo sapiens
MDEEELGKGISSRGNSLCNHSRQPSMPVLPP

SEQ ID NO: 27474 - DNA, 2172 bp, Homo sapiens
gcatgatgatggcagtggatcagagtcccaaggacactggtgaagatcagagcaggactcacacaacctcagatccctgtggagtcagggtggaaccagagggaaggctgaaggctggagggtcctgagaggccttgcagaaagagaggacattggagctggggctttgatggatgaagaggaactagggaaaggcatttcaagcagagggaacagcctgtgcaaccacagcaggcagcccagcatgccagtgcttcctccatgaatttgaaagacatattggctgacctcatacctaaggagcaggccagaattaagaccttcaggcagcaacatggcaagaaggtggtgggccaaatcactgtggacatgatgtatggtggcatgagaggcatgaagggattggtctatgaaacatcagttcttgatcctgatgagggcatccgtttctgaggctttagtatccctgaatgccagaaactgctacccaaggctaagggtggggaagaacccctgcctgagggcttattttggctgctggtaactggatgtatcccaacagaggaacaggtatcttggctctcaaaagagtgggcaaagagggcagctctgccttcccatgtggtcaccatgctggacaactttcccaccaatctacaccccatgtctcagctcagtgcagctgttacagccctcaacagtgaaagtaactttgcccaagcatatgcacggggtatcagccgaacccaagtactgggagttgatttatgaagactctgtggatctaatcacaaagctaccttgtgtcgcagcaaagatctaccgaaatctctatggagaaggcagtggtattggggccattgactctaacctggactggtctcacagtttcaccaacatgttaggctatactgatcatcagttccctgagctcatgcacctgtacctcactatccacagtgaccatgagggcggcaatgtaagtgcccataccagccacttggtgggcagtggcctttcagacccttacctgtcctttgcagcagccatgaacgggctggcagggcctctccatggactggcaaatcaggaagtgcttgtctggctaacacagctgcagaaggaagttggcaaagatgtgtcagatgagaagttatgagactacatctggaacacactcaactcaggacgggctgttccaggctatggccatgcagtactaaggaagactgatccacgatatacctgtcagcgagagtttgctctgaaacacctgcctaatgaccccatgtttaagttggttgctcagctatgcaagattgtgcccaatgtcctcttagagcagggtaaggccaagaatccttggcccaatgtagatgctcacagtggggtgctgctccagtattatggcatgatggagatgaattactacacagtcctgtttggggtgtcacgagcattgggtgtactggcacagctcatctggagccgagccttaggcttccctctagaaaggcccaagtccatgagcacagagggtctgatgaagtttgtggactctaagtcagggtaaaactggagactgggggaaagtgactaccagaaagtgaggaagcctaaataaaaagtatacttttgtttcagggggcctttaaagacttaagattaaattatatctgaggcactgataatatgtttgaggttaaaatataaattaagactttaaaagatgaaaaatggtcccttcttccctaatcagctcctttcccctgcctggtatgagttgcccatcacaggcatggtcctggaggatgaccaggactaatgcatgtggtatgagtaggtttggccccctcactatctctagagtgagaatctggctcctgtttccatggctcaaagccggttgcagagaatctgcagtcacttcggagctttagcttcttctctgccaagccctcaataagccagcaaaccaggactctgccccttctgtttccataggaatcatgttggatagtcagctgtaccaagccccttggccttcccatgcacacaaacacctcctagcaagacctgttggttagctggacatgctttggcaatttttttatactgccaagtgaccataaaggcatggcatttgttgtgactggcacccaatgtttgatt

SEQ ID NO: 27475 - protein, 31 aa, Homo sapiens; identical to SEQ ID NO: 27473

SEQ ID NO: 27476 - DNA, 921 bp, Homo sapiens
ctcaggtgagattctcggtggagcagctgggccaggatgggaggaggcggctgaccctgaaagagcaggtaacggggctctccgccattgagttccctggagggaaggagacttggcagtggatcaacccagtggacttccaggaagaggcatccctgcaggaggccctggtggtagagatgtcctgggacaaaggcgagaggactgagcctctcgagaagacagagctacctgagggtgcccctgagctggccctggatacagagttgtccttggaggatggagacaggtgcaaggccaagatgtgatcgttgaggctcagagagggtgagtgactcgcccgaggctacgtagcacacacaggagtcacatttggacccaaataacccagagctcctccaggctccagtgcacctgcctcctctctgccccgtgcctgttgccacccatcctgcgggggaaccctagatgctgccatgaaatggaagctgctgcaccctgctgggcctggcatccgtggggcaggagcagaccctgccatttacctgttctggcgtagaatggactgggaatgggggcaaggggggctcagatggatccctggaccctgggctgggcatccacccccaggagcactggatggggagtctggactcaagggctccctgcagcattgcggggtcttgtagcttggaggatccaggcatatagggaagggggctgtaaactttgtgggaaaaatgacggtcctcccatcccaccccccaccccaccctcacccccctataaaatgggggtggtgataatgaccttacacagctgttcaaaatcatcgtaaatgagcctcctcttgggtatttttttcctgtttgaagcttgaatgtcctgctcaaaatctcaaaacacgagccttggaattca

SEQ ID NO: 27477 - protein, 42 aa, Homo sapiens
MSWDKGERTEPLEKTELPEGAPELALDTELSLEDGDRCKAKM

SEQ ID NO: 27478 - DNA, 2877 bp, Homo sapiens
gtgagtcccttatcacaactgatcactccgtggggtcaccgctgctctggcgtctacctcccccaacaggttggggtttctaggagggcagctccagaggttgcagaacactccgctgcctctccagagccaggcacacagcaggcgctccataaatgttcgttggtcttttctccttgctcagcttcaatgtgttccggagtggggacggggtggctgaacctcgcaggtggcagagaggctcccctggggctgtggggctctacgtggatccgatggagccgctggtgacctgggtggtccccctcctcttcctcttcctgctgtccaggcagggcgctgcctgcagaaccagtgagtgctgttttcaggacccgccatatccggatgcagactcaggctcggcctcgggccctagggacctgagatgctatcggatatccagtgatcgttacgagtgctcctggcagtatgagggtcccacagctggggtcagccacttcctgcggtgttgccttagctccgggcgctgctgctacttcgccgccggctcagccaccaggctgcagttctccgaccaggctggggtgtctgtgctgtacactgtcacactctgggtggaatcctgggccaggaaccagacagagaagtctcctgaggtgaccctgcagctctacaactcagttaaatatgagcctcctctgggagacatcaaggtgtccaagttggccgggcagctgcgtatggagtgggagaccccggataaccaggttggtgctgaggtgcagttccggcaccggacacccagcagcccatggaagttgggcgactgcggacctcaggatgatgatactgagtcctgcctctgccccctggagatgaatgtggcccaggaattccagctccgacgacggcagctggggagccaaggaagttcctggagcaagtggagcagccccgtgtgcgttccccctgaaaaccccccacagcctcaggtgagattctcggtggagcagctgggccaggatgggaggaggcggctgaccctgaaagagcagccaacccagctggagcttccagaaggctgtcaagggctggcgcctggcacggaggtcacttaccgactacagctccacatgctgtcctgcccgtgtaaggccaaggccaccaggaccctgcacctggggaagatgccctatctctcgggtgctgcctacaacgtggctgtcatctcctcgaaccaatttggtcctggcctgaaccagacgtggcacattcctgccgacacccacacagaaccagtggctctgaatatcagcgtcggaaccaacgggaccaccatgtattggccagcccgggctcagagcatgacgtattgcattgaatggcagcctgtgggccaggacgggggccttgccacctgcagcctgactgcgccgcaagacccggatccggctggaatggcaacctacagctggagtcgagagtctggggcaatggggcaggaaaagtgttactacattaccatctttgcctctgcgcaccccgagaagctcaccttgtggtctacggtcctgtccacctaccactttgggggcaatgcctcagcagctgggacaccgcaccacgtctcggtgaagaatcatagcttggactctgtgtctgtggactgggcaccatccctgctgagcacctgtcccggcgtcctaaaggagtatgttgtccgctgccgagatgaagacagcaaacaggtgtcagagcatcccgtgcagcccacagagacccaagttaccctcagtggcctgcgggctggtgtagcctacacggtgcaggtgcgagcagacacagcgtggctgaggggtgtctggagccagccccagcgcttcagcatcgaagtgcaggtttctgattggctcatcttcttcgcctccctggggagcttcctgagcatccttctcgtgggcgtccttggctaccttggcctgaacagggccgcacggcacctgtgcccgccgctgcccacaccctgtgccagctccgccattgagttccctggagggaaggagacttggcagtggatcaacccagtggacttccaggaagaggcatccctgcaggaggccctggtggtagagatgtcctgggacaaaggcgagaggactgagcctctcgagaagacagagctacctgagggtgcccctgagctggccctggatacagagttgtccttggaggatggagacaggtgcaaggccaagatgtgatcgttgaggctcagagagggtgagtgactcgcccgaggctacgtagcacacacaggagtcacatttggacccaaataacccagagctcctccaggctccagtgcacctgcctcctctctgccccgtgcctgttgccacccatcctgcgggggaaccctagatgctgccatgaaatggaagctgctgcaccctgctgggcctggcatccgtggggcaggagcagaccctgccatttacctgttctggcgtagaatggactgggaatgggggcaaggggggctcagatggatccctggaccctgggctgggcatccacccccaggagcactggatggggagtctggactcaagggctccctgcagcattgcggggtcttgtagcttggaggatccaggcatatagggaagggggctgtaaactttgtgggaaaaatgacggtcctcccatcccaccccccaccccaccctcacccccctataaaatgggggtggtgataatgaccttacacagctgttcaaaatcatcgtaaatgagcctcctcttgggtatttttttcctgtttgaagcttgaatgtcctgctcaaaatctcaaaacacgagccttggaattca

SEQ ID NO: 27479 - protein, 702 aa, Homo sapiens
MFVGLFSLLSFNVFRSGDGVAEPRRWQRGSPGAVGLYVDPMEPLVTWVVPLLFLFLLSRQGAACRTSECCFQDPPYPDADSGSASGPRDLRCYRISSDRYECSWQYEGPTAGVSHFLRCCLSSGRCCYFAAGSATRLQFSDQAGVSVLYTVTLWVESWARNQTEKSPEVTLQLYNSVKYEPPLGDIKVSKLAGQLRMEWETPDNQVGAEVQFRHRTPSSPWKLGDCGPQDDDTESCLCPLEMNVAQEFQLRRRQLGSQGSSWSKWSSPVCVPPENPPQPQVRFSVEQLGQDGRRRLTLKEQPTQLELPEGCQGLAPGTEVTYRLQLHMLSCPCKAKATRTLHLGKMPYLSGAAYNVAVISSNQFGPGLNQTWHIPADTHTEPVALNISVGTNGTTMYWPARAQSMTYCIEWQPVGQDGGLATCSLTAPQDPDPAGMATYSWSRESGAMGQEKCYYITIFASAHPEKLTLWSTVLSTYHFGGNASAAGTPHHVSVKNHSLDSVSVDWAPSLLSTCPGVLKEYVVRCRDEDSKQVSEHPVQPTETQVTLSGLRAGVAYTVQVRADTAWLRGVWSQPQRFSIEVQVSDWLIFFASLGSFLSILLVGVLGYLGLNRAARHLCPPLPTPCASSAIEFPGGKETWQWINPVDFQEEASLQEALVVEMSWDKGERTEPLEKTELPEGAPELALDTELSLEDGDRCKAKM

SEQ ID NO: 27480 - DNA, 2067 bp, Homo sapiens
gtgagtcccttatcacaactgatcactccgtggggtcaccgctgctctggcgtctacctcccccaacaggttggggtttctaggagggcagctccagaggttgcagaacactccgctgcctctccagagccaggcacacagcaggcgctccataaatgttcgttggtcttttctccttgctcagcttcaatgtgttccggagtggggacggggtggctgaacctcgcaggtggcagagaggctcccctggggctgtggggctctacgtggatccgatggagccgctggtgacctgggtggtccccctcctcttcctcttcctgctgtccaggcagggcgctgcctgcagaaccagtgagtgctgttttcaggacccgccatatccggatgcagactcaggctcggcctcgggccctagggacctgagatgctatcggatatccagtgatcgttacgagtgctcctggcagtatgagggtcccacagctggggtcagccacttcctgcggtgttgccttagctccgggcgctgctgctacttcgccgccggctcagccaccaggctgcagttctccgaccaggctggggtgtctgtgctgtacactgtcacactctgggtggaatcctgggccaggaaccagacagagaagtctcctgaggtgaccctgcagctctacaactcagttaaatatgagcctcctctgggagacatcaaggtgtccaagttggccgggcagctgcgtatggagtgggagaccccggataaccaggttggtgctgaggtgcagttccggcaccggacacccagcagcccatggaagttgggcgactgcggacctcaggatgatgatactgagtcctgcctctgccccctggagatgaatgtggcccaggaattccagctccgacgacggcagctggggagccaaggaagttcctggagcaagtggagcagccccgtgtgcgttccccctgaaaaccccccacagcctcaggtgagattctcggtggagcagctgggccaggatgggaggaggcggctgaccctgaaagagcagccaacccagctggagcttccagaaggctgtcaagggctggcgcctggcacggaggtcacttaccgactacagctccacatgctgtcctgcccgtgtaaggccaaggccaccaggaccctgcacctggggaagatgccctatctctcgggtgctgcctacaacgtggctgtcatctcctcgaaccaatttggtcctggcctgaaccagacgtggcacattcctgccgacacccacacagatggcatgatctcagctcactgcaacctccgccttccagattcaagagattctcctgcttcagcctcccgagtagctgggattacaggcatctgccaccatacccggctaattttgtatttttagtagagacggggtttcaccacgttggccaggctggtctcgaactcctgacctcaagtgatccacctgccttggcctcccaaagtgttgggattataggcgtgagccaccatgcccagcctaatttttgtatttttagtagagatggagtttcaccatgttgcccaggctggtctcaaactcctgccctcaggtgatccacccacctcagcctctcaaagtgctgggattacaggtgtgagccactgtggccgacctactatttttattatttttgagctaggttctcagtctgttggcagactggagtgcaatcatggctcactgcagccttgaactcccagactcaagtgatccttccacctcagcctctggagtagctgggactacagacatgcaccaccacacctggttaattttttatttttattttttgtagagacaggtgtctctctacgttgcccaggctggtctcgaactcctgggctcaagtgatccacccatctccacctcccaaagtgctaggattacaggcgtgagccaccgtacccagcctggtcccatatcatagtgaaatggtgcctgtaaagctctcagcattggcttggcacatgcagttggtactcaataaacggctgttgctatcccc

SEQ ID NO: 27481 - protein, 421 aa, Homo sapiens
MFVGLFSLLSFNVFRSGDGVAEPRRWQRGSPGAVGLYVDPMEPLVTWVVPLLFLFLLSRQGAACRTSECCFQDPPYPDADSGSASGPRDLRCYRISSDRYECSWQYEGPTAGVSHFLRCCLSSGRCCYFAAGSATRLQFSDQAGVSVLYTVTLWVESWARNQTEKSPEVTLQLYNSVKYEPPLGDIKVSKLAGQLRMEWETPDNQVGAEVQFRHRTPSSPWKLGDCGPQDDDTESCLCPLEMNVAQEFQLRRRQLGSQGSSWSKWSSPVCVPPENPPQPQVRFSVEQLGQDGRRRLTLKEQPTQLELPEGCQGLAPGTEVTYRLQLHMLSCPCKAKATRTLHLGKMPYLSGAAYNVAVISSNQFGPGLNQTWHIPADTHTDGMISAHCNLRLPDSRDSPASASRVAGITGICHHTRLILYF

SEQ ID NO: 27482 - DNA, 5852 bp, Homo sapiens
gctgccgcagcgggaaccgcaagagcttggtggtaggaacgccctccccgaccctctcccggcccctgtcgccattgtcggtcccaacggcaggcagcagccccttggatagtcctcggaatttctcggctgcctctgccctaaatttcccctttgcccggagggcagacggcagaagatggtccctcgcgtctctcccatcttccggctatggaaccaacacacccagctccaccctctcgtcaagctcatcctcccgggaacgtctccaccagcttcccttccagccgacgccggacgagctgcacttcctgtccaagcacttccgcagctcagagaatgtgcttgatgaggaaggcggccggtcaccccgcctccgaccccgctctcgcagtctcagcccgggccgtgcaacggggaccttcgacaatgagattgtcatgatgaatcacgtgtaccgggagaggttccccaaggccacagcacagatggagggccgtctgcaggagttcctgacggcctacgcgcccggcgcccggctggcgctggctgatggcgtcttgggcttcatccaccaccagatcgtcgagctggcccgagactgcttggccaagtctggcgagaacctcgtcacctcccgctacttcctagagatgcaggagaagctggagcggcttctgcaggatgcccatgagcgttcggacagtgaggaggtcagcttcatcgtccagcttgtccggaaactgctgatcatcatctcacggccagctcggctgctggagtgtctggagtttgaccctgaggaattttaccacctgctggaggcggctgagggccatgcgcgggagggccaaggcattaagactgaccttccacagtacatcattgggcagctgggcctggccaaggaccccctggaggagatggtgccactgagtcacctcgaagaagaacagcccccagcacctgagtccccagagagccgcgccctggtcggccagtcacggaggaagccatgcgaaagcgactttgagaccatcaaactcattagcaacggagcctatggggccgtctacctggtgcggcaccgtgacacacggcagcgctttgccatcaagaagatcaacaaacagaacttgatcctgcgtaaccagatccagcaggtctttgtggagcgtgacattctcacctttgccgagaacccctttgtggtcagcatgttctgctcctttgagacccggcgccacctatgtatggtcatggaatacgtggaaggcggcgactgcgccacgctcctgaagaacatgggcccgctgcccgtggacatggcccgcctgtacttcgccgagacggtgttggcgctggagtacctgcataactatggcatcgtgcaccgtgacctcaaaccagacaatctgctcatcacctcgcttggccacatcaagctcacggacttcggcctgtccaagatcggcctcatgagcatggccaccaacctctatgagggccacatcgagaaggacgcccgagagttcatcgacaagcaggtgtgtgggacgccggagtacatagcccccgaggtgatcttccgccagggctatgggaagccagtggactggtgggccatgggcgtcgtcctctatgagtttctggtgggctgcgtgcctttctttggagatacccccgaggaactcttcggtcaggtggtcagcgatgagatcatgtggccagagggagatgaggcccttccagcagacgcccaggacctcatcaccaggttgctccggcagagcccgctggaccgtctgggcactggtggcacccacgaagtgaagcagcacccctttttcctggccctggactgggcagggcttctccgacacaaagccgagttcgtgccccagctcgaagctgaggatgataccagctactttgacacacgttcggaacgttaccgccatctgggctccgaggacgacgagaccaatgatgaagaatcgtccacagagatcccccagttctcctcctgctcccaccggttcagcaaggtctacagcagctctgagttcctggccgtccagcccactcctaccttcgctgaaaggagcttcagtgaagaccgggaggaggggtgggagcgcagcgaagtggactatggccgccggctgagtgctgacatccggctgaggtcctggacatcctctggatcctcctgtcagtcatcttcgtcccagcccgagcggggtcccagcccatctctcctgaataccatcagcctggacacaatgcccaagtttgccttctcatcagaggatgagggggtaggcccaggccctgcaggccccaagaggcccgtcttcattctaggggagcctgaccccccaccagcggccaccccagtgatgcccaagccctcgagcctttctgccgacacagctgctctcagccacgcccgcctacggagcaatagcatcggcgcccgacactccacaccaaggcctctggatgccggccggggccgccgccttgggggcccaagagacccagcccctgagaagtccagagcctcctccagcggtggcagtggtggcggcagtgggggccgcgtgcccaagtcagcctctgtctctgccctgtccctcatcatcacggcagatgatggcagcggcggccccctcatgagccccctttccccgcgctctctgtcctcgaacccgtcgtcccgtgactcttcgccgagccgagacccgtcccccgtgtgtggcagcctgcggccccccatcgttatccacagctctggcaagaagtacggcttcagcctgcgggcgatccgcgtctacatgggtgatagcgacgtctacactgtgcaccacgtcgtctggagtgtggaggacggaagccccgcccaggaggcgggcctgcgggctggggacctcatcacccacatcaacggggagtcagtgctggggctggtgcacatggacgtcgtggagctgctgctgaagagcggcaacaagatatccctgcggaccacagccctggagaacacctccatcaaggtgggccccgcccggaagaatgtggccaagggccgcatggcacgcaggagcaagaggagccgtcggcgggagacccaggatcggtgcgcggcagtgaccaccagggagcggcggaagtcacttttcaagaagatctccaagcagacctccgtgctgcacaccagccgcagcttctcctccggactccaccactcactgtcatccagtgagagcctccccggctcgcccacccacagcctctcccccagccccaccactccctgccgaagcccagcccctgatgtcccagcagataccactgcatccccacccagcgcatccccgagctccagcagccccgcctccccagctgctgctggccacacccgccccagctccctgcacggcctggctgccaagcttgggccaccccgccccaagactggccgccgcaagtccaccagcagcatcccgccctccccgctggcctgcccgcccatctccgcgcccccaccccgctcgccctcgcccctgcccgggcacccgcccgcacctgcccgatccccgcggctgcgccggggccagtcagctgacaagctgggcacaggggagcggctggatggggaggcggggcggcgcactcgtgggccagaggccgagctcgtggtcatgcggcggctgcacctgtccgagcgccgagactccttcaagaagcaggaggccgtgcaggaggttagcttcgatgagccgcaggaggaggccactgggctgcccacctcagtgccacagatcgccgtggagggcgaggaagccgtgccagtagctctcgggcccaccggaagagactgatcccctgccaggtctctccctggcatcaaagttacgcgttttcttgtgcaatgttttttccgtaaagtcatgcctggatggggactgagccaccagcctgacacccagaaggcgagaagccatctcggtccttgctggaaggtggagacatcgcttgtgttctggtgtcaatcggggctggatggggcaagaatgggggacaagggtggctttgtaaatagcagcaaatccctgcaactaatttattactttttttttctttttttttttttttttttgagacagagtctcactctgttgcccgggctggagtgcagcggcgtgatctcagctcactgcaacctccgcctcccaagttcaagcgattgtcctgcctcagcttcccaagtggctgggattacaggcgcccaccactatgcccagctaattttttgtatttttagtacagacggggtttcaccatgttggtcaggctggtctcgaactcctgacctcatgatttgcctgcctttgcctcccaaagtgctgggattacaggcgtgagccactgggcccagcctaatttattactttttataagcgatagccgtactgagccgccccctgaaggcggctgccaggtcttgccccaggcacctgggactctgtttgcaggccctgccctctgggctgagaaggatgcactttggacaagtcatctgtgtttgtgttttccagtttttctgtactttttaagtgttttgtgttacctggtctcattcccctccccacacctacccatttgaggggatggagttgaagtcacctggtcacctgtaccggcccagttcggctacaacctggagtgtccgtaaacaattcctctcacccacaaaacaatgtaatcccagcgatggactggattctgaaggccacttcccaccatcatagctgccatgcccaggcagtgcctgctctatatatagagtctgcctccaatcctgctggcttcagcctggagaagggatatgggagctggagctttgatggatgaataggtgttcaccggatctgggcagaggggtcatccgctccccaggtgggcactgataaaggaaggtacaggcctcacctggaactgccaaggcagcctccagaaatgctcggctgtctcggggcacgctccagtatgccagtcctgcgggattacgtccagctacttccagaaacactcagtgtcccctcccctcaggctctgccttggcctggccttgtccagtctaccctggacaagatgccgtgtgtttgaggcccagcagagtaagcccttggccgtgatgtgtctgaaacacctgttaggggttccctccatatgtcagagcctctctgggatgaagttcaagccagaaaacccagtcgaggctcaagtttgaatttcagcttcactgtgtggctctgggaaaatggctttcccactctgtgcctcagtttccttgtgtttacaagactaatcccattgactgtttattaagcacctactgtgtgccaagcgcttttacgtggcttctccctcagccagccttgagaaggctggaggtggtgtcatcacctccattttacagacaaagcagctgagaccccagcgaggggcggagacctgtcccacgatcacccagcaggagtcgtggcagaacggagcatcagccagaccctgttgtgggcgttgtcatcaagggagcttgaatggagggtctggtgtcagatacagccgactccagccccagctcatcccccatgatgctgtgtgacccactgggcactctggtgagggagctttccagacatcaacagcccactctgcttccctttctgagtcccctgtccagcactgcctagtgttggagggtagaccaaggctgtgcatgattcaccccctccttccatcctggagctggcagtgaataaaagcccgtatttacaaagatg

SEQ ID NO: 27483 - protein, 1148 aa, Homo sapiens
MMNHVYRERFPKATAQMEGRLQEFLTAYAPGARLALADGVLGFIHHQIVELARDCLAKSGENLVTSRYFLEMQEKLERLLQDAHERSDSEEVSFIVQLVRKLLIIISRPARLLECLEFDPEEFYHLLEAAEGHAREGQGIKTDLPQYIIGQLGLAKDPLEEMVPLSHLEEEQPPAPESPESRALVGQSRRKPCESDFETIKLISNGAYGAVYLVRHRDTRQRFAIKKINKQNLILRNQIQQVFVERDILTFAENPFVVSMFCSFETRRHLCMVMEYVEGGDCATLLKNMGPLPVDMARLYFAETVLALEYLHNYGIVHRDLKPDNLLITSLGHIKLTDFGLSKIGLMSMATNLYEGHIEKDAREFIDKQVCGTPEYIAPEVIFRQGYGKPVDWWAMGVVLYEFLVGCVPFFGDTPEELFGQVVSDEIMWPEGDEALPADAQDLITRLLRQSPLDRLGTGGTHEVKQHPFFLALDWAGLLRHKAEFVPQLEAEDDTSYFDTRSERYRHLGSEDDETNDEESSTEIPQFSSCSHRFSKVYSSSEFLAVQPTPTFAERSFSEDREEGWERSEVDYGRRLSADIRLRSWTSSGSSCQSSSSQPERGPSPSLLNTISLDTMPKFAFSSEDEGVGPGPAGPKRPVFILGEPDPPPAATPVMPKPSSLSADTAALSHARLRSNSIGARHSTPRPLDAGRGRRLGGPRDPAPEKSRASSSGGSGGGSGGRVPKSASVSALSLIITADDGSGGPLMSPLSPRSLSSNPSSRDSSPSRDPSPVCGSLRPPIVIHSSGKKYGFSLRAIRVYMGDSDVYTVHHVVWSVEDGSPAQEAGLRAGDLITHINGESVLGLVHMDVVELLLKSGNKISLRTTALENTSIKVGPARKNVAKGRMARRSKRSRRRETQDRCAAVTTRERRKSLFKKISKQTSVLHTSRSFSSGLHHSLSSSESLPGSPTHSLSPSPTTPCRSPAPDVPADTTASPPSASPSSSSPASPAAAGHTRPSSLHGLAAKLGPPRPKTGRRKSTSSIPPSPLACPPISAPPPRSPSPLPGHPPAPARSPRLRRGQSADKLGTGERLDGEAGRRTRGPEAELVVMRRLHLSERRDSFKKQEAVQEVSFDEPQEEATGLPTSVPQIAVEGEEAVPVALGPTGRD

SEQ ID NO: 27484 - DNA, 435 bp, Homo sapiens
gcccctccctgggctggtgtggaggcccaagttgtggctcctccttcaccccagccctgaccctgcctgagcctagcctctgattcttgtccctcaaccctggctcagatcccccaacatcctcccctggggttggtctcaggtcccatatcacaagccagctgtcttcctttcagcccgggccgtgcaacggggaccttcgacaatgagattgtcatgatgaatcacgtgtaccgggagaggttccccaaggccacagcacagatggagggccgtctgcaggagttcctgacggcctacgcgcccggcgcccggctggcgctggctgatggcgtcttgggcttcatccaccaccagatcgtcgagctggcccgagactgcttggccaagtctggcgagaacctcgtcacctcccgctacttcctagagatgcag

SEQ ID NO: 27485 - protein, 72 aa, Homo sapiens
MMNHVYRERFPKATAQMEGRLQEFLTAYAPGARLALADGVLGFIHHQIVELARDCLAKSGENLVTSRYFLEM

SEQ ID NO: 27486 - DNA, 825 bp, Homo sapiens
aggggtgagagacggagagaggaaaaagaggggggcggccagaagagggaaggagaggcgtggggacagggcccccgcccccgccggggtcgggtttgatggtgaaatagtaaacccacgcacggagggtcgccaggaaagtggacattaccgctttaattaacttcgagatgctccggcggcgggacctggcgtagccgtgacgcgcccccataaatctgcccggcccggggctgctccgagaactcgtacagtagcggcgtcagatccatcccgcgcctcccagtccggagtccatttgcataattggattttttttttttgcctccttctttctccctgaaacttgtttgaaaacccaagtgaaaaccgcgacgatctgcacactcaaaagcaagtgccaagtaagtgccaggacagcattgcatggcacggctgcttgttttgtgctttcacaacgtcctccatggagctcatggcccttcatctccaggccaaccacctgggcaaagcgaaacgcaaagataacaccatcggggtcacagtcaactgcaaagaccaagcccgggaggcgagtaagatggccctgctgccctcgttacaatcaaacaaagacctgggcctctccaatatgatcagctctctagactctgcttctgagaagatggcccaaggtcagctcaaggagactctgggagagcagaagagcggtgcatggaccggccacgtggaccctgcattttgtaacttcccatcagacttctacaagcagtttggtgtttacccaggcatggttggctcaggggcctccagttcctgccccaa

SEQ ID NO: 27487 - protein, 118 aa, Homo sapiens
MELMALHLQANHLGKAKRKDNTIGVTVNCKDQAREASKMALLPSLQSNKDLGLSNMISSLDSASEKMAQGQLKETLGEQKSGAWTGHVDPAFCNFPSDFYKQFGVYPGMVGSGASSSC

SEQ ID NO: 27488 - DNA, 785 bp, Homo sapiens
ggaaaaagaggggggcggccagaagagggaaggagaggcgtggggacagggcccccgcccccgccggggtcgggtttgatggtgaaatagtaaacccacgcacggagggtcgccaggaaagtggacattaccgctttaattaacttcgagatgctccggcggcgggacctggcgtagccgtgacgcgcccccataaatctgcccggcccggggctgctccgagaactcgtacagtagcggcgtcagatccatcccgcgcctcccagtccggagtccatttgcataattggattttttttttttgcctccttctttctccctgaaacttgtttgaaaacccaagtgaaaaccgcgacgatctgcacactcaaaagcaagtgccaattcctgaccaccacggctttaagaatatccttcaaccgggagggagatccattgctttaagacttgcctgagatgagtatttgatgctaccttccagactgacagtgtccaggaaagcagctgcagtggaggtggaagggcagtaggattccctgattgaaccggccctgtggaggtacagactgggcaccttcggccgcagtgcatgcagtggctgcagccagcctcgttatggaaaagaattgcccagtgggttgagggaatgggcaacagcacactagaatcatgaggctgaaaggaatattgccgactggaggtcatttttcccaactgaggggcaatagtttgccactataaactgcacattgcagtcagtatatgttttattaaaccatttaagg

SEQ ID NO: 27489 - protein, 68 aa, Homo sapiens
RRQIHPAPPSPESICIIGFFFFASFFLPETCLKTQVKTATICTLKSKCQFLTTTALRISFNREGDPLL

SEQ ID NO: 27490 - DNA, 4941 bp, Homo sapiens
gtctggagaagagagtttccacgttgtcatcataggatctggactcaagtgaccaaaaccttgcttggatttttacctgatgaagtttgtcttgaaaagtgaaaatggttccatttccattttccctgttctcaagggatggaagaagcgagcctgtgccttggagtgtcttcggcggagccggaagctgagccccacctgagtggccccgtcctcaacggccagtatgccatgagtcagaagctgcaccagatcacctcccagctcagccatgccttccccgagctccatccccggcccaaccccgaggagaagccccccgcatccctggaggagaaggcccacgtgcccatgagcggccagcccatgggcagtcagatggcgctcctggccaaccagctgggccgggaggtggacaccagcctcaacgggagggtggacttgcagcagttcctcaacgggcagaacctgggcatcatgtcccagatgagcgacatcgaggacgacgcccgcaagaaccgcaagtacccgtgcccactctgcggcaagcgcttccgcttcaacagcatcctctccctgcacatgcgcacgcacacgggcgagaagcccttcaagtgcccgtactgcgaccacagggcggcgcagaaggggaacctcaagattcacctgcggacccacaagctgggcaacctgggcaaggggcgtgggcgtgtgcgcgaggagaaccgcctgctgcacgagctggaggagcgcgccatcctgcgggacaagcagctgaaaggcagcctgctgcagccccggccggacctgaagcccccgccgcacgcccagcaggccccgctggccgcctgcaccctggccctgcaggctaaccacagcgttcccgacgtggcccacccggtgccctcgcccaagcctgccagcgtgcaggaggacgcggtggccccggcggcgggcttccgctgtaccttctgcaagggcaagttcaagaagcgcgaggagctggaccgccacatccgcatcttgcacaagccctacaagtgcacgttgtgcgacttcgcggcttcgcaggaggaggagctcatcagccacgtggagaaggcacacatcacggccgagtcggcccagggccagggccccaacggcggtggcgagcagtcggccaacgagttccgctgcgaggtgtgcggtcaggtgttcagccaggcgtggttcctcaagggtcacatgcgcaagcacaaagactcctttgagcactgctgccagatctgcggccggcgcttcaaggagccctggttcctcaagaaccacatgaaggtccacctcaacaagctgtcggtgaagaacaagtcccccagcgaccccgaggtgcctgtgcccatgggcggcatgtcccaggaggcccacgccaacctgtactccaggtacctctcctgcctgcagagtggcttcatgaccccggacaaagccggcctgagcgagcccagccagctctatggcaagggcgagctgcccatgaaggagaaggaagcgctggggaagctgctgtctcccatctccagcatggcccacggcgtcccggagggggacaagcactccctcctgggatgcctcaatctcgtgccgccgctgaaatccagctgcatcgagcggctgcaggcggctgccaaggctgcggagatggaccccgtgaacagctaccaggcttggcagctcatggccaggggcatggccatggaacatggcttcttgtctaaagagcatccgctgcagcgcaaccacgaagacactttggcaaacgccggggttctgtttgataaggagaagcgggagtacgtgttagtgggagcagatggctccaagcagaaaatgcctgctgatttggttcacagcactaaagtgggcagccagagagacctgccaagtaagctcgaccctttagaaagcagtcgggattttttgtcacacgggctgaaccagactctcgagtataacctgcagggtcctgggaacatgaaggagaagcccaccgagtgccccgactgcggccgggtgttccgcacttaccaccaggtggtcgtgcactcccgtgtccacaagcgggaccgcaagggcgaggaggatgggctgcacgtgggcctggatgagcggcgtggctcgggcagtgaccaggagtcccagtcggtgagccgctccaccacgccgggctcctctaacgtcaccgaggagagcggggtcggaggcggcctctcccagaccgggagtgcccaggaggacagcccgcacccctcctcgccatcctcctcagacattggcgaggaggctgggagatctgccggcgtccagcaaccagcgctgcttcgcgacagaagcctgggctcggccatgaaggactgcccgtactgtgggaaaactttccggacatcccatcaccttaaggtgcacctgaggatacacacaggtgagaaaccctacaagtgtccgcactgtgactatgccggcacgcagtcagcatccttaaaataccacttagagcgacaccatcgggagcggcagaacggggctgggccgctgtctgggcaacccccaaatcaagaccacaaggatgagatgtcaagcaaagcttctctgttcatcaggccagacatcctgaggggggccttcaagggtctccctggaatcgacttcagaggaggccctgcatctcagcagtggacatcaggggttctctcctctggagatcactcggggcaggccacgggcatgtcttcggaggtcccctcagatgctctgaaaggcactgaccttccttccaaaagcacccacttctctgagatcggaagagcttatcaaagcattgtgagcaacggtgtgaatttccaagggtccttgcaagctttcatggacagttttgtcctcagttccttgaagaaggagaaggacatgaaggacaaagccctggctgaccccccttccatgaaagtccacggagtggatggtggtgaggagaaacccagtggcaagtcctcccagaggaagtccgagaaatctcagtatgaacccctggacttgtctgtgcggccagatgccgcctccctcccgggctcctcggtaactgtgcaggacagcattgcatggcacggctgcttgttttgtgctttcacaacgtcctccatggagctcatggcccttcatctccaggccaaccacctgggcaaagcgaaacgcaaagataacaccatcggggtcacagtcaactgcaaagaccaagcccgggaggcgagtaagatggccctgctgccctcgttacaatcaaacaaagacctgggcctctccaatatgatcagctctctagactctgcttctgagaagatggcccaaggtcagctcaaggagactctgggagagcagaagagcggtgcatggaccggccacgtggaccctgcattttgtaacttcccatcagacttctacaagcagtttggtgtttacccaggcatggttggctcaggggcctccagttcctgccccaacaaggagcctgatggaaaggcccactctgaagaggatgtccccatcctgatccccgaaaccacgagtaagaacactactgatgacctctctgacattgcctcctcagaggacatggactcctccaagggggagaacaacgatgaagaggatgttgaaaccgaaccggaaatgatgaccaagccactgtctgccctcagcaaagacagcagcagcgatggcggggacagcctgcagcccacaggcacctcccagcccgtccagggactggtctcacctttatcccaagcaccggagaagcagtggcacagccagggtcttctccaagcccaggaccccttggcgggcctgccaaagccggagcgggggccccagagcctggacaagccgatgaacatgctgtcggtcctcagggcctacagttctgatggcttagcagcctttaacggacttgcaagtagcacagcaaattctggatgtatcaagaggccagacttgtgtggtaagtgacactccctgtcctagtcggtctatctggacttgcccttgtctgttcgtggtcctcggtggttatctgcagcttgttaatcgtgtaaagtcaagagaagaatgtatacacatatgtgtgttgaataattactattggcataggtatgtgtatacacacggtgcaccaatctacagtatatatagcagagaatcagaggctaaaaatattaccccatatgttccagtattagtcatggattgcaaaggcttagtaacttgagcaggagagaaaactccctcaaagtcataaatcctgagtgacaactgctgctggatgacagatcccttcacctgtggacaacctggctgggggtggggggctgttccaccagctcacctgagcatgtagaggtgggtcctgcagtggtctcgtgggtattactgcttgtgtctgattgtcctgtattttgtaacactttagaagaatacagaaaagtgcagtaattctctttctccatagtatttaagcagaaatattgctagtttaatattgtgtcaggtcgtcctattaaccaggagcagatgacagtaaaatttcagtgaatagcaccttgacatctacaacttaaaaatggtgattgaagcaaaatatgtaaacttgtacggggtgatcgtgtgctttggaacagagtattgttgaagtaattagaagatatattaaggtgttcctggtaatgaaggcatgtaagttataataattgtagctttctgaataagtgtcaaactatatctttaagtgtgctgtatgctgagttacaagttaggtcatttatgaatggaatgtaaaataatactaaaaatgcttcaataacttatcttggtattgctaataaaaaaaaaaagctgtgaaacattagtgca

SEQ ID NO: 27491 - protein, 1300 aa, Homo sapiens; identical to SEQ ID NO: 3741

SEQ ID NO: 27492 - DNA, 3355 bp, Homo sapiens
gagagtgggtcattgcctcagataatttccacggaactctgtgtgcctctcctttaagaagaggtgaagccaatccctttcttgggagccttgagaagccgcctcaccgagaacagaaagtgcgctccaggtaccacccggattccgtcaaactacattacccagaaggcagtgctacaagggacggaagccgaccccaagccatagacggaaggcgcagaggggcgttcccgtagcggcgtgggcgggacttccggcgtccagtcttcgtccgccgttaggttgcggctgctgtggttgccaacgctacactgggtagaacgccagacaggggccacttttcgagaccgagtagagacggacagtgaggaggataggacccacttacacgcttttatgtcagccgcgatcccacccccacaagcgtctgcaaaacccttcctggggccttggcgacagccctgtgtcctcacggcgcgcagaggcggcgccgcgaaccttgtgtgcattttacacgacggcggggactgaggtccctcgcagcccagagccggagcccggggtcggccgagcccgcaggaccggcttcctcgccgactctcacggcctcacccagccccctgggcccatggcggcgccggcgttggcattagtatcatttgaagacgtggttgtgaccttcactggagaggaatgggggcacctggacctggcccagaggaccctgtaccaggaggtgatgctggagacctgcaggctcctggtctcactggggcatcctgttcccaaaccagagctgatctatctactggaacatggacaggaactgtggacagtgaagagaggcctctcccaaagcacctgcgcaggtgaaaaagcaaaacccaagattacagagcctactgcttctcagctggccttctctgaggaatcctctttccaggaacttctggcacagagatcctcaagagattccaggttggggcaagctagagatgaggaaaagctaataaaaattcaggaagggaacttgaggccaggaacaaacccccacaaagagatatgccctgagaagttgagttataaacatgatgatttggagccagatgatagtctgggcttaagggttttacaggaacgagtcactccacaagatgctctccatgagtgtgactctcaaggaccaggaaaagaccccatgactgatgcaaggaataacccttacacatgcacggaatgtgggaaagggtttagcaagaagtgggcccttgttcggcatcaacagattcatgctggagtgaagccctatgagtgcaatgagtgtgggaaagcctgtcgttatatggctgatgtcattcgacatatgaggcttcatactggggaaaaaccatacaagtgtattgagtgtgggaaagccttcaaacgcaggtttcacctcacggagcaccagcgtattcacaccggagataagccctatgagtgcaaagaatgtggcaaagcattcacccaccgctcttcttttatccagcataatatgactcacactcgagaaaaaccctttttatgcaaagaatgtgggaaagctttttactacagctcctcatttgctcaacatatgaggattcatactggaaagaaactctatgagtgcggtgaatgtggaaaggccttcacgcaccgctccacatttatccagcacaatgtgacccacacaggagaaaaaccatttttatgtaaagaatgtggaaaaaccttttgcctcaactcatccttcactcagcacatgaggattcacactggagagaaaccctatgagtgcggtgaatgtggaaaggcctttactcatcgctccactttcatccgacataagaggacccataccggagagaagccctttgagtgcaaagaatgtgggaaggccttttgtgacagctcttccttaattcaacatatgaggattcacactggtgagaagccttatgagtgcagtgaatgtggaaaggcttttacacaccactctgtttttattcgacataataggacccacagtggacaaaaacccttggagtgcaaagaatgtgcaaaagccttttactatagctcttccttcactcgacacatgaggattcacactggagagaagccctatgtttgtagagaatgtggaaaggcttttacccaacctgcaaattttgttcggcataataggatccacactggagaaaaaccttttgaatgcaaagaatgtgagaaagccttctgtgacaactttgctttaactcagcacatgagaactcacactggagagaaaccctttgaatgcaatgaatgtggaaagaccttcagccacagttcatcgttcactcaccatcgaaagattcataccagagtttaaaagatacaggaaggcctattacaagtgtgtttgtctttagtgaactcatagtggtgacatacctttccttttgagtataactattgagggaaatattttggccagagagatgtcttagtatctgataatttatactaactagaaacagaattgtccctgtgaaatctttttatggcaggtaatcacttgtcatccaaagaattatattaaagattcacccagtttagagccttacactgtacctgagaataatcgaggggagagacctggtggttaacatgcatttaggtaaaatgtcaggaacaactttcctcttattaatactataaatccatctcaagcatattttaaaataatgagagatggaggaaacaatctagaagataaaagaaaaagatgtgcataacttgttttcagtttccctgtttatgacagtttgtcatttggcgggttgggggatggagcagggaataagacattgaaaaagtctcatcccctttgtgtgttttacatatatatatctctaagtccagagccaggagagttggaccattgagggcagctctgccaacatttagtaaaagtattcattgttccaaaactgtcatctctacccttgagggagtgtgtctttgtgagaaatataaaggcttgagtcatgaaatacttaacacatgtgcacatgtacacatgtacatttatatgcagtgaattgttactcgtggtagttaggttctgtgaattttctgtgcacactgaattagtgaatgctgaatgattgttgctaggggaaatacagcgttagcttctgtgagcctctgatccaaacatttttatcaaccagtcaacacataaccttcttctatgggtatttgtttgtttgtttgtttaaagacactttatcagtgtttcttgaataattataattattctttataataaaaatattttaattatagc

SEQ ID NO: 27493 - protein, 588 aa, Homo sapiens; identical to SEQ ID NO: 3745

SEQ ID NO: 27494 - DNA, 3490 bp, Homo sapiens
gagagtgggtcattgcctcagataatttccacggaactctgtgtgcctctcctttaagaagaggtgaagccaatccctttcttgggagccttgagaagccgcctcaccgagaacagaaagtgcgctccaggtaccacccggattccgtcaaactacattacccagaaggcagtgctacaagggacggaagccgaccccaagccatagacggaaggcgcagaggggcgttcccgtagcggcgtgggcgggacttccggcgtccagtcttcgtccgccgttaggttgcggctgctgtggttgccaacgctacactgggtagaacgccagacaggggccacttttcgagaccgagtagagacggacagtgaggaggataggacccacttacacgcttttatgtcagccgcgatcccacccccacaagcgtctgcaaaacccttcctggggccttggcgacagccctgtgtcctcacggcgcgcagaggcggcgccgcgaaccttgtgtgcattttacacgacggcggggactgaggtccctcgcagcccagagccggagcccggggtcggccgagcccgcaggaccggcttcctcgccgactctcacggcctcacccagccccctgggcccatggcggcgccggcgttgtgctcggagagcatcactctaggtgccgtctttgaagaaggactctctaggtcctgctgttgttttaggggatcattccagcggaagtctggccctaccaaaagctgggagagggaatgagagcctcgagggcaagaggcattagtatcatttgaagacgtggttgtgaccttcactggagaggaatgggggcacctggacctggcccagaggaccctgtaccaggaggtgatgctggagacctgcaggctcctggtctcactggggcatcctgttcccaaaccagagctgatctatctactggaacatggacaggaactgtggacagtgaagagaggcctctcccaaagcacctgcgcaggtgaaaaagcaaaacccaagattacagagcctactgcttctcagctggccttctctgaggaatcctctttccaggaacttctggcacagagatcctcaagagattccaggttggggcaagctagagatgaggaaaagctaataaaaattcaggaagggaacttgaggccaggaacaaacccccacaaagagatatgccctgagaagttgagttataaacatgatgatttggagccagatgatagtctgggcttaagggttttacaggaacgagtcactccacaagatgctctccatgagtgtgactctcaaggaccaggaaaagaccccatgactgatgcaaggaataacccttacacatgcacggaatgtgggaaagggtttagcaagaagtgggcccttgttcggcatcaacagattcatgctggagtgaagccctatgagtgcaatgagtgtgggaaagcctgtcgttatatggctgatgtcattcgacatatgaggcttcatactggggaaaaaccatacaagtgtattgagtgtgggaaagccttcaaacgcaggtttcacctcacggagcaccagcgtattcacaccggagataagccctatgagtgcaaagaatgtggcaaagcattcacccaccgctcttcttttatccagcataatatgactcacactcgagaaaaaccctttttatgcaaagaatgtgggaaagctttttactacagctcctcatttgctcaacatatgaggattcatactggaaagaaactctatgagtgcggtgaatgtggaaaggccttcacgcaccgctccacatttatccagcacaatgtgacccacacaggagaaaaaccatttttatgtaaagaatgtggaaaaaccttttgcctcaactcatccttcactcagcacatgaggattcacactggagagaaaccctatgagtgcggtgaatgtggaaaggcctttactcatcgctccactttcatccgacataagaggacccataccggagagaagccctttgagtgcaaagaatgtgggaaggccttttgtgacagctcttccttaattcaacatatgaggattcacactggtgagaagccttatgagtgcagtgaatgtggaaaggcttttacacaccactctgtttttattcgacataataggacccacagtggacaaaaacccttggagtgcaaagaatgtgcaaaagccttttactatagctcttccttcactcgacacatgaggattcacactggagagaagccctatgtttgtagagaatgtggaaaggcttttacccaacctgcaaattttgttcggcataataggatccacactggagaaaaaccttttgaatgcaaagaatgtgagaaagccttctgtgacaactttgctttaactcagcacatgagaactcacactggagagaaaccctttgaatgcaatgaatgtggaaagaccttcagccacagttcatcgttcactcaccatcgaaagattcataccagagtttaaaagatacaggaaggcctattacaagtgtgtttgtctttagtgaactcatagtggtgacatacctttccttttgagtataactattgagggaaatattttggccagagagatgtcttagtatctgataatttatactaactagaaacagaattgtccctgtgaaatctttttatggcaggtaatcacttgtcatccaaagaattatattaaagattcacccagtttagagccttacactgtacctgagaataatcgaggggagagacctggtggttaacatgcatttaggtaaaatgtcaggaacaactttcctcttattaatactataaatccatctcaagcatattttaaaataatgagagatggaggaaacaatctagaagataaaagaaaaagatgtgcataacttgttttcagtttccctgtttatgacagtttgtcatttggcgggttgggggatggagcagggaataagacattgaaaaagtctcatcccctttgtgtgttttacatatatatatctctaagtccagagccaggagagttggaccattgagggcagctctgccaacatttagtaaaagtattcattgttccaaaactgtcatctctacccttgagggagtgtgtctttgtgagaaatataaaggcttgagtcatgaaatacttaacacatgtgcacatgtacacatgtacatttatatgcagtgaattgttactcgtggtagttaggttctgtgaattttctgtgcacactgaattagtgaatgctgaatgattgttgctaggggaaatacagcgttagcttctgtgagcctctgatccaaacatttttatcaaccagtcaacacataaccttcttctatgggtatttgtttgtttgtttgtttaaagacactttatcagtgtttcttgaataattataattattctttataataaaaatattttaattat

SEQ ID NO: 27495 - protein, 551 aa, Homo sapiens
MLETCRLLVSLGHPVPKPELIYLLEHGQELWTVKRGLSQSTCAGEKAKPKITEPTASQLAFSEESSFQELLAQRSSRDSRLGQARDEEKLIKIQEGNLRPGTNPHKEICPEKLSYKHDDLEPDDSLGLRVLQERVTPQDALHECDSQGPGKDPMTDARNNPYTCTECGKGFSKKWALVRHQQIHAGVKPYECNECGKACRYMADVIRHMRLHTGEKPYKCIECGKAFKRRFHLTEHQRIHTGDKPYECKECGKAFTHRSSFIQHNMTHTREKPFLCKECGKAFYYSSSFAQHMRIHTGKKLYECGECGKAFTHRSTFIQHNVTHTGEKPFLCKECGKTFCLNSSFTQHMRIHTGEKPYECGECGKAFTHRSTFIRHKRTHTGEKPFECKECGKAFCDSSSLIQHMRIHTGEKPYECSECGKAFTHHSVFIRHNRTHSGQKPLECKECAKAFYYSSSFTRHMRIHTGEKPYVCRECGKAFTQPANFVRHNRIHTGEKPFECKECEKAFCDNFALTQHMRTHTGEKPFECNECGKTFSHSSSFTHHRKIHTRV

SEQ ID NO: 27496 - DNA, 1010 bp, Homo sapiens
gagagtgggtcattgcctcagataatttccacggaactctgtgtgcctctcctttaagaagaggtgaagccaatccctttcttgggagccttgagaagccgcctcaccgagaacagaaagtgcgctccaggtaccacccggattccgtcaaactacattacccagaaggcagtgctacaagggacggaagccgaccccaagccatagacggaaggcgcagaggggcgttcccgtagcggcgtgggcgggacttccggcgtccagtcttcgtccgccgttaggttgcggctgctgtggttgccaacgctacactgggtagaacgccagacaggggccacttttcgagaccgagtagagacggacagtgaggaggataggacccacttacacgcttttatgtcagccgcgatcccacccccacaagcgtctgcaaaacccttcctggggccttggcgacagccctgtgtcctcacggcgcgcagaggcggcgccgcgaaccttgtgtgcattttacacgacggcggggactgaggtccctcgcagcccagagccggagcccggggtcggccgagcccgcaggaccggcttcctcgccgactctcacggcctcacccagccccctgggcccatggcggcgccggcgttggcattagtatcatttgaagacgtggttgtgaccttcactggagaggaatgggggcacctggacctggcccagaggaccctgtaccaggaggtgatgctggagacctgcaggctcctggtctcactggggcatcctgttcccaaaccagagctgatctatctactggaacatggacaggaactgtggacagtgaagagaggcctctcccaaagcacctgcgcagcttgcagatggccgccttctcactttgtgctcacatggccttccctcagtgccttcacttcttacaagaagtttaccatgttggccaggctggtcttgaactcccgaccttcagtgatccgcctgtcttggccttccaaag

SEQ ID NO: 27497 - protein, 126 aa, Homo sapiens
MAAPALALVSFEDVVVTFTGEEWGHLDLAQRTLYQEVMLETCRLLVSLGHPVPKPELIYLLEHGQELWTVKRGLSQSTCAACRWPPSHFVLTWPSLSAFTSYKKFTMLARLVLNSRPSVIRLSWPS

SEQ ID NO: 27498 - DNA, 1650 bp, Homo sapiens
gagagtgggtcattgcctcagataatttccacggaactctgtgtgcctctcctttaagaagaggtgaagccaatccctttcttgggagccttgagaagccgcctcaccgagaacagaaagtgcgctccaggtaccacccggattccgtcaaactacattacccagaaggcagtgctacaagggacggaagccgaccccaagccatagacggaaggcgcagaggggcgttcccgtagcggcgtgggcgggacttccggcgtccagtcttcgtccgccgttaggttgcggctgctgtggttgccaacgctacactgggtagaacgccagacaggggccacttttcgagaccgagtagagacggacagtgaggaggataggacccacttacacgcttttatgtcagccgcgatcccacccccacaagcgtctgcaaaacccttcctggggccttggcgacagccctgtgtcctcacggcgcgcagaggcggcgccgcgaaccttgtgtgcattttacacgacggcggggactgaggtccctcgcagcccagagccggagcccggggtcggccgagcccgcaggaccggcttcctcgccgactctcacggcctcacccagccccctgggcccatggcggcgccggcgttggcattagtatcatttgaagacgtggttgtgaccttcactggagaggaatgggggcacctggacctggcccagaggaccctgtaccaggaggtgatgctggagacctgcaggctcctggtctcactggggcatcctgttcccaaaccagagctgatctatctactggaacatggacaggaactgtggacagtgaagagaggcctctcccaaagcacctgcgcagcttccttctcacttctgtggaagagttatcatcctggccatggctaatttctccagcagaatctagattacactttctgccttctcaggtgtattagccatctactattaatatgtaacaatattaccacaaaccctgcagctgaaaacatcacttatttattatctcccacctatggattgggagtccaggcacagcttagctgggtcctctcaggcgtgtcataggcagctcatagctcatcatcaccatcagctcacttcttcaaatcaagccactgtgtgagactccagcaagacggatgttccagtcttataaaattacatatattttatcatgtacattccatcatctttgccatattctatactttagaagcaaatcgaggtcctgccaacattttaacaggggaactacaaaagggtgtgaacactatgacttggggatcatgagaagccatacgtgaatctctcagctgcatcagggaacatgcttcttcacttacttcctacctcttctatattttcatcccctctctactcaacattaaaaaaaaatgatgatgtttctgatacctgggggagacttttttttttttagtgctcttacgtctccagcagcatctacatattgttgactctatttcacctgaacagccaagcttgttggagaagtcttctcattctttgaagagacatctacacaagactttcctttatttattttttcccttatttttgtactgaggtgcaatttatacataataagtgtacaaatcata

SEQ ID NO: 27499 - protein, 95 aa, Homo sapiens
MAAPALALVSFEDVVVTFTGEEWGHLDLAQRTLYQEVMLETCRLLVSLGHPVPKPELIYLLEHGQELWTVKRGLSQSTCAASFSLLWKSYHPGHG

SEQ ID NO: 27500 - DNA, 1438 bp, Homo sapiens
tcttcgtccgccgttaggttgcggctgctgtggttgccaacgctacactgggtagaacgccagacaggggccacttttcgagaccgagtagagacggacagtgaggaggataggacccacttacacgcttttatgtcagccgcgatcccacccccacaagcgtctgcaaaacccttcctggggccttggcgacagccctgtgtcctcacggcgcgcagaggcggcgccgcgaaccttgtgtgcattttacacgacggcggggactgaggtccctcgcagcccagagccggagcccggggtcggccgagcccgcaggaccggcttcctcgccgactctcacggcctcacccagccccctgggcccatggcggcgccggcgttggtgagtggagggttccgcagcccgcgcgagctcgggtcaccgcccgcatgcacccatccgctgtaatacggcggatgccgggactctgtgcttctcccttttgatgccctaggttatggagatcccgggagagggtgaggtgagagggcagggctaatcacttcctacccagggtcctgaatccaggacaggagttgtaaggagaggtccctgtctctggctctaacctggagctgtcgcctcgctgccctcggcctccattccctcgggtctaaaatgcgagtctcagtaattttctctgtggagggagctggagagggtacgcttgtgacgtgggtcctgtctttcactgctcggagagcatcactctaggtgccgtctttgaagaaggactctctaggtcctgctgttgttttaggggatcattccagcggaagtctggccctaccaaaagctgggagagggaatgagagcctcgagggcaagaggcattagtatcatttgaagacgtggttgtgaccttcactggagaggaatgggggcacctggacctggcccagaggaccctgtaccaggaggtgatgctggagacctgcaggctcctggtctcactggggcatcctgttcccaaaccagagctgatctatctactggaacatggacaggaactgtggacagtgaagagaggcctctcccaaagcacctgcgcaggttggtgactgagagtctggcagcgggtatcagggcagcctgcagaccacccaggcatcactgtgtctgaaatgccatgggcagctattttgtggtcttgagcagtcatggagcccttgaccccatggtcccccgtcttcccacttctgtcacacactctttgcctttattcaggttggaatatgttaggtaggagacagattctaggctttaatgatttgccactcactagcctcatgactctggagaggttgtgtgacgtcactgtgcctttggtatataagttaggctgagttaatgaccttctctgaaaaataaactccaaaatcatgtgactcaacagat

SEQ ID NO: 27501 - protein, 81 aa, Homo sapiens [sequence omitted]

SEQ ID NO: 27502 - DNA, 1352 bp, Homo sapiens
gagagtgggtcattgcctcagataatttccacggaactctgtgtgcctctcctttaagaagaggtgaagccaatccctttcttgggagccttgagaagccgcctcaccgagaacagaaagtgcgctccaggtaccacccggattccgtcaaactacattacccagaaggcagtgctacaagggacggaagccgaccccaagccatagacggaaggcgcagaggggcgttcccgtagcggcgtgggcgggacttccggcgtccagtcttcgtccgccgttaggttgcggctgctgtggttgccaacgctacactgggtagaacgccagacaggggccacttttcgagaccgagtagagacggacagtgaggaggataggacccacttacacgcttttatgtcagccgcgatcccacccccacaagcgtctgcaaaacccttcctggggccttggcgacagccctgtgtcctcacggcgcgcagaggcggcgccgcgaaccttgtgtgcattttacacgacggcggggactgaggtccctcgcagcccagagccggagcccggggtcggccgagcccgcaggaccggcttcctcgccgactctcacggcctcacccagccccctgggcccatggcggcgccggcgttgtgctcggagagcatcactctaggtgccgtctttgaagaaggactctctaggtcctgctgttgttttaggggatcattccagcggaagtctggccctaccaaaagctgggagagggaatgagagcctcgagggcaagaggcattagtatcatttgaagacgtggttgtgaccttcactggagaggaatgggggcacctggacctggcccagaggaccctgtaccaggaggtgatgctggagacctgcaggctcctggtctcactggggcatcctgttcccaaaccagagctgatctatctactggaacatggacaggaactgtggacagtgaagagaggcctctcccaaagcacctgcgcaggttggtgactgagagtctggcagcgggtatcagggcagcctgcagaccacccaggcatcactgtgtctgaaatgccatgggcagctattttgtggtcttgagcagtcatggagcccttgaccccatggtcccccgtcttcccacttctgtcacacactctttgcctttattcaggttggaatatgttaggtaggagacagattctaggctttaatgatttgccactcactagcctcatgactctggagaggttgtgtgacgtcactgtgcctttggtatataagttaggctgagttaatgaccttctctgaaaaataaactccaaaatcatgtgactcaacagat

SEQ ID NO: 27503 - protein, 81 aa, Homo sapiens [sequence omitted]

SEQ ID NO: 27504 - DNA, 1214 bp, Homo sapiens
gagagtgggtcattgcctcagataatttccacggaactctgtgtgcctctcctttaagaagaggtgaagccaatccctttcttgggagccttgagaagccgcctcaccgagaacagaaagtgcgctccaggtaccacccggattccgtcaaactacattacccagaaggcagtgctacaagggacggaagccgaccccaagccatagacggaaggcgcagaggggcgttcccgtagcggcgtgggcgggacttccggcgtccagtcttcgtccgccgttaggttgcggctgctgtggttgccaacgctacactgggtagaacgccagacaggggccacttttcgagaccgagtagagacggacagtgaggaggataggacccacttacacgcttttatgtcagccgcgatcccacccccacaagcgtctgcaaaacccttcctggggccttggcgacagccctgtgtcctcacggcgcgcagaggcggcgccgcgaaccttgtgtgcattttacacgacggcggggactgaggtccctcgcagcccagagccggagcccggggtcggccgagcccgcaggaccggcttcctcgccgactctcacggcctcacccagccccctgggcccatggcggcgccggcgttggcattagtatcatttgaagacgtggttgtgaccttcactggagaggaatgggggcacctggacctggcccagaggaccctgtaccaggaggtgatgctggagacctgcaggctcctggtctcactggggcatcctgttcccaaaccagagctgatctatctactggaacatggacaggaactgtggacagtgaagagaggcctctcccaaagcacctgcgcaggttggtgactgagagtctggcagcgggtatcagggcagcctgcagaccacccaggcatcactgtgtctgaaatgccatgggcagctattttgtggtcttgagcagtcatggagcccttgaccccatggtcccccgtcttcccacttctgtcacacactctttgcctttattcaggttggaatatgttaggtaggagacagattctaggctttaatgatttgccactcactagcctcatgactctggagaggttgtgtgacgtcactgtgcctttggtatataagttaggctgagttaatgaccttctctgaaaaataaactccaaaatcatgtgactcaacagat

SEQ ID NO: 27505 - protein, 82 aa, Homo sapiens
MAAPALALVSFEDVVVTFTGEEWGHLDLAQRTLYQEVMLETCRLLVSLGHPVPKPELIYLLEHGQELWTVKRGLSQSTCAGW

SEQ ID NO: 27506 - DNA, 643 bp, Homo sapiens
ttccggcgtccagtcttcgtccgccgttaggttgcggctgctgtggttgccaacgctacactgggtagaacgccagacaggggccacttttcgagaccgagtagagacggacagtgaggaggataggacccacttacacgcttttatgtcagccgcgatcccacccccacaagcgtctgcaaaacccttcctggggccttggcgacagccctgtgtcctcacggcgcgcagaggcggcgccgcgaaccttgtgtgcattttacacgacggcggggactgaggtccctcgcagcccagagccggagcccggggtcggccgagcccgcaggaccggcttcctcgccgactctcacggcctcacccagccccctgggcccatggcggcgccggcgttgtgctcggagagcatcactctaggtgccgtctttgaagaaggactctctaggtcctgctgttgttttaggggatcattccagcggaagtctggccctaccaaaagctgggagagggaatgagagcctcgagggcaagaggtgaggcgggagcagcatttttggcaggaggctagaagacaagaagctcattggatttatctttgcagatgccgtctgtttattacaaatgaatctggcttgccgcctaa

SEQ ID NO: 27507 - protein, 45 aa, Homo sapiens
MAAPALCSESITLGAVFEEGLSRSCCCFRGSFQRKSGPTKSWERE

SEQ ID NO: 27508 - DNA, 1791 bp, Homo sapiens
cgcagtttctggagccattcacccacaggctcgcatcacggtggcttcaagttggtggtgcgtcccttgggccctcacccgccggactcctactttcaaatcttaagccccacattgtgggaacctgttcaggtcacttcagtctaggccctggtgtttaggctgggggaagcgggagagctcatgggtgatgaagccgtttctgaaagccagtgtgagtaatgtgacctttgaggaagtggccatgcacttctcctggagggaatggagtctccttgatgatgttccgaaactcctatactgcagtgtgatgctgagaacttttcactgatggcctcaatggggtatcttcttccaaaattggaactgagctacctgatggaaaatgagcaagattattgtgtggtgaagagaggcctctcataaagttcctgtccagatatcccaaatgacccagcaaaagggacatttcgtttgccccctcacagccattgtatgtgagtgtcttgtgatgatgatgatgatgatgatgatgatgatgatgatgatgatgatgataaaaatagccgtaatgcatttcatgagtactgactttgtgccaggtcctgtgcaaagctctattacttcccatgaggaatctccatctcaaggctcagagagatgaactgctggcgcagggatacacagggaggaaagtcaaggcgtgagttgcctggtagagacatttgagagtgggtcattgcctcagataatttccacggaactctgtgtgcctctcctttaagaagaggtgaagccaatccctttcttgggagccttgagaagccgcctcaccgagaacagaaagtgcgctccaggtaccacccggattccgtcaaactacattacccagaaggcagtgctacaagggacggaagccgaccccaagccatagacggaaggcgcagaggggcgttcccgtagcggcgtgggcgggacttccggcgtccagtcttcgtccgccgttaggttgcggctgctgtggttgccaacgctacactgggtagaacgccagacaggggccacttttcgagaccgagtagagacggacagtgaggaggataggacccacttacacgcttttatgtcagccgcgatcccacccccacaagcgtctgcaaaacccttcctggggccttggcgacagccctgtgtcctcacggcgcgcagaggcggcgccgcgaaccttgtgtgcattttacacgacggcggggactgaggtccctcgcagcccagagccggagcccggggtcggccgagcccgcaggaccggcttcctcgccgactctcacggcctcacccagccccctgggcccatggcggcgccggcgttggtgagtggagggttccgcagcccgcgcgagctcgggtcaccgcccgcatgcacccatccgctgtaatacggcggatgccgggactctgtgcttctcccttttgatgccctaggttatggagatcccgggagagggtgaggtgagagggcagggctaatcacttcctacccagggtcctgaatccaggacaggagttgtaaggagaggtccctgtctctggctctaacctggagctgtcgcctcgctgccctcggcctccattccctcgggtctaaaatgcgagtctcagtaattttctctgtggagggagctggagagggtacgcttgtgacgtgggtcctgtctttcactgctcggagagcatcactctaggtgccgtctttgaagaaggactctctaggtcctgctgttgttttag

SEQ ID NO: 27509 - protein, 71 aa, Homo sapiens
MTQQKGHFVCPLTAIVCECLVMMMMMMMMMMMMMMMIKIAVMHFMSTDFVPGPVQSSITSHEESPSQGSER

SEQ ID NO: 27510 - DNA, 2150 bp, Homo sapiens
tgcaggcgtttggcaccagatggtcccacgcgctctgttcgacggttgggggccgcggacgctggttgtcagcagcactgggtcagccggtgaacgggtgtgcagcgtcctcagcgccgcagcagtcagcacctgtgggtgctctagctctttccctcggggtcaccggaggcagagcctcccctacgcggagtagaggagcagctcacatggcagccgccacagaggacaccagatcatgccaacacccccacaactcctgcccgcctgcaggcagctctgggctcaggacaccgcctgcaagaacctttatagcgcagctctccaaaccttggaggcgaggacattctatgtgcccgccctggaaaggcctgaacctataacatctgggctgtgatggtttctgaggtggacaccaggaccaacacttgtcagcatggcacaatcaggcatttctcttctaagtaggatgtgcagccaaaaactcagctgtctgtgagctgtcttctcccaggaacgaggacataagatgtacatcaggttttgatattagagtaatactggccttatagaatgagttacgaaaagttgcccctttctccactttctgaaagagtttgtgtaacacaggtctgaactgcacagatccacttacatgtggattttcttccactgcggcctctcctgagacagcaagaccaacccctccttttcatcctcctcctcctcctcagcctactcaacatgaaaatgacaaggatgaaacctttatgatgatccactcatccattttcttttctctagcttattgtgaacatcttaggctagtgtgtcgacttctgacttggctcatctgaacccaagtccttggacacattcacaaacaccccagggtcttgggcttccagtttgtgctagaaggacaaagggcaggtgaagcttgtttgccgtaactagaaggagcagaaactgctcccagcagaacaagatcaaatcatggggaacagtggtcacctgccatttctagaggaagcttttgcttttggtcactgaggaccctaagtcttacatgagaagaaaacaaatagggtgatgctgcatgcttctgtccccaaagaatccctgtgcaggtgccgagggtgccccaaagacgaggctgtgcttgccgtgcccaccacagaagcacatttgacctgatcaaaagcaggtggaaaaggtcctgaagcacagatattttctcagtgatgttgttttctccaaaatgaaagagggaaggtaccctggcttaggcccctggtgttctgattgaaggtgagaatggaagtatcttcttcaacatgttctcccatctgactgcaacaagtgtgctccagccaccagtgtcccagttgctctgaatgatggtgagaagggtacccaaacacttgaatggtactgtaccctctacttgccatctgaatcctcacttgtggaacccaggcactctggctgtattcgcgagtaagcataggtgtgggactgtgtcctgccattgcaccatctttaatctggacttgtggacctcaggctctctgactattcatggacagaagtttctgcaggcacaggtggggtgctgtttcctcccattgtacacctgaattcaggacttgtggaccccaggtgttctggctgtgttcatgaacagaagtgtcccccccaaacaaacccatatatggtgccatctcctcccattacaggtatggtgccatctcctcccattgcaggcattgcactgcctatactctggacttatggccctcacatgctctgattgtattcataaacagtagtttcttcagtcacagatatggcaccagcccctccaacagaaacagatgtgctcaagctgagtggtccaaaggcgtttgacagaagtcatgaacagaagtatcttggggcacatgtttcttctctgttgtgcaggcttctccagcagtaacaggtttgcccaggccatatgggccccaagcgctctgaccagacacaagaagagaagacttgcagtcacaggtagtgtgttgtcccctgctactgcaacataggtgcttggaaaggtgcaacagggtgctctgcttgtggtggaaacataaaggcctccaagcatagat

SEQ ID NO: 27511 - protein, 57 aa, Homo sapiens
MAAATEDTRSCQHPHNSCPPAGSSGLRTPPARTFIAQLSKPWRRGHSMCPPWKGLNL

SEQ ID NO: 27512 - DNA, 5523 bp, Homo sapiens
atgaagcttgtagaagaggttgccggtgaagagcagcctgtgcgctgcacaccctgttacgcaattgagccgccgttggaacgcgtggagagaaagggtgcgcgaggccagggctcgaagaaacgcagcagagggcaaagggcgaggtccaacggcccagccccagcaggggactctcgagcttcgggattccgcctacccggtagcggctgtttagacccagaccggcccctgcgcgatatgagcaccgctcaggactgcagctgttgggcaccagcagccaggtctgcaggctccgcgaagcctggcccggaccgtagcttctgcaagcagtccaggtgtatcctggggtcactggagggcagagcctgctcagagcgagtacagaagcagcccaggtcttcccagcaccaggttcactggaagtgccaggccaccacctccttcatgctcctctgtgatcacctctccaagtcccggtgtcaggagccttctctgtggccgccctggagagacttgagcctgggacgtgacgtgctgggctgtgaagctttctgagaagggaaacctgtggcctgacctgcctgaatgctgcacccaacctcatctcttcctgggagaaaccaacaactgtcagcattgacaccatcaggcctttctcttctaatttaaccttgcagccaaccacacggctatctgtgcgggatctctccccaagctcaaggacatgagatgcggatcaggcccaagaggctggatgccaaacctatcctctccatgtgaagcaccaacttgggggtgtcaactaaaaatatgagacccgtaaacttggaaaggaagactttatttcttgagaagggttgcaaactgcaggctgggaagtggcacctccagctgagaccacaaacagtggactttctcaaactggggtattgacctctgatgaaccgccatgcaaacccgtgcctttcaacataaaaagaagcccttcgaggtgctcaccttcaagcttgctagaggaggaggaagagcaggttgagtttgacataactagaatgggttgagcctttccagcagagtaaggttctttcatggtggacagtggccacccactgccatttctacaagaagattttgcttcttaggcactgagttcctggttctttcactagagaaaaatgagtaggttggcaatccagtacttccatcttctgtgaagacctgggcaggcaacgggggcttgggggcgggggcagggaccaaagacaaggctgccatttgctgtgcccaccacagagggacatttactccacctgaagcacaagtattttctcagtgatgttggctcctacaaagtcaaaaggggtaggctccctggcttacgctccaggagtttggactgaaagggacactaaaagtgtcttcctctaagtttatgatgttgccctcctctggctacaacagtgctctggccataagcatcccaggttctctgaatgatggtgggtatggaaatgttcccaaacacaggtatggcggtgtcccctcccactgtaccaatctatgcccagggctggaaggtccgtggtgctctgaactggattcataaacagtagcatctccaaccacaagtgtggtgtcaggccctccaacagtagcacatgtgctcccgtgggtgcctgatagaaagtgggaacatgtgtttattagccaggtgggccccaaatgctctgacgaggtgcagaaagaggactctttgtcacagttgtgctgtgccctcccattgcaacacatgtgctctgaacaggtggagcccaggtgctttgcatgtaggcggacacaagagggcctctaagcacaagtgtggtgttggaaccctcaaggctaccgatgcattctggccaggtgtgtcccaggtggtctgactatagacagcaacagaattatctccagcaccgttatagagatacccgtccaactgatgtgctctagcgggatgggacccgggtgatccgaacacaaggaggaacagaagtttattctgatatatgctccttcttagcgatgttatctccttcaatagtaacaggtatgctttggctgggtgggcctcagtcactctgtagccaggaaggaaagggctcccaaaacagatttctgctccgtagagctgatcttccctcattgcaacagggatgctataggcaggcaggacctggtgctcaggtctaagcccttcctagaataagttgtggttctgagtgttgtcagcccttctgcagatttcaatgacccctgacaaggagccagggtttgggacagacacaatgactgcaaacctgccaccacccaaaggggcttagatattgatggtgcatggcactgctgcagtggccctttatcttgatcccctttttttttgagacggagtttcgctctgtcgcccaggctggagtgcagtggcgcgatcttggctcactgcaagctccgcctccagggttcatgccattctcctgcctcaggcctccacctctcaggttcaagcgattctcccgcctccgcctctgcctcctgggttcaagcaaacctccgtctcctggatccaagtgattctcctgcctcagcctcccaagtagctgggactacaggtgtgcgcaaccacgcccagctaatttttgtatttttagtagagatggggtttcaccatgttggccaggctggtctcgaactcctgacctcaggtgatctgcgcgcctcggcctcccaaagtgctgggattacaggcgtgagacaccatgcccggccctcagtctcttttaagcaaggatcaggggagtaatcagatggcccatatagcgctcctgctattgaaggagcgcagatgtcgctcagatagcgacaggaagagaagtcagtttccccctgcaggtaggatcagtacttttcctaagtggctgcacttctttgaggtgcaagcatacagtgctgtctttctgagagccctggcatgacaccaaggggaggcccccttctgatgtaaacactgagcttgctgggttgcataaggcctctcaggggtgatataaaccgagggggtaaaggtgaccgtgttgctcccaggaactgttttcagaagatgcacaggtgcagcaggaggattcctgccagaagcaggaacagagagggcagggagaaaaaggaggatggtggcctgggggccaggcggggtgaggcttactgaggaagttgtccgtgaagagcagtttgtgtgctgtctgacactgagagtctagtaagaaatttggagaggtctcctagctgcatgttcctccaaggcaaaccatgctggatgtttgtgacatgtcattggaacacacaccagagaaagtgtgtgctagagcagagagggaagacaaggcaccaaaggacaaaggggaatcccagcaggacttttgagagcttgagacagctcatgctctttgcaggtgcttggcaccaggtgtgcccgatgacatggaaaagcatccaggactgtgtattataggaccccacataactgtcacccccagatcaccaggtctgcaggctcctcagcatctaacctaggggcagcaactagtgcctgtgagtctcctagcccttttctctggggttattggaggtcagaggtcagagcgccctagatcctgccaggaaggggccctggctcacaggaggtcagggtaggagaggtgggggtgtggccagcagggatcaactctgtctcatgccattactggtgcacccaggtggcccagcagggctgcagctgcaagacacgtgctctgatggggaggagagaccaagcagtgtggggcgtgatttgccctgacctcttcctttcaggcaacctctgcagaggacactagtttacccccacaatgtccccttcccatgtggtagctcagggttaccacacactgtttcctccagggatccctctagggcctctcaagtcttggagcaggcatatcttctctgtggccacccaggaaggtgtgggtccatgggcatgagatgtgagtccagctgggctgtgaaggtttctgagatgggtacttggcaccccaattttcccaggtcctgcaccccataccatcccttccaggcaagcagatcttccctcttttaacaaatttttcgaattgcaaacagcatttaggactttgcgccttcctcaggtcacccatgtgggcgtaagggagagtcaggatttgaactcagactgtctgattccagagtttatccattgaccacctgacagtggtgatgcctcatcatgtgtgtcacgtatttacatttttaaatagtccttagggtacttagcaccatgtacacctgtcatgagagtgttcactgcctgcatcagaagatgcagggtggagagcaccaattgtcagcacaaccatattgggcatttctctgctaaatgagtcttgcacaaaccacacagctgtctgtgaactatcttctcccaggtacaggacaggagaccacttaggtgcaagatacactctgtcttaagagccttatgctccaaggacaccaacatctcttgtgacaattccatagacctactttttaggatcctggctgaaattggcaatttactgatatcaaatagtgtactctatcaggatggtaaatagttccttatatttagaactcttttttttttttggacagagtttcactcttgttgcccaggctggagtgcaatagtgcaatctcagctccctatagcctccacctcccgggttcaagtgattatcctgcctcagcctctcgagtagctgggactacaggcatgcaccactatgcccagctaattttgtatttttagtagacactgggtttcaccacgttggtcaggctggtctcgaactcctgacctcaggtgatccacctacctcagcttcccaaaagcgtgagccaccgcgcccggcctttagaatgctttaattttctctcagagactattttgtggttgggaatgacaaattacagttcatgagctgaattctttccagtctgtttctgtaatgccaataaccttagaatggtgataagagttttcaaagtttgtagaaaagaggaaaggaaaaaaggaagaaaaacagaggaaaatatgcaacagagaccatatgcaatcttcagagcctataatatctactatctggtcctttacagaaaaatttgcctcttttgtgattttcagtgtataagtcttgtacagtatttactaatttatccttatgtgttttataagttttttgtatgctatcgtaaatggtatcttttacattttagttttcagtattcaccactggaaaatacagttgatttttatatattcaccttgtatgctagaactttgctaaattcactctttacttttaatagtttctttgtgaattccttaggatattctatgttcacagtcatgttttctatgaacaaagagagttttgcttcttccttttt

SEQ ID NO: 27513 - protein, 185 aa, Homo sapiens
MKLVEEVAGEEQPVRCTPCYAIEPPLERVERKGARGQGSKKRSRGQRARSNGPAPAGDSRASGFRLPGSGCLDPDRPLRDMSTAQDCSCWAPAARSAGSAKPGPDRSFCKQSRCILGSLEGRACSERVQKQPRSSQHQVHWKCQATTSFMLLCDHLSKSRCQEPSLWPPWRDLSLGRDVLGCEAF

SEQ ID NO: 27514 - DNA, 471 bp, Homo sapiens
cctcccagcttcaagcaatgctcccaccttggcctcccaaagcgctgggattacaggcatgagccaccatgcctggccattgccattgcacttcagctggttctcctgaaccttgaattatcttaggaaagattgtattttcaggaattaagtctattggagacacagcaggactccacagccagctagatttggataaaatgtagactgcctcaaggccagtgtgttgacttctgaccagtctcatctgaacccacaccctttaacatatatacaaaacacctgaagggttgggctgccagctttctttaggatgatagagggcaggttaagtttgtttgacataactagaagaggtggagcctcttcctaatggagcaaggtccatttatggcaaactgtggtcccccaccactatcagctacttctggatagcttttgcttaaagttgatgagatattgtttctttca

SEQ ID NO: 27515 - protein, 41 aa, Homo sapiens
PPSFKQCSHLGLPKRWDYRHEPPCLAIAIALQLVLLNLELS

SEQ ID NO: 27516 - DNA, 899 bp, Homo sapiens
tgaacttagggcatccccatctgggctgtgaaggtttctgacttggggaccaggtgctcagaccttcctggatgctgctttccacaatatctctaccaggcaggcaggttctcttcattttgcaaatttggtgaaacagcatttgtaaaactttagaagcttccttggctcacacaggtggtagtggccctgtcaggatttgacccaggctctcggattccagagttcctgaatttaaccacctgtactgtgatgcctccttatcatgtgtgcatcgtgcattactattttttatagcctgtagggtactgagcaccatgcacacctacagtgatcacaggcactgcctactggaaggtcttctttggctgggttccagtttcctcagacgatgtagggcagggagttccacttgttagcatatcccacagggcctttctcttcaaatggaccccagcagccaaccacacagctgcctcagcaagcgtaggagatggcacatcagagaccaacaattgtcagcacagcaaaactgggcatttcttttcttactgagctttgcagctacctacacagttgtgtgtggcatctcctcctgggtgcaaggacatgagatgacatcagttactgtgatctccagtaaaatgtttaatacaagtggagacaatagataaccttttccaactcctgatcggggggtggaaagtgctcagtgtgctattaacttaaggcttttatagatgtgctttatcatgtaaaggctgttccctccaattctttctatactgagaaattttttcaaagaggtgttaaattttttcaacccatgtcacaaatctgcatatgtactcccctaaacctaaaataaaagttggaaagaaaaataaaactattacttg

SEQ ID NO: 27517 - protein, 75 aa, Homo sapiens
MDPSSQPHSCLSKRRRWHIRDQQLSAQQNWAFLFLLSFAATYTVVCGISSWVQGHEMTSVTVISSKMFNTSGDNR

SEQ ID NO: 27518 - DNA, 1682 bp, Homo sapiens
ggctgaacacggtgcgcttcacctcggagttcccactccactccaaggatccaacagcgcacaagctgctcttcacgggcaactacctctgcaagcttcacccccggccccgccacgccccgcagggttccctgtctggtctggatcacctcgctctccctgcgcctctctccttggcctagctagacaagtgcttctcacgatccagcgcgtttaccgctcggtttcgtcgccgctaaggggtggtggtgtctgatccgtcaggctctgcgcttctctctcggatccatcctcaatgtccaggcaggactctcacatgaagccggtgctgtctgctgttcactctaagatgtccagccactcaggacagttacgatctgtcatccagggcccaaaccgactctcctctattgctatctgaggtaggcagtctcctctgtgaggtcggtcccatccatactgcctagatccctgcgcaggaagactgagatgaggaccctaggagacagcagccagggatagcgaaggtggaggatgagtataaatagcgaccccagcgcgatcagagaagctcccttacccccacccatcgcagtgggagtgagtcttcagatctacccccaagacaacgaaatcctacccgggccattgaagggaaacctccactccaacccccagaagacgccttagatgagaaagtgaagagatattgtatgagctcattcatcaaaggccatgccatcaccagctcaggcagtgctgctaggggattcctgcctctctggaggtccagttctctctgaagacagagaagatgcagggaggaagggtttcaaacaggaactctcaacccacgtctgccagttgtagactctgtaaacaaagttccaactcgcccgctgctgccactgccgctgctattttttgaggtcaagactcttccacctgtatgcccatcttcatagaccggcccatcactggtgcctcaagcattttcactatcacagccagtaatctgcagactcaacctcaagcctactttgtactttggtataaactgcatggataccaatcccttttcacaggttttcatctcctggtctcccataggatccaggatgagtatcctcccatttgaccagttccatcccagtatggagcagatatcccttgtaaagaacacagtctccaccagcccacctgcttttatggtcaacagccctacctgaatttccaacattgccttttgacccaagaaacacctatcacctgaaatctagggttccagacaggcatcaacaggaaaccactctcttcaatgccctgtcttttctggcccacctaccactgcttctgcagtcacctccactatagtaagcagaccctcttcagacttggcatccaagcctgccttttactctgatgaaatcaacatggataccatgcccatttccccatctgttatcttcctgtctctccctgcaatgttaacagctgtttccctttgaagaacctggcagcccccagaaatccttcctacttaacctctactgcagccctggaacccaatgacagcaccactcaggcagcttttgggaatttgactcccccatgtccacctttggcatctgctatggtttgaatgtgtcaaccaaatttcgtgtattaaaaactcaatcccc

SEQ ID NO: 27519 - protein, 62 aa, Homo sapiens
MPIFIDRPITGASSIFTITASNLQTQPQAYFVLWYKLHGYQSLFTGFHLLVSHRIQDEYPPI

SEQ ID NO: 27520 - DNA, 3156 bp, Homo sapiens
gctgggagccatagacctcgaagctggggcgtctgacacctgaggcccgaagtaggtggccagcttcttagagggccaacccagggcattaacacaccaggtcagaaaaagcaaaaacaaaaacaaacaaaaaatgataatctataccaaaatatgttattactttaacacaaaaatatgaaaactaggtgtttgaaattatctttccgtactgtttgcttttcgctacagaaatgctattatttaacagaatattaataggattaatagtggcaattagactaatcacgtgtgagaaaaatatatttctgtcctctgatacaggaattttaagtttctattaaatatttaaattttgtgggttctatctaagatgctaaatgtaagaccttttaaaaggagaatgtaaataaggctaatcaaacagatattaactatatgtaataggcatttatctttctgtcccatcatacgtttaggagatatttactctttctggttccttttccagtaacacctctctgtattagctgcctgtagcctttatggcattcttcttttggtttatgtaatgctaaaactgaatacaggcaaacgtgaaattcaccttgactgtcagctccgctttttgtttgttttgtttttgttttgttttgagacagggtctccctctgtcgctcagactggaatgcagtggcgctatctcggcttactgtaacctctgcctcccaggttcaagtgattctcccacctcggcctccagagtagctgagactacaggggcgcgccactacacctggctaatttttgtatattttttgtagaaatggggttttgccatcttgcccaggctagtctcgaactcctgggctcaagcgatccacccgcctcagcctcccaaagtgtggggcagtccaaggagagccggtgctgcggagcagcccgattccaggggaaaaccatttcccttctggctcccccaactgttgagagctacttccactcaaaaccctgcagtcatcctccaagcccatgtgtgatctgattcttctggtacaccaagacaggaaccccgggatatgaaagccctctgtccttgcgataacgcagggatctaattgaattgactaacataagccgcctgcggacagctaaagagcatcctgtaacacgcccactggggcttcagctataaacattcacccctagacactgccatggggtcagagccccacagcccgcccgtctgtatactcccctggaggtttgagcagcgggacactgaagaagcgagccacacccccatcgcacgccctgccagggggacaagggaacttttctcttatcaacatcaacctaagtagcctcgcatcaaaagcatttgactgtcaatagttaggattttccctaccagcagtagcaagtttttagccttattggaattagtttccagctctgcaaaaatgttcatctgctttgtaactccaggcttttttggtagagcagctgtttgttgaccagtcgctttgcctctgtaagttcaccatataggctattcatgtctaaagtgttcattttcaaaccctctgaaactcattgggtatctattacaatgtctgaagacaaatatttcattaacaaataagaaggtgatagacctggagtgagaatccacccaattcatgtcaatcggagacaaatttgcaatatcctgtgattcctgaactggctgtggtcactgatcacttctgtcctggaggaactagagacattcaagacaaataaggactcatctagtcccctgattaaaggacttttcatagaggctgcattaagggccaaattatgtacaatgtgctctctgagatggggatgtgtaaatagccgtcaaaatgtcatctgggcagaaatttgtttgggaggataaatttatgttcaggggtgaggggtgaatacaatagaaatttgtattttgcagagggaaatgtgggttccatggtgggtagaaataaaatagattagtagaatacttagaatgtcaaagaaatttttaaatcatagggttttttttttgagaaaatttttgaaatgattttgaaatgatttattcaaaaagtgcccctcaaaagtgatcactccatagatgacagctaaggatcgcaatcttactgctatgcccttgtgttttgagtgaagacttgtgtgactatagtgagggtctaggtgtttaatcgtcagaggtaaattggagatttcagatgaggctgtctcatggaagagggaggaaggatactcacaaaccctacagctggaatctgagcatccagtggaaaatgacagtccctgatccctcaggaaactttctctggccactgtcagtgatgttctaatctaggagagcagaactttcccccttataatgtttctcactgcatttcctgaaatatatttcgtctaagttccatacgtttatctgaaaagaataaccacttaccaaattgtgtttccaactaggatagtggccgcagttgtattatcttgtgcatttgtcaagagaggtcatccgaacgctgagataaaggcttgggattccattgtctcatctctttctgggagtgattttcctctcatctggaagtgcagagacagagtcttcatagggaactgagattacctccaaaaaacatttgtgaagtgagcaattcctagaaggctgttaatgttgattaatgaaattatacaaaaagaatcataagatagctggagaagaaaattatctgtgatgcctggaaaagatacgtcccagtgggaggtaagtacagaatcctgagttctgagatgtgaggaattcagttgaggtaatggttctactataattgtggctaccattaaatttttgtttcttcaaattatgatttatttctcttcctgataacattgaacaatcataaatgtggagggaaaggaatcattgagggttgatttagagagagtaaacaggtgtaaagccatggttcctgtgtgttttaacaaatactaactgagcacccgccctgttgcagatgcatttctagatgtgtgaacaaagaaatttatctaccttaatttgaattgagagaagcagacaataaataataaaggaaatgttataagtta

SEQ ID NO: 27521 - protein, 72 aa, Homo sapiens [sequence omitted]

SEQ ID NO: 27522 - DNA, 625 bp, Homo sapiens
ctcgaagctggggcgtctgacacctgaggcccgaagtaggtggccagcttcttagagggccaacccagggcattaacacaccaggatagtggccgcagttgtattatcttgtgcatttgtcaagagaggtcatccgaacgctgagataaaggcttgggattccattgtctcatctctttctgggagtgattttcctctcatctggaagtgcagagacagagtcttcatagggaactgagattacctccaaaaaacatttgtgaagtgagcaattcctagaaggctgttaatgttgattaatgaaattatacaaaaagaatcataagatagctggagaagaaaattatctgtgatgcctggaaaagatacgtcccagtgggaggtaagtacagaatcctgagttctgagatgtgaggaattcagttgaggtaatggttctactataattgtggctaccattaaatttttgtttcttcaaattatgatttatttctcttcctgataacattgaacaatcataaatgtggagggaaaggaatcattgagggttgatttagagagagtaaacaggtgtaaagccatggttcctgtgtgttttaacaaatactaactgagcacccgccct

SEQ ID NO: 27523 - protein, 53 aa, Homo sapiens
HTRIVAAVVLSCAFVKRGHPNAEIKAWDSIVSSLSGSDFPLIWKCRDRVFIGN

SEQ ID NO: 27524 - DNA, 2634 bp, Homo sapiens
ggtgtgacggctcaggactgcatttcccagaggctgcagctatccggccaatgtagcctgaaactacatttctcagcggccactggaacgacctcaatctctgcctcctcgccagttcattgtggtcgttgacccggcagcgagctttggagttcatcgagggagaagtcagcgcccagctccgaggttggagcagccccgccgggcaacttgaatttctgcaaacgaacacagcaccgggagctctgcagacctgtgtcggcgcggaacccggactgagacatgccttttgaacttctcagatagaggaaccccagtgaagactgatcagttcttacaattctcaaagcatggcccataaatatgtgggtttgcagtatcacggatcagtgacatttgaggatgtggccatagccttctcccagcaggagtgggagagtctggactcttcccagaggggcttgtacagagatgtgatgttggagaactacaggaacttggtgtcaatgggacattcccgttctaaaccacatgtgatcgccttattggaacaatggaaagagcctgaagtgacagtgaggaaagatggaagaagatggtgcacaggataagaaagctccagtctacaaacaaaacatgccagaagatttttaggcgatgatgccacctgcacatggaaccaaaagatttgcagttggaagatgatacaatcggctgtaaagaaatgcccacctctgaaaactgtccatcttttgctctacatcagaaaataagtagacagaaaccacgtgaatgtcaggaatatggaaagaccctttgtcaagactcaaagcctgttcaacatgaaagaatacatagtagtgaaaaacccaacagatgtaaagaatgtgggaagaactttagtaatggacatcaactcaccatacatcagagattgcatgttggtgagaaaccctataaatatgaaaaatgtgggaaggcctttatcagtggctcagcctttgttaagcatgggagaattcacactggtgagaagccactcaaatgtaagcaatgtggaaagactattagtggtagctatcaacttacagtacataagagtattcatactgggaagaaaccatatgagtgcggggaatgtgggaaagcttttctagtatatggaaagcttacccggcatcagagtactcacactggtgaaaaaccctttgggtgtgaggagtgtgggaaggccttcagtaccttttcatacctggttcaacatcagcgaattcataccagtgaaaaaccttacgaatgcaaagaatgtgggaaggcctttagcactagctcaccccttgctaagcatcagagaattcatactggcgagaaaccctatgaatgtaaggagtgtgggaagtccttcactgtgtatggacagcttactcgacatcagagtattcatactggtgagaaaccttttgaatgtaaggaatgtggaaaggcctttagacttagttccttccttcatgcacatcagcgaattcatgcagagataaagccctacggatgcaaggaatgcgggagaaccttcagtcgtgcctcatatcttgttcaacatggaagacttcacactggcgagaagccctatgaatgtaaggagtgtggcaaggcctttagtactggctcataccttgttcagcatcagaggatccatactggggagaaaccctatgaatgtaaggaatgtggcaaagcctttattagtcgccatcagcttaccgtacatcaaagggttcatactggagagaaaccctatgagtgtaaggaatgtggcaaggccttcagagtgcacgtacatctcacacagcatcggaaaattcatactgatgtaaagccctatgaatgtaaggaatgtggaaagacttttagtcgagcctcgtaccttgtacaacatagcagaatccatactggtaagaagccctatgagtgtaaggagtgtggcaaggccttcagttctggctcataccttgttcagcatcaaagaattcatactggggagaaaccctatgaatgtaacaaatgtgggaaagcctttactgtttatggacaacttattggacatcagagtgttcacactggtgagaaaccttttgaatgtaaggaatgcgggaaggcctttagacttaattcattccttactgaacatcagcgggtacacactggtgagaaaccctttaaatgcaaaaaatgtgggaagacctttagatacagttcagcccttaaagtgcatctgagaaaacatatgagtgttataccctaagagtctgaggagtgtgggaagtgcttcgtgtgtggctcaaacattgttgaacatcggggaatttatgctggtaggaaactttcaaatgtgaagaatattggcaggtctattctcatcttataattcataatataactcagaaaacataagaatattcctttgtcatttataggtttgtaataccaatatttatactggtggaccattcagaaaaagtgggaaacgttattacttaatggttacagcactgacagcatgaacttttatatgatgcatttattctaatgtgattgtatgaacaagtgaataaaaaaccttggacctcctaaacc

SEQ ID NO: 27525 - protein, 542 aa, Homo sapiens
MEPKDLQLEDDTIGCKEMPTSENCPSFALHQKISRQKPRECQEYGKTLCQDSKPVQHERIHSSEKPNRCKECGKNFSNGHQLTIHQRLHVGEKPYKYEKCGKAFISGSAFVKHGRIHTGEKPLKCKQCGKTISGSYQLTVHKSIHTGKKPYECGECGKAFLVYGKLTRHQSTHTGEKPFGCEECGKAFSTFSYLVQHQRIHTSEKPYECKECGKAFSTSSPLAKHQRIHTGEKPYECKECGKSFTVYGQLTRHQSIHTGEKPFECKECGKAFRLSSFLHAHQRIHAEIKPYGCKECGRTFSRASYLVQHGRLHTGEKPYECKECGKAFSTGSYLVQHQRIHTGEKPYECKECGKAFISRHQLTVHQRVHTGEKPYECKECGKAFRVHVHLTQHRKIHTDVKPYECKECGKTFSRASYLVQHSRIHTGKKPYECKECGKAFSSGSYLVQHQRIHTGEKPYECNKCGKAFTVYGQLIGHQSVHTGEKPFECKECGKAFRLNSFLTEHQRVHTGEKPFKCKKCGKTFRYSSALKVHLRKHMSVIP

SEQ ID NO: 27526 - DNA, 317 bp, Homo sapiens
tcttatctcataagcaggacattcccgttctaaaccacatgtgatcgccttattggaacaatggaaagagcctgaagtgacagtgaggaaagatggaagaagatggtgcacagatttgcagttggaagatgatacaatcggctgtaaagaaatgcccacctctgaaaactgtccatcttttgctctacatcagaaaataagtagacagaaaccacgtgaatgtcaggaatatggaaagaccctttgtcaagactcaaagcctgttcaacatgaaagaatacatagtagtgaaaaacccaacagatgtaaagaatgtg

SEQ ID NO: 27527 - protein, 35 aa, Homo sapiens
MEEDGAQICSWKMIQSAVKKCPPLKTVHLLLYIRK

SEQ ID NO: 27528 - DNA, 3687 bp, Homo sapiens
tccctcctctccctgagctgcccccacacctgctgcctgaagccttgcagggaagctccaggcatgaggggtcttgcggttagctgtgtgactacctctgactcggccattccctcctgggtgattatccagatctgacagttctgtggtttagattctgtgcctttcctcttgctaatatttcctaagcctgactgtgccaggaattccaatcactgatgtggttactgcttgccgtgaccacccaatgtccctgtgtcatacggagcttcctgtcttgtagtctatcatggggtagttcaactgggcaggtgctggccactgacccactctgtctttcccttaggacttatatctttcaggtcccacatcgtttcccagttggagatggggaaagagccctgggtgcctgacagtgtggatatgacatcagccatggccagaggggcttatggcaggcctggctctgatttttgccatggaacagagggcaaggacttaccttctgagcataacgtttctgtagaaggagtggcacaggacaggagtcccgaggcaactctgtgcccccagaagacctgcccctgtgacatatgtggcctacgtttgaaagacattttgcatttggctgaacaccagacaacacatcccaggcagaaaccatttgtgtgtgaggcatatgtgaaaggctctgagttcagtgcaaaccttccccggaaacaggtgcagcagaacgtacacaaccctatcagaacggaggagggccaggcttcccctgtaaagacctgcagagaccacacatcagatcagctttccacctgcagggagggtgggaaggactttgtggccacagcagggtttctgcagtgtgaggtcactcccagcgatggggagccgcacgaggccaccgaaggtgtggtggattttcacattgcactaaggcataacaagtgctgtgaatctggggatgccttcaataacaaatccactcttgttcagcaccagagaatccacagcagagaaaggccttatgaatgcagcaaatgtggaatcttcttcacttacgccgctgacctcactcaacaccagaaagttcacaatagaggaaaaccgtatgagtgctgtgaatgtggaaaattcttcagccagcactccagccttgttaaacatcgcagggttcacaccggtgaaagccctcacgtgtgtggtgactgtgggaaattcttcagccgaagctccaacctcattcagcataagagggttcacactggtgaaaagccatatgagtgcagcgactgtgggaagttcttcagccagcgttccaacctcattcatcataagagggttcatacgggcagaagtgcccatgagtgcagtgaatgtgggaaatctttcaactgcaactccagcctaattaaacattggagagttcacactggagaaagaccttacaagtgtaacgaatgtgggaaattcttcagccacattgccagcctcattcaacatcagatagttcacactggcgagcggcctcacgggtgtggtgagtgtgggaaagccttcagccgaagctctgacctcatgaaacatcagcgagttcacactggtgagcggccttatgaatgcaatgaatgtgggaagttatttagccagagctccagcctcaatagccatcggagacttcacactggtgaacggccttaccagtgcagtgaatgtgggaaattctttaaccaaagctccagcctcaataaccaccggagacttcacaccggcgagcggccttatgagtgcagcgaatgtgggaaaaccttcaggcagaggtccaatctgaggcagcacctgaaagttcacaaaccagacaggccttacgaatgcagcgaatgtgggaaagccttcaaccaaaggcctaccctcattcggcatcagaagattcacatcagagaaaggagcatggagaatgtgctccttccctgttcacagcacacaccagagataagctctgagaacagaccttatcagggcgctgtcaactacaagttgaaacttgttcatccaagtacccaccctggggaggttccctaggaatgctagctgtgttggaagctttctggagacaagttacattctcttactgtagagtttatcagcgttttttcactgctggggttgtgatagaagccatgtcagcaccacacactgcagctctccaaagagtgtgtccaccactccactgtgctcagggaaggcagacctctcctctctctttccaatccctaaagggaattaggagtagtctgaagccttgggaagatgtcattcccgccctgtatggctggtttagccatggacatgaccagcttttggctgtgaagacctgagcagggttttgccaacagcttgttctagagaaggtttccctttttctgggacattgttggtctcatgttatgcctgtgaaggatttgtccagccttcatgttactctacacaacaacttatctcctgtgtattgccctggttcatgtgatgataatggccttatgataaagccgcctttagtcttccatgttctgatcactgtgtggggtggttcaagagcagagttaagatctaccaaactgaaggggtctccagattatcttggaggggacaggaggatggcagagaaacaactgtcaatccagatttgacctcatttgcattgccaccaaggcctcctaggaaaaattgtaggaatttatgggtataatattgtggtctgaatggcgtgaatttttatcccgaggagggggcagttgtgacaacctccagtgcatgtgggaacagcatgaattgggtcccttattcccagggggtgccccatattccccaatactgtaaagcagatgctgtttagcacctgccaaggagccatatgccctgaagttcagcattaggcaggtatctcttaactgtaagacataccaggcccagctgggaccataatttgtacagaaacactggatgtgattaatagggagtaggcgagattatagcaaaccagcagaaatggaactctgctaaatgtgcatccgtgaatgctcccttgaatgtggctgtgcaggattcagggtttgcagaaattctcaggacctcagacctctgtcctatgactaatgttactggcagagcaaataatctaaaggttttggttttgtggattaccatctccgtgctgtgcatctgaaggccagtgctgtgctggcaggaaaatagggactgagaaaaagcagatcctatactatagggactgtagtatctatgacgtagccagccattctttgctcccaaggcaagaagaaagagatgacagagtcaatatagggttgccaaatcggattttctaaaatgagtaggaagttggatttttatgtgcaacagtttcttttaatgctttgttgatatgtgattgtcatgcaataattattcatatttggtaagttttgtacatatattatgtacactcagggaaccaataccataatcatgataatgaacgtatccatcacctgcaaagctacctcatgcccctttacattccctccttgccttccctaggaaaccgttgatttacattttttactttagatttgtttgccttttctagaattaacacaattggaatcataaagtatttatactctc

SEQ ID NO: 27529 - protein, 565 aa, Homo sapiens
MGKEPWVPDSVDMTSAMARGAYGRPGSDFCHGTEGKDLPSEHNVSVEGVAQDRSPEATLCPQKTCPCDICGLRLKDILHLAEHQTTHPRQKPFVCEAYVKGSEFSANLPRKQVQQNVHNPIRTEEGQASPVKTCRDHTSDQLSTCREGGKDFVATAGFLQCEVTPSDGEPHEATEGVVDFHIALRHNKCCESGDAFNNKSTLVQHQRIHSRERPYECSKCGIFFTYAADLTQHQKVHNRGKPYECCECGKFFSQHSSLVKHRRVHTGESPHVCGDCGKFFSRSSNLIQHKRVHTGEKPYECSDCGKFFSQRSNLIHHKRVHTGRSAHECSECGKSFNCNSSLIKHWRVHTGERPYKCNECGKFFSHIASLIQHQIVHTGERPHGCGECGKAFSRSSDLMKHQRVHTGERPYECNECGKLFSQSSSLNSHRRLHTGERPYQCSECGKFFNQSSSLNNHRRLHTGERPYECSECGKTFRQRSNLRQHLKVHKPDRPYECSECGKAFNQRPTLIRHQKIHIRERSMENVLLPCSQHTPEISSENRPYQGAVNYKLKLVHPSTHPGEVP

SEQ ID NO: 27530 - DNA, 3886 bp, Homo sapiens
gggaggctgagtccccaggagctggggaccccgagttgggggcggggcggctggggctacgcccgtgaagctgccccgccggctttcccggaccgcgagggggacagtgaggccgggaccccctccgcgcctttgcaccagccgtgaccccttgcaacgggggtacccagcggagctgcgcgctctcggcgcccccggagcctgcgccccgggccccttgcgcattttgcacgggggagactgaggctaggagtgcgaccctcagcccggggtcacacctcgtctggggcacggccaggtgggtggtagcctcagcctgcgagaccccctacccccgccccgtggtttcccgcaccgtggggccctgctctgaccacagactccgatggcagcggcggcgctgcgggaccccgcgcagggctgcgtgacctttgaggacgtgaccatttacttctcccaggaggagtgggtgctcctcgatgaggctcagagactcctgtactgcgatgtgatgctggaaaactttgcacttatagcctcgctgggacttatatctttcaggtcccacatcgtttcccagttggagatggggaaagagccctgggtgcctgacagtgtggatatgacatcagccatggccagaggggcttatggcaggcctggctctgatttttgccatggaacagagggcaaggacttaccttctgagcataacgtttctgtagaaggagtggcacaggacaggagtcccgaggcaactctgtgcccccagaagacctgcccctgtgacatatgtggcctacgtttgaaagacattttgcatttggctgaacaccagacaacacatcccaggcagaaaccatttgtgtgtgaggcatatgtgaaaggctctgagttcagtgcaaaccttccccggaaacaggtgcagcagaacgtacacaaccctatcagaacggaggagggccaggcttcccctgtaaagacctgcagagaccacacatcagatcagctttccacctgcagggagggtgggaaggactttgtggccacagcagggtttctgcagtgtgaggtcactcccagcgatggggagccgcacgaggccaccgaaggtgtggtggattttcacattgcactaaggcataacaagtgctgtgaatctggggatgccttcaataacaaatccactcttgttcagcaccagagaatccacagcagagaaaggccttatgaatgcagcaaatgtggaatcttcttcacttacgccgctgacctcactcaacaccagaaagttcacaatagaggaaaaccgtatgagtgctgtgaatgtggaaaattcttcagccagcactccagccttgttaaacatcgcagggttcacaccggtgaaagccctcacgtgtgtggtgactgtgggaaattcttcagccgaagctccaacctcattcagcataagagggttcacactggtgaaaagccatatgagtgcagcgactgtgggaagttcttcagccagcgttccaacctcattcatcataagagggttcatacgggcagaagtgcccatgagtgcagtgaatgtgggaaatctttcaactgcaactccagcctaattaaacattggagagttcacactggagaaagaccttacaagtgtaacgaatgtgggaaattcttcagccacattgccagcctcattcaacatcagatagttcacactggcgagcggcctcacgggtgtggtgagtgtgggaaagccttcagccgaagctctgacctcatgaaacatcagcgagttcacactggtgagcggccttatgaatgcaatgaatgtgggaagttatttagccagagctccagcctcaatagccatcggagacttcacactggtgaacggccttaccagtgcagtgaatgtgggaaattctttaaccaaagctccagcctcaataaccaccggagacttcacaccggcgagcggccttatgagtgcagcgaatgtgggaaaaccttcaggcagaggtccaatctgaggcagcacctgaaagttcacaaaccagacaggccttacgaatgcagcgaatgtgggaaagccttcaaccaaaggcctaccctcattcggcatcagaagattcacatcagagaaaggagcatggagaatgtgctccttccctgttcacagcacacaccagagataagctctgagaacagaccttatcagggcgctgtcaactacaagttgaaacttgttcatccaagtacccaccctggggaggttccctaggaatgctagctgtgttggaagctttctggagacaagttacattctcttactgtagagtttatcagcgttttttcactgctggggttgtgatagaagccatgtcagcaccacacactgcagctctccaaagagtgtgtccaccactccactgtgctcagggaaggcagacctctcctctctctttccaatccctaaagggaattaggagtagtctgaagccttgggaagatgtcattcccgccctgtatggctggtttagccatggacatgaccagcttttggctgtgaagacctgagcagggttttgccaacagcttgttctagagaaggtttccctttttctgggacattgttggtctcatgttatgcctgtgaaggatttgtccagccttcatgttactctacacaacaacttatctcctgtgtattgccctggttcatgtgatgataatggccttatgataaagccgcctttagtcttccatgttctgatcactgtgtggggtggttcaagagcagagttaagatctaccaaactgaaggggtctccagattatcttggaggggacaggaggatggcagagaaacaactgtcaatccagatttgacctcatttgcattgccaccaaggcctcctaggaaaaattgtaggaatttatgggtataatattgtggtctgaatggcgtgaatttttatcccgaggagggggcagttgtgacaacctccagtgcatgtgggaacagcatgaattgggtcccttattcccagggggtgccccatattccccaatactgtaaagcagatgctgtttagcacctgccaaggagccatatgccctgaagttcagcattaggcaggtatctcttaactgtaagacataccaggcccagctgggaccataatttgtacagaaacactggatgtgattaatagggagtaggcgagattatagcaaaccagcagaaatggaactctgctaaatgtgcatccgtgaatgctcccttgaatgtggctgtgcaggattcagggtttgcagaaattctcaggacctcagacctctgtcctatgactaatgttactggcagagcaaataatctaaaggttttggttttgtggattaccatctccgtgctgtgcatctgaaggccagtgctgtgctggcaggaaaatagggactgagaaaaagcagatcctatactatagggactgtagtatctatgacgtagccagccattctttgctcccaaggcaagaagaaagagatgacagagtcaatatagggttgccaaatcggattttctaaaatgagtaggaagttggatttttatgtgcaacagtttcttttaatgctttgttgatatgtgattgtcatgcaataattattcatatttggtaagttttgtacatatattatgtacactcagggaaccaataccataatcatgataatgaacgtatccatcacctgcaaagctacctcatgcccctttacattccctccttgccttccctaggaaaccgttgatttacattttttactttagatttgtttgccttttctagaattaacacaattggaatcataaagtatttatactctc

SEQ ID NO: 27531 - protein, 632 aa, Homo sapiens
MAAAALRDPAQGCVTFEDVTIYFSQEEWVLLDEAQRLLYCDVMLENFALIASLGLISFRSHIVSQLEMGKEPWVPDSVDMTSAMARGAYGRPGSDFCHGTEGKDLPSEHNVSVEGVAQDRSPEATLCPQKTCPCDICGLRLKDILHLAEHQTTHPRQKPFVCEAYVKGSEFSANLPRKQVQQNVHNPIRTEEGQASPVKTCRDHTSDQLSTCREGGKDFVATAGFLQCEVTPSDGEPHEATEGVVDFHIALRHNKCCESGDAFNNKSTLVQHQRIHSRERPYECSKCGIFFTYAADLTQHQKVHNRGKPYECCECGKFFSQHSSLVKHRRVHTGESPHVCGDCGKFFSRSSNLIQHKRVHTGEKPYECSDCGKFFSQRSNLIHHKRVHTGRSAHECSECGKSFNCNSSLIKHWRVHTGERPYKCNECGKFFSHIASLIQHQIVHTGERPHGCGECGKAFSRSSDLMKHQRVHTGERPYECNECGKLFSQSSSLNSHRRLHTGERPYQCSECGKFFNQSSSLNNHRRLHTGERPYECSECGKTFRQRSNLRQHLKVHKPDRPYECSECGKAFNQRPTLIRHQKIHIRERSMENVLLPCSQHTPEISSENRPYQGAVNYKLKLVHPSTHPGEVP

SEQ ID NO: 27532 - DNA, 2825 bp, Homo sapiens
aagtctgaatgctgtgtggacagaggaggaggacccaataagagaccacaccgctgttccagaccctctccatggatgatgtcctgcccctgatgccttgggagaccctgttggcacagggcagtccccagggctcgcctgacctcccagcagggcagcggaagcagcagccacagggtgacagggcccagggcctggcctctgagtcctggaagctcctggaggtgcccatcattcacataacgccatccagtgatggggagtcccccgcctgcaccccaaccccccgacgccggcagcagcagaggatgccagacccgcagagtctgtcccaggacagcaccacaccccactctggccggagcacgccaagcagctccccatcgctccggaaacggctgcagctcctgcccccaagccggcccccacctgagccagaaccaggcaccatggtggagaagggatcagatagctcctcagagaagggtggggtgcctgggacccccagcacccagagcctaggcagccggaacttcatccgcaacagcaagaagatgcagagctggtacagtatgctgagccccacttataagcagcgtaatgaggacttccggaaactgttcagcaaactccccgaagcagaacgcctcattgtggattactcctgcgccctgcagcgtgagatcctgctccagggccgcctctacctctctgagaactggatctgcttctacagcaacatcttccgctgggagaccacgatctccatccagctgaaggaagtgacatgtctgaagaaggaaaagacggccaagctgatccccaacgccatccagatctgcacggagagcgagaagcatttcttcacttcctttggggcccgtgaccgctgcttcctcctcatcttccgcctctggcagaatgcactgcttgaaaagacgctgagtccccgcgagctctggcacctggtgcatcagtgctacggctcagagctgggcctcaccagtgaggatgaggactatgtctcccccttgcagctgaacggtctggggacccccaaggaagtgggagatgtgatcgccctgagcgacatcacctcctcgggggcagctgaccgcagccaggagccaagcccagtgggttcgcgccgtggccatgtcacgcccaacctttcccgagccagcagcgacgcagaccatggggcagaggaggacaaggaggagcaggtagacagccagccagacgcctcctccagccagacagtgaccccggtggctgaacccccgagcacagagcccacccagcctgacgggcccaccaccctgggccccttggatctgctgcccagtgaggagctattgacagacacaagtaactcctcttcatccactggggaggaagcggacttggctgccctgcttcccgacctctccggccgcctcctcatcaactctgtcttccatgtgggcgctgagcggctccagcagatgctcttctcggactcgcccttcctccagggcttcctacagcagtgcaagttcacagacgtgacgctgagcccctggagtggggacagcaagtgccaccagcgccgggtgctgacgtacaccatccccatcagcaacccactgggccccaagagcgcctccgtggtggagacacagacgctgttccggcgcggcccccaggccggcgggtgtgtggtggactccgaggtgctgacgcagggcatcccctaccaggactacttctacactgcccaccgctactgcatcctgggtctggcccggaacaaggcgcggctccgagtgtcttctgagatccgctaccgaaagcagccgtggagcctggtgaagtcgctcattgagaagaactcgtggagcggcattgaagactatttccaccatctggagcgagagctcgccaaggctgagaagctgtctctggaggaaggcgggaaggatgcccggggcttgctatccggcctgcggcggcggaagcggcccctgagctggcgggctcacggggacgggccccagcacccagatcctgacccctgtgcccgggccggcattcacacctcgggctccctcagctcccgcttctccgaaccatctgtggaccagggccccggggcaggcatccccagtgccctggttctcatcagcattgtccttatcatcctcatcgccctcaacgtcctgctcttctaccgcctctggtccctggaaaggacagcccacacctttgagtcctggcacagcctggccctggccaagggcaagttcccccagacggccacagagtgggccgagatcctggcgctgcagaagcaattccacagcgtggaggtgcacaagtggaggcagatcctgcgggcctccgtggagctcctggatgagatgaagttctcgctggagaagctgcaccaaggcatcacagtctcagaccctccctttgacacccagccccggcccgatgacagcttttcctgaggaccccggccacgcagctgttcccccacatggacagatggacacacagagcctcggcggccactgctggcacggtgtgagcgccaggcatctcccacccgcccctcccgacggcccaaccaggggctgtgcagacgtggggaccacggaaccgagatgcactttagaccagggagctggcccggcctctggcaggccccccactaacttattttgcccggctgaggttgtggggggcgcctcctggggtgcacgattccctcagctctgggtttaatgtattatatttatttggggccgacagtgccccaataaagggtcagaagtggc

SEQ ID NO: 27533 - protein, 807 aa, Homo sapiens
MDDVLPLMPWETLLAQGSPQGSPDLPAGQRKQQPQGDRAQGLASESWKLLEVPIIHITPSSDGESPACTPTPRRRQQQRMPDPQSLSQDSTTPHSGRSTPSSSPSLRKRLQLLPPSRPPPEPEPGTMVEKGSDSSSEKGGVPGTPSTQSLGSRNFIRNSKKMQSWYSMLSPTYKQRNEDFRKLFSKLPEAERLIVDYSCALQREILLQGRLYLSENWICFYSNIFRWETTISIQLKEVTCLKKEKTAKLIPNAIQICTESEKHFFTSFGARDRCFLLIFRLWQNALLEKTLSPRELWHLVHQCYGSELGLTSEDEDYVSPLQLNGLGTPKEVGDVIALSDITSSGAADRSQEPSPVGSRRGHVTPNLSRASSDADHGAEEDKEEQVDSQPDASSSQTVTPVAEPPSTEPTQPDGPTTLGPLDLLPSEELLTDTSNSSSSTGEEADLAALLPDLSGRLLINSVFHVGAERLQQMLFSDSPFLQGFLQQCKFTDVTLSPWSGDSKCHQRRVLTYTIPISNPLGPKSASVVETQTLFRRGPQAGGCVVDSEVLTQGIPYQDYFYTAHRYCILGLARNKARLRVSSEIRYRKQPWSLVKSLIEKNSWSGIEDYFHHLERELAKAEKLSLEEGGKDARGLLSGLRRRKRPLSWRAHGDGPQHPDPDPCARAGIHTSGSLSSRFSEPSVDQGPGAGIPSALVLISIVLIILIALNVLLFYRLWSLERTAHTFESWHSLALAKGKFPQTATEWAEILALQKQFHSVEVHKWRQILRASVELLDEMKFSLEKLHQGITVSDPPFDTQPRPDDSFS

SEQ ID NO: 27534 - DNA, 564 bp, Homo sapiens
acagagaagggaaagcagaggggcagagagacagagaaggaaacaaagagactttattaaaaccaaacatcgtggaggcagctgcctgcccgcagaggtcagagtcaggtggtgtcctggactcctggcccaaccacacagaaatgcgagtcccacctcacagctccggggctgtggctccccagcgctctccagggtcaggcgcgttgggtcacgcctgtaatcccagcactttgggaggccaaggagggtggatcacctatcaggagttcgagaccagcctggccaacagagtgaaaccccatctctatcaaaaatacaaaaaaattagccaggtgtagtggcttgcacctgtaatcccagctacccaggaagctgaggcaggagaattgcttgaacccgggaggtggaagttgcagtgagccaggatcgcaccactgcgctccagcctggacaacagagcaagactccatctcaaaaaaaaaaaaaaaaaaaaaaaggaagaaaatataacagtcctctatgtcccctgtacctatatagaatagatgtggacattttgcc

SEQ ID NO: 27535 - protein, 65 aa, Homo sapiens
MRVPPHSSGAVAPQRSPGSGALGHACNPSTLGGQGGWITYQEFETSLANRVKPHLYQKYKKISQV

SEQ ID NO: 27536 - DNA, 945 bp, Homo sapiens
gtccaggagcttctggccaggggcatagtagttgctagggacccttttctaggtactaggggagggggctccccaacctgcgggcaggcagctgcctccacgatgtttggttttaataaagtctctttgtttccttctctgtctctctgcccctctgctttcccttctctgtccagtccctctctccccggcttctccctccttctaggcctctgcggcccctccccgccttccctcccgggctgggggcggcgccgtgacgcggcggggcgggggaaggaagggggtgtcgctgacgccgcggcggcctccggcggctccggccttttgtgcgggcggttgggtcgggtgggggcggcggccgcggaaggccaggccggtgccctgcggggacgcccagcgcagcccagccccgcgcagcccagccctgccctgccctgccctgccctgcgcccggggcgcgcccaccgcgccgcatccatgttcgacaccacaccccactctggccggagcacgccaagcagctccccatcgctccggaaacggctgcagctcctgcccccaagccggcccccacctgagccagaaccaggcaccatggtggagaagggatcagatagctcctcagagaagggtggggtgcctgggacccccagcaacacagagcctcggcggccactgctggcacggtgtgagcgccaggcatctcccacccgcccctcccgacggcccaaccaggggctgtgcagacgtggggaccacggaaccgagatgcactttagaccagggagctggcccggcctctggcaggccccccactaacttattttgcccggctgaggttgtggggggcgcctcctggggtgcacgattccctcagctctgggtttaatgtattatatttatttggggccgacagtgccccaataaagggtcagaagtggc

SEQ ID NO: 27537 - protein, 239 aa, Homo sapiens
MFGFNKVSLFPSLSLCPSAFPSLSSPSLPGFSLLLGLCGPSPPSLPGWGRRRDAAGRGKEGGVADAAAASGGSGLLCGRLGRVGAAAAEGQAGALRGRPAQPSPAQPSPALPCPALRPGRAHRAASMFDTTPHSGRSTPSSSPSLRKRLQLLPPSRPPPEPEPGTMVEKGSDSSSEKGGVPGTPSNTEPRRPLLARCERQASPTRPSRRPNQGLCRRGDHGTEMHFRPGSWPGLWQAPH

SEQ ID NO: 27538 - DNA, 2860 bp, Homo sapiens
gtccaggagcttctggccaggggcatagtagttgctagggacccttttctaggtactaggggagggggctccccaacctgcgggcaggcagctgcctccacgatgtttggttttaataaagtctctttgtttccttctctgtctctctgcccctctgctttcccttctctgtccagtccctctctccccggcttctccctccttctaggcctctgcggcccctccccgccttccctcccgggctgggggcggcgccgtgacgcggcggggcgggggaaggaagggggtgtcgctgacgccgcggcggcctccggcggctccggccttttgtgcgggcggttgggtcgggtgggggcggcggccgcggaaggccaggccggtgccctgcggggacgcccagcgcagcccagccccgcgcagcccagccctgccctgccctgccctgccctgcgcccggggcgcgcccaccgcgccgcatccatgttcgacaccacaccccactctggccggagcacgccaagcagctccccatcgctccggaaacggctgcagctcctgcccccaagccggcccccacctgagccagaaccaggcaccatggtggagaagggatcagatagctcctcagagaagggtggggtgcctgggacccccagcacccagagcctaggcagccggaacttcatccgcaacagcaagaagatgcagagctggtacagtatgctgagccccacttataagcagcgtaatgaggacttccggaaactgttcagcaaactccccgaagcagaacgcctcattgtggattactcctgcgccctgcagcgtgagatcctgctccagggccgcctctacctctctgagaactggatctgcttctacagcaacatcttccgctgggagaccacgatctccatccagctgaaggaagtgacatgtctgaagaaggaaaagacggccaagctgatccccaacgccatccagatctgcacggagagcgagaagcatttcttcacttcctttggggcccgtgaccgctgcttcctcctcatcttccgcctctggcagaatgcactgcttgaaaaggacccccaaggaagtgggagatgtgatcgccctgagcgacatcacctcctcgggggcagctgaccgcagccaggagccaagcccagtgggttcgcgccgtggccatgtcacgcccaacctttcccgagccagcagcgacgcagaccatggggcagaggaggacaaggaggagcaggtagacagccagccagacgcctcctccagccagacagtgaccccggtggctgaacccccgagcacagagcccacccagcctgacgggcccaccaccctgggccccttggatctgctgcccagtgaggagctattgacagacacaagtaactcctcttcatccactggggaggaagcggacttggctgccctgcttcccgacctctccggccgcctcctcatcaactctgtcttccatgtgggcgctgagcggctccagcagatgctcttctcggactcgcccttcctccagggcttcctacagcagtgcaagttcacagacgtgacgctgagcccctggagtggggacagcaagtgccaccagcgccgggtgctgacgtacaccatccccatcagcaacccactgggccccaagagcgcctccgtggtggagacacagacgctgttccggcgcggcccccaggccggcgggtgtgtggtggactccgaggtgctgacgcagggcatcccctaccaggactacttctacactgcccaccgctactgcatcctgggtctggcccggaacaaggcgcggctccgagtgtcttctgagatccgctaccgaaagcagccgtggagcctggtgaagtcgctcattgagaagaactcgtggagcggcattgaagactatttccaccatctggagcgagagctcgccaaggctgagaagctgtctctggaggaaggcgggaaggatgcccggggcttgctatccggcctgcggcggcggaagcggcccctgagctggcgggctcacggggacgggccccagcacccagatcctgacccctgtgcccgggccggcattcacacctcgggctccctcagctcccgcttctccgaaccatctgtggaccagggccccggggcaggcatccccagtgccctggttctcatcagcattgtccttatcatcctcatcgccctcaacgtcctgctcttctaccgcctctggtccctggaaaggacagcccacacctttgagtcctggcacagcctggccctggccaagggcaagttcccccagacggccacagagtgggccgagatcctggcgctgcagaagcaattccacagcgtggaggtgcacaagtggaggcagatcctgcgggcctccgtggagctcctggatgagatgaagttctcgctggagaagctgcaccaaggcatcacagtctcagaccctccctttgacacccagccccggcccgatgacagcttttcctgaggaccccggccacgcagctgttcccccacatggacagatggacacacagagcctcggcggccactgctggcacggtgtgagcgccaggcatctcccacccgcccctcccgacggcccaaccaggggctgtgcagacgtggggaccacggaaccgagatgcactttagaccagggagctggcccggcctctggcaggccccccactaacttattttgcccggctgaggttgtggggggcgcctcctggggtgcacgattccctcagctctgggtttaatgtattatatttatttggggccgacagtgccccaataaagggtcagaagtggc

SEQ ID NO: 27539 - protein, 486 aa, Homo sapiens
MHCLKRTPKEVGDVIALSDITSSGAADRSQEPSPVGSRRGHVTPNLSRASSDADHGAEEDKEEQVDSQPDASSSQTVTPVAEPPSTEPTQPDGPTTLGPLDLLPSEELLTDTSNSSSSTGEEADLAALLPDLSGRLLINSVFHVGAERLQQMLFSDSPFLQGFLQQCKFTDVTLSPWSGDSKCHQRRVLTYTIPISNPLGPKSASVVETQTLFRRGPQAGGCVVDSEVLTQGIPYQDYFYTAHRYCILGLARNKARLRVSSEIRYRKQPWSLVKSLIEKNSWSGIEDYFHHLERELAKAEKLSLEEGGKDARGLLSGLRRRKRPLSWRAHGDGPQHPDPDPCARAGIHTSGSLSSRFSEPSVDQGPGAGIPSALVLISIVLIILIALNVLLFYRLWSLERTAHTFESWHSLALAKGKFPQTATEWAEILALQKQFHSVEVHKWRQILRASVELLDEMKFSLEKLHQGITVSDPPFDTQPRPDDSFS

SEQ ID NO: 27540 - DNA, 2973 bp, Homo sapiens
gtccaggagcttctggccaggggcatagtagttgctagggacccttttctaggtactaggggagggggctccccaacctgcgggcaggcagctgcctccacgatgtttggttttaataaagtctctttgtttccttctctgtctctctgcccctctgctttcccttctctgtccagtccctctctccccggcttctccctccttctaggcctctgcggcccctccccgccttccctcccgggctgggggcggcgccgtgacgcggcggggcgggggaaggaagggggtgtcgctgacgccgcggcggcctccggcggctccggccttttgtgcgggcggttgggtcgggtgggggcggcggccgcggaaggccaggccggtgccctgcggggacgcccagcgcagcccagccccgcgcagcccagccctgccctgccctgccctgccctgcgcccggggcgcgcccaccgcgccgcatccatgttcgacaccacaccccactctggccggagcacgccaagcagctccccatcgctccggaaacggctgcagctcctgcccccaagccggcccccacctgagccagaaccaggcaccatggtggagaagggatcagatagctcctcagagaagggtggggtgcctgggacccccagcacccagagcctaggcagccggaacttcatccgcaacagcaagaagatgcagagctggtacagtatgctgagccccacttataagcagcgtaatgaggacttccggaaactgttcagcaaactccccgaagcagaacgcctcattgtggattactcctgcgccctgcagcgtgagatcctgctccagggccgcctctacctctctgagaactggatctgcttctacagcaacatcttccgctgggagaccacgatctccatccagctgaaggaagtgacatgtctgaagaaggaaaagacggccaagctgatccccaacgccatccagatctgcacggagagcgagaagcatttcttcacttcctttggggcccgtgaccgctgcttcctcctcatcttccgcctctggcagaatgcactgcttgaaaagacgctgagtccccgcgagctctggcacctggtgcatcagtgctacggctcagagctgggcctcaccagtgaggatgaggactatgtctcccccttgcagctgaacggtctggggacccccaaggaagtgggagatgtgatcgccctgagcgacatcacctcctcgggggcagctgaccgcagccaggagccaagcccagtgggttcgcgccgtggccatgtcacgcccaacctttcccgagccagcagcgacgcagaccatggggcagaggaggacaaggaggagcaggtagacagccagccagacgcctcctccagccagacagtgaccccggtggctgaacccccgagcacagagcccacccagcctgacgggcccaccaccctgggccccttggatctgctgcccagtgaggagctattgacagacacaagtaactcctcttcatccactggggaggaagcggacttggctgccctgcttcccgacctctccggccgcctcctcatcaactctgtcttccatgtgggcgctgagcggctccagcagatgctcttctcggactcgcccttcctccagggcttcctacagcagtgcaagttcacagacgtgacgctgagcccctggagtggggacagcaagtgccaccagcgccgggtgctgacgtacaccatccccatcagcaacccactgggccccaagagcgcctccgtggtggagacacagacgctgttccggcgcggcccccaggccggcgggtgtgtggtggactccgaggtgctgacgcagggcatcccctaccaggactacttctacactgcccaccgctactgcatcctgggtctggcccggaacaaggcgcggctccgagtgtcttctgagatccgctaccgaaagcagccgtggagcctggtgaagtcgctcattgagaagaactcgtggagcggcattgaagactatttccaccatctggagcgagagctcgccaaggctgagaagctgtctctggaggaaggcgggaaggatgcccggggcttgctatccggcctgcggcggcggaagcggcccctgagctggcgggctcacggggacgggccccagcacccagatcctgacccctgtgcccgggccggcattcacacctcgggctccctcagctcccgcttctccgaaccatctgtggaccagggccccggggcaggcatccccagtgccctggttctcatcagcattgtccttatcatcctcatcgccctcaacgtcctgctcttctaccgcctctggtccctggaaaggacagcccacacctttgagtcctggcacagcctggccctggccaagggcaagttcccccagacggccacagagtgggccgagatcctggcgctgcagaagcaattccacagcgtggaggtgcacaagtggaggcagatcctgcgggcctccgtggagctcctggatgagatgaagttctcgctggagaagctgcaccaaggcatcacagtctcagaccctccctttgacacccagccccggcccgatgacagcttttcctgaggaccccggccacgcagctgttcccccacatggacagatggacacacagagcctcggcggccactgctggcacggtgtgagcgccaggcatctcccacccgcccctcccgacggcccaaccaggggctgtgcagacgtggggaccacggaaccgagatgcactttagaccagggagctggcccggcctctggcaggccccccactaacttattttgcccggctgaggttgtggggggcgcctcctggggtgcacgattccctcagctctgggtttaatgtattatatttatttggggccgacagtgccccaataaagggtcagaagtggc

SEQ ID NO: 27541 - protein, 846 aa, Homo sapiens
MFGFNKVSLFPSLSLCPSAFPSLSSPSLPGFSLLLGLCGPSPPSLPGWGRRRDAAGRGKEGGVADAAAASGGSGLLCGRLGRVGAAAAEGQAGALRGRPAQPSPAQPSPALPCPALRPGRAHRAASMFDTTPHSGRSTPSSSPSLRKRLQLLPPSRPPPEPEPGTMVEKGSDSSSEKGGVPGTPSTQSLGSRNFIRNSKKMQSWYSMLSPTYKQRNEDFRKLFSKLPEAERLIVDYSCALQREILLQGRLYLSENWICFYSNIFRWETTISIQLKEVTCLKKEKTAKLIPNAIQICTESEKHFFTSFGARDRCFLLIFRLWQNALLEKTLSPRELWHLVHQCYGSELGLTSEDEDYVSPLQLNGLGTPKEVGDVIALSDITSSGAADRSQEPSPVGSRRGHVTPNLSRASSDADHGAEEDKEEQVDSQPDASSSQTVTPVAEPPSTEPTQPDGPTTLGPLDLLPSEELLTDTSNSSSSTGEEADLAALLPDLSGRLLINSVFHVGAERLQQMLFSDSPFLQGFLQQCKFTDVTLSPWSGDSKCHQRRVLTYTIPISNPLGPKSASVVETQTLFRRGPQAGGCVVDSEVLTQGIPYQDYFYTAHRYCILGLARNKARLRVSSEIRYRKQPWSLVKSLIEKNSWSGIEDYFHHLERELAKAEKLSLEEGGKDARGLLSGLRRRKRPLSWRAHGDGPQHPDPDPCARAGIHTSGSLSSRFSEPSVDQGPGAGIPSALVLISIVLIILIALNVLLFYRLWSLERTAHTFESWHSLALAKGKFPQTATEWAEILALQKQFHSVEVHKWRQILRASVELLDEMKFSLEKLHQGITVSDPPFDTQPRPDDSFS

SEQ ID NO: 27542 - DNA, 2952 bp, Homo sapiens
gtccaggagcttctggccaggggcatagtagttgctagggacccttttctaggtactaggggagggggctccccaacctgcgggcaggcagctgcctccacgatgtttggttttaataaagtctctttgtttccttctctgtctctctgcccctctgctttcccttctctgtccagtccctctctccccggcttctccctccttctaggcctctgcggcccctccccgccttccctcccgggctgggggcggcgccgtgacgcggcggggcgggggaaggaagggggtgtcgctgacgccgcggcggcctccggcggctccggccttttgtgcgggcggttgggtcgggtgggggcggcggccgcggaaggccaggccggtgccctgcggggacgcccagcgcagcccagccccgcgcagcccagccctgccctgccctgccctgccctgcgcccggggcgcgcccaccgcgccgcatccatgttcgacaccacaccccactctggccggagcacgccaagcagctccccatcgctccggaaacggctgcagctcctgcccccaagccggcccccacctgagccagaaccaggcaccatggtggagaagggatcagatagctcctcagagaagggtggggtgcctgggacccccagcacccagagcctaggcagccggaacttcatccgcaacagcaagatgctgagccccacttataagcagcgtaatgaggacttccggaaactgttcagcaaactccccgaagcagaacgcctcattgtggattactcctgcgccctgcagcgtgagatcctgctccagggccgcctctacctctctgagaactggatctgcttctacagcaacatcttccgctgggagaccacgatctccatccagctgaaggaagtgacatgtctgaagaaggaaaagacggccaagctgatccccaacgccatccagatctgcacggagagcgagaagcatttcttcacttcctttggggcccgtgaccgctgcttcctcctcatcttccgcctctggcagaatgcactgcttgaaaagacgctgagtccccgcgagctctggcacctggtgcatcagtgctacggctcagagctgggcctcaccagtgaggatgaggactatgtctcccccttgcagctgaacggtctggggacccccaaggaagtgggagatgtgatcgccctgagcgacatcacctcctcgggggcagctgaccgcagccaggagccaagcccagtgggttcgcgccgtggccatgtcacgcccaacctttcccgagccagcagcgacgcagaccatggggcagaggaggacaaggaggagcaggtagacagccagccagacgcctcctccagccagacagtgaccccggtggctgaacccccgagcacagagcccacccagcctgacgggcccaccaccctgggccccttggatctgctgcccagtgaggagctattgacagacacaagtaactcctcttcatccactggggaggaagcggacttggctgccctgcttcccgacctctccggccgcctcctcatcaactctgtcttccatgtgggcgctgagcggctccagcagatgctcttctcggactcgcccttcctccagggcttcctacagcagtgcaagttcacagacgtgacgctgagcccctggagtggggacagcaagtgccaccagcgccgggtgctgacgtacaccatccccatcagcaacccactgggccccaagagcgcctccgtggtggagacacagacgctgttccggcgcggcccccaggccggcgggtgtgtggtggactccgaggtgctgacgcagggcatcccctaccaggactacttctacactgcccaccgctactgcatcctgggtctggcccggaacaaggcgcggctccgagtgtcttctgagatccgctaccgaaagcagccgtggagcctggtgaagtcgctcattgagaagaactcgtggagcggcattgaagactatttccaccatctggagcgagagctcgccaaggctgagaagctgtctctggaggaaggcgggaaggatgcccggggcttgctatccggcctgcggcggcggaagcggcccctgagctggcgggctcacggggacgggccccagcacccagatcctgacccctgtgcccgggccggcattcacacctcgggctccctcagctcccgcttctccgaaccatctgtggaccagggccccggggcaggcatccccagtgccctggttctcatcagcattgtccttatcatcctcatcgccctcaacgtcctgctcttctaccgcctctggtccctggaaaggacagcccacacctttgagtcctggcacagcctggccctggccaagggcaagttcccccagacggccacagagtgggccgagatcctggcgctgcagaagcaattccacagcgtggaggtgcacaagtggaggcagatcctgcgggcctccgtggagctcctggatgagatgaagttctcgctggagaagctgcaccaaggcatcacagtctcagaccctccctttgacacccagccccggcccgatgacagcttttcctgaggaccccggccacgcagctgttcccccacatggacagatggacacacagagcctcggcggccactgctggcacggtgtgagcgccaggcatctcccacccgcccctcccgacggcccaaccaggggctgtgcagacgtggggaccacggaaccgagatgcactttagaccagggagctggcccggcctctggcaggccccccactaacttattttgcccggctgaggttgtggggggcgcctcctggggtgcacgattccctcagctctgggtttaatgtattatatttatttggggccgacagtgccccaataaagggtcagaagtggc

SEQ ID NO: 27543 - protein, 839 aa, Homo sapiens
MFGFNKVSLFPSLSLCPSAFPSLSSPSLPGFSLLLGLCGPSPPSLPGWGRRRDAAGRGKEGGVADAAAASGGSGLLCGRLGRVGAAAAEGQAGALRGRPAQPSPAQPSPALPCPALRPGRAHRAASMFDTTPHSGRSTPSSSPSLRKRLQLLPPSRPPPEPEPGTMVEKGSDSSSEKGGVPGTPSTQSLGSRNFIRNSKMLSPTYKQRNEDFRKLFSKLPEAERLIVDYSCALQREILLQGRLYLSENWICFYSNIFRWETTISIQLKEVTCLKKEKTAKLIPNAIQICTESEKHFFTSFGARDRCFLLIFRLWQNALLEKTLSPRELWHLVHQCYGSELGLTSEDEDYVSPLQLNGLGTPKEVGDVIALSDITSSGAADRSQEPSPVGSRRGHVTPNLSRASSDADHGAEEDKEEQVDSQPDASSSQTVTPVAEPPSTEPTQPDGPTTLGPLDLLPSEELLTDTSNSSSSTGEEADLAALLPDLSGRLLINSVFHVGAERLQQMLFSDSPFLQGFLQQCKFTDVTLSPWSGDSKCHQRRVLTYTIPISNPLGPKSASVVETQTLFRRGPQAGGCVVDSEVLTQGIPYQDYFYTAHRYCILGLARNKARLRVSSEIRYRKQPWSLVKSLIEKNSWSGIEDYFHHLERELAKAEKLSLEEGGKDARGLLSGLRRRKRPLSWRAHGDGPQHPDPDPCARAGIHTSGSLSSRFSEPSVDQGPGAGIPSALVLISIVLIILIALNVLLFYRLWSLERTAHTFESWHSLALAKGKFPQTATEWAEILALQKQFHSVEVHKWRQILRASVELLDEMKFSLEKLHQGITVSDPPFDTQPRPDDSFS

SEQ ID NO: 27544 - DNA, 1094 bp, Homo sapiens
gcccagcgcagcccagccccgcgcagcccagccctgccctgccctgccctgccctgcgcccggggcgcgcccaccgcgccgcatccatgttcgaccccacttataagcagcgtaatgaggacttccggaaactgttcagcaaactccccgaagcagaacgcctcattgtggattactcctgcgccctgcagcgtgagatcctgctccagggccgcctctacctctctgagaactggatctgcttctacagcaacatcttccgctgggagaccacgatctccatccagctgaaggaagtgacatgtctgaagaaggaaaagacggccaagctgatccccaacgccatccagatctgcacggagagcgagaaggtgacggaggacccggtgacgggaccacgcggtcccccgctcagcaggccgcctcccccaaacatgcaaagccccatttgttctgcaccctgagttctctccgagctgtccccttctctctgttctcccggcccaggcgcccatcacccctgacctgatccccgcaccagcctctcctctctttccctgcaacctgttacctcacacagctgctcaggaacagcagaaatagtaaaactcttccatgtatgtggcacctcagccgcccctcccttcgtaagtctccccgatgttgtgtcctgtccctgtcattgtggcctcatgtccgttggttgcaagatggctttctcaccagcggtccaacaagaagggggacaggtgtgggggacacttcccagcagacttctctttgtgttttgttggttaaaagtggatctggccaggtgtagtggctcatgcctgtaaccctagcattttggggaggctgaggcaggaagattgcttgagcccaggaggttgaggctagcctgggcaacatagtgagaccctgtctcttaaaaagcaaaaaattaaccaggtgtggtggcacgcacctgtagtcccagctactcactcaggaggctgagacaggaggatggcttgagcccaggaggttgaggctgcagtgagccgtgatcatgccactgcactccagcctgggtgacaaagccagaccctgtctca

SEQ ID NO: 27545 - protein, 125 aa, Homo sapiens
MFDPTYKQRNEDFRKLFSKLPEAERLIVDYSCALQREILLQGRLYLSENWICFYSNIFRWETTISIQLKEVTCLKKEKTAKLIPNAIQICTESEKVTEDPVTGPRGPPLSRPPPPNMQSPICSAP

SEQ ID NO: 27546 - DNA, 546 bp, Homo sapiens
cctgtgtgtgtctggggctccaaatctgtggctgtgagcagctggttgtgtgcgtgttgtgtctcattccatctgtagctccctgtgcaaatataaattacccctgtgtgtctgagtgtgacgttggagtgtttgtacatgtgtctggagttaccgtgtgtagcagctctgatccttcttgggctgtgtgtgttttaccattaattctatctgtagctccaagcgttgctgtaagttaccagtgtgcgtcccattgtgacttagtggtgtgtgtacaagtgtgcctggggctctgggttctaccatgaccctctgtgcctgcatatgcctgtaatttagctctgaaacgctcttctttttttttttttcttttgaaatagagtctggctctgtcgcccaggctagagtgcagtggcacgatctcggcccactgcaacctcctcctgctggacaggaggatggcttgagcccaggaggttgaggctgcagtgagccgtgatcatgccactgcactccagcctgggtgacaaagccagaccctgtctc

SEQ ID NO: 27547 - protein, 48 aa, Homo sapiens
FSSETLFFFFFSFEIESGSVAQARVQWHDLGPLQPPPAGQEDGLSPGG

SEQ ID NO: 27548 - DNA, 2215 bp, Homo sapiens
ccggaaactgttcagcaaactccccgaagcagaacgcctcattgtggattactcctgcgccctgcagcgtgagatcctgctccagggccgcctctacctctctgagaactggatctgcttctacagcaacatcttccgctgggagaccacgatctccatccagctgaaggaagtgacatgtctgaagaaggaaaagacggccaagctgatccccaacgccatccagatctgcacggagagcgagaagcatttcttcacttcctttggggcccgtgaccgctgcttcctcctcatcttccgcctctggcagaatgcactgcttgaaaagacgctgagtccccgcgagctctggcacctggtgcatcagtgctacggctcagagctgggcctcaccagtgaggatgaggactatgtctcccccttgcagctgaacggtctggggacccccaaggaagtgggagatgtgatcgccctgagcgacatcacctcctcgggggcagctgaccgcagccaggagccaagcccagtgggttcgcgccgtggccatgtcacgcccaacctttcccgagccagcagcgacgcagaccatggggcagaggaggacaaggaggagcaggtagacagccagccagacgcctcctccagccagacagtgaccccggtggctgaacccccgagcacagagcccacccagcctgacgggcccaccaccctgggccccttggatctgctgcccagtgaggagctattgacagacacaagtaactcctcttcatccactggggaggaagcggacttggctgccctgcttcccgacctctccggccgcctcctcatcaactctgtcttccatgtgggcgctgagcggctccagcagatgctcttctcggactcgcccttcctccagggcttcctacagcagtgcaagttcacagacgtgacgctgagcccctggagtggggacagcaagtgccaccagcgccgggtgctgacgtacaccatccccatcagcaacccactgggccccaagagcgcctccgtggtggagacacagacgctgttccggcgcggcccccaggccggcgggtgtgtggtggactccgaggtgctgacgcagggcatcccctaccaggactacttctacactgcccaccgctactgcatcctgggtctggcccggaacaaggcgcggctccgagtgtcttctgagatccgctaccgaaagcagccgtggagcctggtgaagtcgctcattgagaagaactcgtggagcggcattgaagactatttccaccatctggagcgagagctcgccaaggctgagaagctgtctctggaggaaggcgggaaggatgcccggggcttgctatccggcctgcggcggcggaagcggcccctgagctggcgggctcacggggacgggccccagcacccagatcctgacccctgtgcccgggccggcattcacacctcgggctccctcagctcccgcttctccgaaccatctgtggaccagggccccggggcaggcatccccagtgccctggttctcatcagcattgtccttatcatcctcatcgccctcaacgtcctgctcttctaccgcctctggtccctggaaaggacagcccacacctttgagtcctggcacagcctggccctggccaagggcaagttcccccagacggccacagagtgggccgagatcctggcgctgcagaagcaattccacagcgtggaggtgcacaagtggaggcagatcctgcgggcctccgtggagctcctggatgagatgaagttctcgctggagaagctgcaccaaggcatcacagtctcagaccctccctttgacacccagccccggcccgatgacagcttttcctgaggaccccggccacgcagctgttcccccacatggacagatggacacacagagcctcggcggccactgctggcacggtgtgagcgccaggcatctcccacccgcccctcccgacggcccaaccaggggctgtgcagacgtggggaccacggaaccgagatgcactttagaccagggagctggcccggcctctggcaggccccccactaacttattttgcccggctgaggttgtggggggcgcctcctggggtgcacgattccctcagctctgggtttaatgtattatatttatttggggccgacagtgccccaataaagggtcagaagtggc

SEQ ID NO: 27549 - protein, 335 aa, Homo sapiens
MLFSDSPFLQGFLQQCKFTDVTLSPWSGDSKCHQRRVLTYTIPISNPLGPKSASVVETQTLFRRGPQAGGCVVDSEVLTQGIPYQDYFYTAHRYCILGLARNKARLRVSSEIRYRKQPWSLVKSLIEKNSWSGIEDYFHHLERELAKAEKLSLEEGGKDARGLLSGLRRRKRPLSWRAHGDGPQHPDPDPCARAGIHTSGSLSSRFSEPSVDQGPGAGIPSALVLISIVLIILIALNVLLFYRLWSLERTAHTFESWHSLALAKGKFPQTATEWAEILALQKQFHSVEVHKWRQILRASVELLDEMKFSLEKLHQGITVSDPPFDTQPRPDDSFS

SEQ ID NO: 27550 - DNA, 2391 bp, Homo sapiens
ttttgtacaaaaaagaaaaaaaagaaaaaactaggtgtggtggtgcacacctatagtaccagctacttggcagaccaaggcaagaggatcacatgaggccaagagtttgagacaagcctgggcaacatagtgagacccctgtctttacaaaaaatttaaaaattagccaggcatggggtcatgcaccctatgtagtctcagctactggggaggctgaggcaggaggatcgcttgagcccaggagttggaggctgcagtgagctatgattgcaccactgcacttcggcctgagcaacagagcgagaccctgtctctaaaacgaacaaagggagagaattaagtgatttcatacatttaaagcacttgggccagttagtaagcattgactattagtatttctattatcattattgtattcattttctctctccactaattttcagctagcctctattcttgtctcttatggggcagagatggcctcagccctgccccagaccagcccaatgagagagagcagcctatttttcctagtgtctacagcggacaccctagggttggctctgattgggccaacttgagagtgtgcctgcccctgaaccaatcactgtggttgatcggatagacctgggccacccactcacccctgaaccaattgctgtgcccctaggttgatgctcccaggaggcgtgctatctggtaatgaatccctgtgatttaaatctcagggcctaggtgtgttctccacccagaaccaagcacagtggctgtctgtctgggcctggagcacgtgcccaccctcaacccatccctgagtcacaggagggctctgtgtcagtgtccagctgtgctccaggaggtggggtccgcccatgcacactacaaggcctgggagtggggaggcgtggcccgcagagggagggaggagtggaggcagtcatcatcctcggctctcctctgtctccagcggacttggctgccctgcttcccgacctctccggccgcctcctcatcaactctgtcttccatgtgggcgctgagcggctccagcagatgctcttctcggactcgcccttcctccagggcttcctacagcagtgcaagttcacagacgtgacgctgagcccctggagtggggacagcaagtgccaccagcgccgggtgctgacgtacaccatccccatcagcaacccactgggccccaagagcgcctccgtggtggagacacagacgctgttccggcgcggcccccaggccggcgggtgtgtggtggactccgaggtgctgacgcagggcatcccctaccaggactacttctacactgcccaccgctactgcatcctgggtctggcccggaacaaggcgcggctccgagtgtcttctgagatccgctaccgaaagcagccgtggagcctggtgaagtcgctcattgagaagaactcgtggagcggcattgaagactatttccaccatctggagcgagagctcgccaaggctgagaagctgtctctggaggaaggcgggaaggatgcccggggcttgctatccggcctgcggcggcggaagcggcccctgagctggcgggctcacggggacgggccccagcacccagatcctgacccctgtgcccgggccggcattcacacctcgggctccctcagctcccgcttctccgaaccatctgtggaccagggccccggggcaggcatccccagtgccctggttctcatcagcattgtccttatcatcctcatcgccctcaacgtcctgctcttctaccgcctctggtccctggaaaggacagcccacacctttgagtcctggcacagcctggccctggccaagggcaagttcccccagacggccacagagtgggccgagatcctggcgctgcagaagcaattccacagcgtggaggtgcacaagtggaggcagatcctgcgggcctccgtggagctcctggatgagatgaagttctcgctggagaagctgcaccaaggcatcacagtctcagaccctccctttgacacccagccccggcccgatgacagcttttcctgaggaccccggccacgcagctgttcccccacatggacagatggacacacagagcctcggcggccactgctggcacggtgtgagcgccaggcatctcccacccgcccctcccgacggcccaaccaggggctgtgcagacgtggggaccacggaaccgagatgcactttagaccagggagctggcccggcctctggcaggccccccactaacttattttgcccggctgaggttgtggggggcgcctcctggggtgcacgattccctcagctctgggtttaatgtattatatttatttggggccgacagtgccccaataaagggtcagaagtggc

SEQ ID NO: 27551 - protein, 335 aa, Homo sapiens; identical to SEQ ID NO: 27549

SEQ ID NO: 27552 - DNA, 1465 bp, Homo sapiens
ccgcagtgaccttgaggaaaagatagacctcacaccagaccagagtgatccgggctgggatgggggaggtatgggcagaggggttggggctgggagtggggaagccctgggaggccagcggcggcttcctcccaggccagagggggcagtcaggatgggcgtcctgagagagtggagaccgcgtaggctaagggcttgggcagggagaacccacactcctgcccagaagcctgcaggagttggcgggcaggacgctgggaggaaacagaagcaggatcccggggttgagcagaccctgcgaggtgagggtcaggccagctacatgctcagcctctgagcctcagctctcagctctcatccagtgagggggcgtggtgctctcagccaagagctgccccgggtgaggagggctgggggtgtcgggggcaggccaggcggcgctcatctctctgtctcccctcactgctgctgctgcaggatctgtgtgaggtagggtcccgagtcctccccctgccctcccctccctgcaccccacccctgctgcagcctcttctccccaccccatgccccccagctcccccagggaggtggcctggcatggcagtcaagggtatgggcatcagacagacctgggtttgaacactgacttccctgctatggactgtgcaaccctaggcatgtctctcatcctctctgagcctaattctcctcctctgcaatgggggatagaggtgtccctacaagatgtagttgtttgggggtgttcagagcatctagaccccaggaatcctgacctctgacccctgtccccagccttatcatcctcatcgccctcaacgtcctgctcttctaccgcctctggtccctggaaaggacagcccacacctttgagtcctggcacagcctggccctggccaagggcaagttcccccagacggccacagagtgggccgagatcctggcgctgcagaagcaattccacagcgtggaggtgcacaagtggaggcagatcctgcgggcctccgtggagctcctggatgagatgaagttctcgctggagaagctgcaccaaggcatcacagtctcagaccctccctttgacacccagccccggcccgatgacagcttttcctgaggaccccggccacgcagctgttcccccacatggacagatggacacacagagcctcggcggccactgctggcacggtgtgagcgccaggcatctcccacccgcccctcccgacggcccaaccaggggctgtgcagacgtggggaccacggaaccgagatgcactttagaccagggagctggcccggcctctggcaggccccccactaacttattttgcccggctgaggttgtggggggcgcctcctggggtgcacgattccctcagctctgggtttaatgtattatatttatttggggccgacagtgccccaataaagggtcagaagtggc

SEQ ID NO: 27553 - protein, 30 aa, Homo sapiens
MKFSLEKLHQGITVSDPPFDTQPRPDDSFS

SEQ ID NO: 27554 - DNA, 418 bp, Homo sapiens
ccttatcatcctcatcgccctcaacgtcctgctcttctaccgccctccctttgacacccagccccggcccgatgacagcttttcctgaggaccccggccacgcagctgttcccccacatggacagatggacacacagagcctcggcggccactgctggcacggtgtgagcgccaggcatctcccacccgcccctcccgacggcccaaccaggggctgtgcagacgtggggaccacggaaccgagatgcactttagaccagggagctggcccggcctctggcaggccccccactaacttattttgcccggctgaggttgtggggggcgcctcctggggtgcacgattccctcagctctgggtttaatgtattatatttatttggggccgacagtgccccaataaagggtcagaagtggc

SEQ ID NO: 27555 - protein, 97 aa, Homo sapiens
MTAFPEDPGHAAVPPHGQMDTQSLGGHCWHGVSARHLPPAPPDGPTRGCADVGTTEPRCTLDQGAGPASGRPPTNLFCPAEVVGGASWGARFPQLWV

SEQ ID NO: 27556 - DNA, 1330 bp, Homo sapiens
agtgcgcaggagaccgcggtccgcgcccgagcgcgcccgagccggagcgggaccggggtcggtgcacctagcggatgtgcccggctgcgcgcgccagcgcagcagcccgagcagcggccgccgcccgcgcggcggggatgcccggacgccgggccccggggctgggcccccggcggtaaccggagcgggggggccgcgccccccctcctcccccctcgccggtcccagagccgcagctgctgcgcccgcgcgctcccggggacattctaaccgccgccaggtcccgccgcctctcgccccgctattaataccggcggcccgggaggggggcgcagcacgcgccgcgcagccatggggaggctgctggccttagtggtcggcgcggcactggtgtcctcagcctgcgggggctgcgtggaggtggactcggagaccgaggccgtgtatgggatgaccttcaaaattctttgcatctcctgcaagcgccgcagcgagaccaacgctgagaccttcaccgagtggaccttccgccagaagggcactgaggagtttgtcaagatcctgcgctatgagaatgaggtgttgcagctggaggaggatgagcgcttcgagggccgcgtggtgtggaatggcagccggggcaccaaagacctgcaggatctgtctatcttcatcaccaatgtcacctacaaccactcgggcgactacgagtgccacgtctaccgcctgctcttcttcgaaaactacgagcacaacaccagcgtcgtcaagaagatccacattgaggtagtggacaaaggtgagtcgggtgctgcctgcccctttaccgtcacccaccggagagccagatggagggacagatggcaggcagtggacaggacaggctggctctgtgcctggccagccaaccgcccacagcagcgggctgagggggaggggagcagcccctcctgcccactccagctctggcctctgtttctctccagcccacggagaggtcaaagcatgcctgtcccccacagacgctccgggtacagaacccagctctgtcacctgtgctgtatgacctctggcaggtgccttctgtctctgagccaaagggttgtcctgggcttgcccgggataataatccgatgtgtttctcggggtgtggtttgagccattcttccatcatggggttcatgaggattgagcagctgcaggcacacgcctggcttccagcagagccttgcaggtggtggcgagggtggcggttcttactgttcgagtagctcagccctgctgccctctgtggtgatgaggcaagagagcgtgccacctagagcagagt

SEQ ID NO: 27557 - protein, 268 aa, Homo sapiens; identical to SEQ ID NO: 3757

SEQ ID NO: 27558 - DNA, 1673 bp, Homo sapiens
agtgcgcaggagaccgcggtccgcgcccgagcgcgcccgagccggagcgggaccggggtcggtgcacctagcggatgtgcccggctgcgcgcgccagcgcagcagcccgagcagcggccgccgcccgcgcggcggggatgcccggacgccgggccccggggctgggcccccggcggtaaccggagcgggggggccgcgccccccctcctcccccctcgccggtcccagagccgcagctgctgcgcccgcgcgctcccggggacattctaaccgccgccaggtcccgccgcctctcgccccgctattaataccggcggcccgggaggggggcgcagcacgcgccgcgcagccatggggaggctgctggccttagtggtcggcgcggcactggtgtcctcagcctgcgggggctgcgtggaggtggactcggagaccgaggccgtgtatgggatgaccttcaaaattctttgcatctcctgcaagcgccgcagcgagaccaacgctgagaccttcaccgagtggaccttccgccagaagggcactgaggagtttgtcaagatcctgcgctatgagaatgaggtgttgcagctggaggaggatgagcgcttcgagggccgcgtggtgtggaatggcagccggggcaccaaagacctgcaggatctgtctatcttcatcaccaatgtcacctacaaccactcgggcgactacgagtgccacgtctaccgcctgctcttcttcgaaaactacgagcacaacaccagcgtcgtcaagaagatccacattgaggtagtggacaaagccaacagagacatggcatccatcgtgtctgagatcatgatgtatgtgctcattgtggtgttgaccatatggctcgtggcagagatgatttactgctacaagaagatcgctgccgccacggagactgctgcacaggagaatgcctcggaatacctggccatcacctctgaaagcaaagagaactgcacgggcgtccaggtggccgaatagccctggccctgggccccgcctcaaggaagagccagccgtaatggggactctccaggcaccgcctgcccccagcgtgggggtggccactcctgggccccagaaagcctcagagtcctgccgacggagccactggggtgggagggggcagggggcttggctcgcacccccactttcgcctcctccagctcctgccccgccggccgcgcaccgccatgcatgatgggtaaagcaatactgccgctgcccccaccctgcttctgctgcctgtttggggaggggggcggtgaggtgggggcagcggccccgcacccctcctccttgctgatttgcacacattggccgcttcagacacgcacttctggggccagcccctccccgcctcctccctgcctggcggcaggggtcgcgatgatgggctggagcagtttggggcagggggttctgggacccactccgactccccctccccggcatcatttcccctcccgcttcctccggctggacctggggtcccccctccctgtaatgcactcctgccccggcccaacctcgccctctctcaccagccttgaactgtggccacctagaaaggggcccattcagcctcgtctctttacagaagtagttttgttcatgaaataaagactcttggacttgatgcatag

SEQ ID NO: 27559 - protein, 218 aa, Homo sapiens; identical to SEQ ID NO: 3755

SEQ ID NO: 27560 - DNA, 1505 bp, Homo sapiens
ctcccgaaatccagcgatccttctgcttgagcctcccacgtagctgggactacaggtgtgagccactacgcccggcaattttttttttttttgtagagactggatcttgctatgttgcccaggatggtcttgaactcctggcctcaaataatcttccctccttagccgccgtaagtgccgagattacaggagagagcctccgcgcctggcctacagtatttttattataatccatcatactagcgtatttttaacgttccccaccatggcgggtatttttattacccaccatgctatgctatagtatttcaaaaattaatcctattgtagcatgtaaaaatattccattctataccatactatattcatcattacctctgatactacagtatttttaacatgactcattgtgctattgtattttttcattacccacaataccacaatattactgtatttgttagcactgcctgccattccttattattattatttttgcaatggagtctcgctctgtcacccaggcaggctggagtgcagcagtacaatgtcggctcactgcacctcccgggctcaagcgattcttctgcctcagcctccgaagtagctgggattacaggcacgcgccaccacgcccggctaattcttttgtatttttagtagagacagggtttcgctatgtagaccaggctggtctcgcactcctggcctccagtgattcacccaccttggcctcccagagtgctggaatgacacgtatgagccaccacactgacctttttattatttttatccaccatctcgctgcaatttcagtattgcccatcgacctatattgcctcctggtaatgacccctgaggaatgagccatgccatttccataggtggaggcgacgggtcatggtggtgagaacttcactgacctggaagaggtggagaagatgctgggaagctgctgagggctgcccacctgtgttaggagaaggcagatggggacccatggggacagtaatactattttggatccacacaacgggagtggaaaatgccttgaggcacagcagcgtctgaggcgggtgagaaatccggcctgcagagtcgcggctggccttcagatctgcgggctgcctgtgagatgccgtgttacctaaatccatttgggcactgagttccaggagtgggggcaagaattccgatgacggggctttatccggtgcgcatccagctcagagtggttcctgagaccagccaccatgggcagccaggatgtgctcatccttgaggctttccgaggcatcaaggagatggttggataaagaatttagcacagagcttgactgatggcaggcgcccacaacatgagacacattaataatgtgtgtggaggccaggtgtagtggttcatgcctgtcaccccagcactttgggaggcagaggtgggaagatttcttgaggccaggaattcaagaccagcctgggcaacacagcgagacctcatctctacc

SEQ ID NO: 27561 - protein, 121 aa, Homo sapiens
MESRSVTQAGWSAAVQCRLTAPPGLKRFFCLSLRSSWDYRHAPPRPANSFVFLVETGFRYVDQAGLALLASSDSPTLASQSAGMTRMSHHTDLFIIFIHHLAAISVLPIDLYCLLVMTPEE

SEQ ID NO: 27562 - DNA, 3468 bp, Homo sapiens
cacgcgccaccacgcccggctaattcttttgtatttttagtagagacagggtttcgctatgtagaccaggctggtctcgcactcctggcctccagtgattcacccaccttggcctcccagagtgctggaatgacacgtatgagccaccacactgacctttttattatttttatccaccatctcgctgcaatttcagtattgcccatcgacctatattgcctcctggtaatgacccctgaggaatgagccatgccatttccataggtggaggcgacgggtcatggtggtgagaacttcactgacctggaagaggtggagaagatgctgggaagctgctgagggctgcccacctgtgttaggagaaggcagatggggacccatggggacagtaatactattttggatccacacaacgggagtggaaaatgccttgaggcacagcagcgtctgaggcgggtgagaaatccggcctgcagagtcgcggctggccttcagatctgcgggctgcctgtgagatgccgtgttacctaaatccatttgggcactgagttccaggagtgggggcaagaattccgatgacggggctttatccggtgcgcatccagctcagagtggttcctgagaccagccaccatgggcagccaggatgtgctcatccttgaggctttccgaggcatcaaggagatggttggataaagaatttagcacagagcttgactgatggcaggcgcccacaacatgagacacattaataatgtgtgtggaggccaggtgtagtggttcatgcctgtcaccccagcactttgggaggcagaggtgggaagatttcttgaggccaggaattcaagaccagcctgggcaacacagcgagacctcatctctaccaaaaaaaaaaaaaaaaaaggaaaaaattcacctggcctagtggtgcacacttgtagtctccgctactcaggaggctgaggcaggaggattgcttgagctcaggagttccaggctgcagtgggctatgattgcatcactgcactccagtctgggcaatagagcaagaccctgtctcttaaaaaaataaagtctgttgaaaagaatgaatgaaggaaggaaggaatgagagggaaaccctgtctcagctcctcccgcagggaagctggggcagggcaggcagggggggcatccggccccgctccctcccttactctggcccagaaagcactggtgccatctgcacagggtggagccaaagaaagtgccccactcacagcagagggaggccatttgaggacagcagggaaaatgggatctcagccatctaggagggggccagagatgtgggatggacacctaggaaatccagccgaggacaccagagtggcttttgactctggtcccctggctgaacgcgttccctttacagtttaaatttaggctcaaggagaagaagctggcaatcggcagggccagtgctgtagagaggatgtagggtttccggaaaatagccaacacttcagcagtgctggctgcgagctcatccaagcatgttacgggtgttaactcatttcctctccagcaaccctgtgagagggtctgagtgttcccatctccattttacagaggctcagagaggtgcagtcctttgcctgaggtcacacagctagtaagaggcagagccgggatttgaaccctggcagtctggccctagagccccagctgttaaccattaggctttatagccccagttataacaacaataataatactaatacaagtgaaccttcactgagtgccatttatagatcaagcactattctaaggattttaaagcatatttaattctcacagcactctgatgaaggaggtattcattttacaattgaagaaacagaggcctagagacattgagtcacttgcgcaaggtcacacagctggccagtggcagagccagcctttgaacctgagccttctggttgcagagctacggcttttaggcaccgtgctgagggcctccagaatgacacagatgtggcctcgagttacacagggaggcaggttgagggtgacccccaccaggcctacccaaggctgggtattaataatcacagtgcatacaccaggcccagggaggttgagccactcatccaagctcacacagcaagctcacagcacactcaggctgtcatgcagcctgggctacccccttaaccctgcctggcccctgcagccaacagagacatggcatccatcgtgtctgagatcatgatgtatgtgctcattgtggtgttgaccatatggctcgtggcagagatgatttactgctacaagaagatcgctgccgccacggagactgctgcacaggagaatgcgtgagtagggtggctgggaggtgggagggcacccagggcaccgtcacacttgccagagaggaactccggagcccgggcagggaggaggcagcggagcggcccagggcgccatctctcagtactacccagaggggagtgctccctgtcagacacaggataggggtcgtcagacccagccccttcctccctccaactcaggagcccaggctcccagccagattcctcaaagaccctgaggagtccacccatagactccttctctctctaactaaggagccctgtgtacctggggtggagaccgctaccttcccccatcccccgggggttgggtcggtctgatgatggggtcactgtatacctggcctttcccccacagctcggaatacctggccatcacctctgaaagcaaagagaactgcacgggcgtccaggtggccgaatagccctggccctgggccccgcctcaaggaagagccagccgtaatggggactctccaggcaccgcctgcccccagcgtgggggtggccactcctgggccccagaaagcctcagagtcctgccgacggagccactggggtgggagggggcagggggcttggctcgcacccccactttcgcctcctccagctcctgccccgccggccgcgcaccgccatgcatgatgggtaaagcaatactgccgctgcccccaccctgcttctgctgcctgtttggggaggggggcggtgaggtgggggcagcggccccgcacccctcctccttgctgatttgcacacattggccgcttcagacacgcacttctggggccagcccctccccgcctcctccctgcctggcggcaggggtcgcgatgatgggctggagcagtttggggcagggggttctgggacccactccgactccccctccccggcatcatttcccctcccgcttcctccggctggacctggggtcccccctccctgtaatgcactcctgccccggcccaacctcgccctctctcaccagccttgaactgtggccacctagaaaggggcccattcagcctcgtctctttacagaagtagttttgttcatgaaataaagactcttggacttgatgcatag

SEQ ID NO: 27563 - protein, 141 aa, Homo sapiens
MMGKAILPLPPPCFCCLFGEGGGEVGAAAPHPSSLLICTHWPLQTRTSGASPSPPPPCLAAGVAMMGWSSLGQGVLGPTPTPPPRHHFPSRFLRLDLGSPLPVMHSCPGPTSPSLTSLELWPPRKGPIQPRLFTEVVLFMK

SEQ ID NO: 27564 - DNA, 1785 bp, Homo sapiens
tcgagcccgctttccagggaccctacctgagggcccacaggtgaggcagcctggcctagcaggccccacgccaccgcctctgcctccaggccgcccgctgctgcggggccaccatgctcctgcccaggcctggagactgacccgaccccggcactacctcgaggctccgcccccacctgctggaccccagggtcccaccctggcccaggaggtcagccagggaatcattaacaagaggcagtgacatggcgcagaaggagggtggccggactgtgccatgctgctccagacccaaggtggcagctctcactgcggggaccctgctacttctgacagccatcggggcggcatcctgggccattgtggctgttctcctcaggagtgaccaggagccgctgtacccagtgcaggtcagctctgcggacgctcggctcatggtctttgacaagacggaagggacgtggcggctgctgtgctcctcgcgctccaacgccagggtagccggactcagctgcgaggagatgggcttcctcagggcactgacccactccgagctggacgtgcgaacggcgggcgccaatggcacgtcgggcttcttctgtgtggacgaggggaggctgccccacacccagaggctgctggaggtcatctccgtgtgtgattgccccagaggccgtttcttggccgccatctgccaagactgtggccgcaggaagctgcccgtggaccgcatcgtgggaggccgggacaccagcttgggccggtggccgtggcaagtcagccttcgctatgatggagcacacctctgtgggggatccctgctctccggggactgggtgctgacagccgcccactgcttcccggagcggaaccgggtcctgtcccgatggcgagtgtttgccggtgccgtggcccaggcctctccccacggtctgcagctgggggtgcaggctgtggtctaccacgggggctatcttccctttcgggaccccaacagcgaggagaacagcaacgatattgccctggtccacctctccagtcccctgcccctcacagaatacatccagcctgtgtgcctcccagctgccggccaggccctggtggatggcaagatctgtaccgtgacgggctggggcaacacgcagtactatggccaacaggccggggtactccaggaggctcgagtccccataatcagcaatgatgtctgcaatggcgctgacttctatggaaaccagatcaagcccaagatgttctgtgctggctaccccgagggtggcattgatgcctgccagggcgacagcggtggtccctttgtgtgtgaggacagcatctctcggacgccacgttggcggctgtgtggcattgtgagttggggcactggctgtgccctggcccagaagccaggcgtctacaccaaagtcagtgacttccgggagtggatcttccaggccataaagactcactccgaagccagcggcatggtgacccagctctgaccggtggcttctcgctgcgcagcctccagggcccgaggtgatcccggtggtgggatccacgctgggcctaggatgggacgtttttcttcttgggcccggtccacaggtccaaggacaccctccctccagggtcctctcttccacagtggcgggcccactcagccccgagaccacccaacctcaccctcctgacccccatgtaaatattgttctgctgtctgggactcctgtctaggtgcccctgatgacgggatgctctttaaataataaagatggttttgattaa

SEQ ID NO: 27565 - protein, 417 aa, Homo sapiens; identical to SEQ ID NO: 3759

SEQ ID NO: 27566 - DNA, 2365 bp, Homo sapiens
tcgagcccgctttccagggaccctacctgagggcccacaggtgaggcagcctggcctagcaggccccacgccaccgcctctgcctccaggccgcccgctgctgcggggccaccatgctcctgcccaggcctggagactgacccgaccccggcactacctcgaggctccgcccccacctgctggaccccagggtaaggacaagggcccccagactcacagttccagccctgaggacaggggttccctcatccccccacccagcctaatgcccacctcctaatagaggggttcctggggacctgaagagggggcactatgacgtccccccaagcacctaggtgttctgtcctgctcttccttcagactcagccgttggaccccagtcctttcctccccagacccaggagttccagccctcaggcccctcctccctcatactagggagtcctggcccccaaattcctcctttcccaagacttatgatttcaggtcctcagctgtctcctccctcaaaccgggatcctcagtcccctgctccaccaggctcaggcatgggggtccccatccctgcaaatccaggcgtccccccgctgctggtcagacactgaccccatccttgaacccagcccaatctgcgtccgtgatcacggcgtgctctggccaaggcccagtccctacagcctgcctggatggacgcctgggactgggggcgccaggactgggctgggctgggctcccccaggccctgcctccccgtccatctcctcacaggtcccaccctggcccaggaggtcagccagggaatcattaacaagaggcagtgacatggcgcagaaggagggtggccggactgtgccatgctgctccagacccaaggtggcagctctcactgcggggaccctgctacttctgacagccatcggggcggcatcctgggccattgtggctgttctcctcaggagtgaccaggagccgctgtacccagtgcaggtcagctctgcggacgctcggctcatggtctttgacaagacggaagggacgtggcggctgctgtgctcctcgcgctccaacgccagggtagccggactcagctgcgaggagatgggcttcctcagggcactgacccactccgagctggacgtgcgaacggcgggcgccaatggcacgtcgggcttcttctgtgtggacgaggggaggctgccccacacccagaggctgctggaggtcatctccgtgtgtgattgccccagaggccgtttcttggccgccatctgccaagactgtggccgcaggaagctgcccgtggaccgcatcgtgggaggccgggacaccagcttgggccggtggccgtggcaagtcagccttcgctatgatggagcacacctctgtgggggatccctgctctccggggactgggtgctgacagccgcccactgcttcccggagcggaaccgggtcctgtcccgatggcgagtgtttgccggtgccgtggcccaggcctctccccacggtctgcagctgggggtgcaggctgtggtctaccacgggggctatcttccctttcgggaccccaacagcgaggagaacagcaacgatattgccctggtccacctctccagtcccctgcccctcacagaatacatccagcctgtgtgcctcccagctgccggccaggccctggtggatggcaagatctgtaccgtgacgggctggggcaacacgcagtactatggccaacaggccggggtactccaggaggctcgagtccccataatcagcaatgatgtctgcaatggcgctgacttctatggaaaccagatcaagcccaagatgttctgtgctggctaccccgagggtggcattgatgcctgccagggcgacagcggtggtccctttgtgtgtgaggacagcatctctcggacgccacgttggcggctgtgtggcattgtgagttggggcactggctgtgccctggcccagaagccaggcgtctacaccaaagtcagtgacttccgggagtggatcttccaggccataaagactcactccgaagccagcggcatggtgacccagctctgaccggtggcttctcgctgcgcagcctccagggcccgaggtgatcccggtggtgggatccacgctgggcctaggatgggacgtttttcttcttgggcccggtccacaggtccaaggacaccctccctccagggtcctctcttccacagtggcgggcccactcagccccgagaccacccaacctcaccctcctgacccccatgtaaatattgttctgctgtctgggactcctgtctaggtgcccctgatgacgggatgctctttaaataataaagatggttttgattaa

SEQ ID NO: 27567 - protein, 417 aa, Homo sapiens; identical to SEQ ID NO: 3759

SEQ ID NO: 27568 - DNA, 401 bp, Homo sapiens
actgacccgaccccggcactacctcgaggctccgcccccacctgctggaccccagggtcccaccctggcccaggaggtcagccagggaatcattaacaagaggcagtgacatggcgcagaaggagggtggccggactgtgccatgctgctccagacccaaggtggcagctctcactgcggggaccctgctacttctgacagccatcggggcggcatcctgggccattgtggctgttctcctcaggagtgaccaggagccgctgtacccagtgcaggtcagctctgcggacgctcggctcatggtctttgacaagacggaagggacgtggcggctgctgtgctcctcgcgctccaacgccagggtagccggactcagctgcgaggagatgggcttcctcagg

SEQ ID NO: 27569 - protein, 96 aa, Homo sapiens
MAQKEGGRTVPCCSRPKVAALTAGTLLLLTAIGAASWAIVAVLLRSDQEPLYPVQVSSADARLMVFDKTEGTWRLLCSSRSNARVAGLSCEEMGFL

SEQ ID NO: 27570 - DNA, 1664 bp, Homo sapiens
tgaaagtttgctgcgtagggatagggagaccgggccggattgcggggagtgagcaggttcagcagtgacggcattcttaagagtcctgcccaagtgagggacttggggtgtgggacagagtggcccccagggcagtgggcgttggaaactgagaggccctgcgaaggaggcttggggaggggctacggtgaccaggggacgaggtataggaagaggagggcggaaagccttgagggtgggcttcttggatcccaattgccccagaggcacaggcctgggcatcactgtattatttcccgaggggagaaggggctatttcccatgggaagacaaagtgggatgaatagtggaccttgagaagagggggtggccaggaaaaggttcctgaaggaggcaggacccagactgcaggctggggagggtttgggcagccagagggaggtgagggtgctggagcgggggtcaatcggtcactccggccggagatctgagtggcctctgccccctctgcgctgtggagtgcatctgattgccagcctcgctggaccgttgagaggattcatcgagaccctggatatgaatatgcagtgtgaactgaagtttggggacatgagtaatcagtcacagtggcccaagatttgaggtgtaaatggagaagtcagaatgattcgctgcagctgtctggaacagctgccgctccagatgctgctgctgccgccgcggccaccccaccctcggtcctcctctccggaggccatggacccaccgccccccaaggctccccctttccccaaggcggaaggcccctcctccactccttcctcggcggcggggccccgacccccgcggctgggccgccacctcctcatcgacgccaatggggtcccctacacatacacggtgcagctggaggaggagccccggggcccgccccagcgcgaggcgcccccaggagagcccggccctcgcaagggctacagctgcccggagtgcgcccgtgtctttgccagccctctgcggctgcagagccaccgcgtgtcgcactcggacctcaagcccttcacgtgcggcgcctgcggcaaggccttcaagcgctccagccacctgtcgcggcatcgcgccacgcaccgcgcccgcgccgggccgccgcacacctgcccgctctgcccacgccgcttccaggacgccgcggagctggcgcagcacgtgcgcctccactaagctcgagacccggcctgtgctgccctgcccgtctcagggccaccaagtctgacccacacagcgtcactcactcccacacacaccccctggctctgctgaggttactgccttaccctgggcctcagtttccccaccttccaaagggaggagcatcattccttccttaccccctttctagctgtgtgatgtagaccaaagtcgttgcccctccctgggcctgggaaccagtcggaactgggttccagtccagctgtgctgtgtgagcctgtgcaagtgacatgacctctctaaaccttggttttctgctctctggagcggtgaaccggtggttgtctgcggggaagagatgataaagagcacgggcacggtctggttcatttctgtatctaccccccttccgcccacgcccccgaccctttgctcaataaacattccgcactcca

SEQ ID NO: 27571 - protein, 185 aa, Homo sapiens
MIRCSCLEQLPLQMLLLPPRPPHPRSSSPEAMDPPPPKAPPFPKAEGPSSTPSSAAGPRPPRLGRHLLIDANGVPYTYTVQLEEEPRGPPQREAPPGEPGPRKGYSCPECARVFASPLRLQSHRVSHSDLKPFTCGACGKAFKRSSHLSRHRATHRARAGPPHTCPLCPRRFQDAAELAQHVRLH

SEQ ID NO: 27572 - DNA, 3530 bp, Homo sapiens
attcaggtcctctgatacaccagccacatttcaagagtgtaagagtcccacgtggctagtgactgtcatagaactttccaccattgcagaaagttctgatggacagtgctctaggatgtagctgtggcaccccagggtcttggggctcgctgtgacagttactcctcttctgtcccccactctcagctgcacctgcagatgctgctgctgccgccctcctgcgaggccgtggcgccacgtggctggaggaggagctgcagctgccccgagtgctgccgcgtgtgcagctctccagtgcggctgcagcgccaccgcgcgttgctttcgacgccggagtccttcgcatgcgcagccagcgcccgggcctcaagtgccccaggacctggcgcagcccgcgagcccgcatcaggcttccagtgggccccgtgggcagtgccagcctttcccacctccgcatctggcaaagcctggccttcgctgcgcttcggtgtcgccacatgccttctggaaatatcacacctccccacctgcgcatgcagccgtctggccctctgtgggcctcggttcccgcatgtgccccgtggaaagaacataccttccccaactatctggcagcgtctggccttctccgggcctcggcctccccatttgctgggtggagaatcacggcccggccacatcggagccaatggctggtctctggacctcggtctccacatttgctcagccggcaggaacatcccttctcccgccctctacctcggtgggtggccacggccgagcaggcagcgacggcccagtggaaagaggacaaacccttgtgggccttagggcgaagacgtaactttgcttagtctcggtttattggccgatctcttgtcaagcggcggaatcgttccgttcgggaggtgggaggggagcggggccgccgggggcgggcgtcttcagtggaccccacgcctccggtcccctccccgcagggcgctccgcagaggcgaggggtgggagcgccggctccaggcggcggaacctccgcactgggctcgcgcgcttccggccggcgccttttcccagggactccgccaacccctcgcacccccgcgcccccagtccccgcgtccccggcgccgccggcccggagctgcccggaagtctcggttccgccgccggcgctcgccaggggaagcccggggccgcccgggacctcggcccgttcctccggacccgagaggccgccgcacggggtacgggggccgggatggagggaggagcctggccctgggacgacgccggggccaggcaggctgggggagtgcgctggagccacccgggatgggggtgggggtcgggagcggcaggatcgggcggagggacgggaggggaagtcgaggcgccagggctccttggggaagtgaaggcaataggaggggccccagggccaggggacaggcggtgtgtagcgggatgggggcgaaaacgcccgggcgctggggttcccataaacaaggggagcagagcaaaagaacgggcgggggaccacgctgtgtgtaacagggagagggatggggctcctggaagaggtgaacacgaggagaaagagagatgccagacgtacacagaaaggaggggaaagtgggcttgggagaggtgctgtgggaagcggagtcccggagcctggtgtgcataacggggtttgggagaaggcccctgatgggtacagaaagaagtaacgatgtcaccgccatatatggggggcgagagaaaagggggcctttggggagaatgtagcaggtagccaggttgggggggcggggtatacagaaggaaggcatttgagccattttggggtgtatagatgtagtaagacgatgggttccgtagtggggagaggtgactagacttcgaggtgctaagtgtaggaacaggatggaaaagccctagtgaaatgtggggaattgggttagtggggctctggggaggtacctagagaggaagtgagggaggccacggaatatgaagatggggaggccctgcggcatgtagtggggacggagggccaggaggccgatacgggggccggtgggggggtagggggcggcaaagggaggggaagtaaactgaactggggctgggcaacaggaaaaaagaagaaaccacagattagagaaatctcggcggtcaggaggcccggggtctaagatgtaaagaggtaaacagatttagggattgattgtctgctggggtgggttgagaggagaaaagggaagaaaagtcgggggactacgtcctcagacctgacctgagtggtgagaggtggacccaggaggagtggcaggtggtggcggggttttgcagagctcagttggaggccctctccgaggcagcttgatggaacgtgggagagccgggctggagtcacagtttttattttgctagggaggtagtcagtggcgcacaaagggtaacaagcagtgatagtggggatgctttccattttaggaaacttttcctaaaaggaagtggcaattttaactaatctcccctccgccgctcccagctgccgctccagatgctgctgctgccgccgcggccaccccaccctcggtcctcctctccggaggccatggacccaccgccccccaaggctccccctttccccaaggcggaaggcccctcctccactccttcctcggcggcggggccccgacccccgcggctgggccgccacctcctcatcgacgccaatggggtcccctacacatacacggtgcagctggaggaggagccccggggcccgccccagcgcgaggcgcccccaggagagcccggccctcgcaagggctacagctgcccggagtgcgcccgtgtctttgccagccctctgcggctgcagagccaccgcgtgtcgcactcggacctcaagcccttcacgtgcggcgcctgcggcaaggccttcaagcgctccagccacctgtcgcggcatcgcgccacgcaccgcgcccgcgccgggccgccgcacacctgcccgctctgcccacgccgcttccaggacgccgcggagctggcgcagcacgtgcgcctccactaagctcgagacccggcctgtgctgccctgcccgtctcagggccaccaagtctgacccacacagcgtcactcactcccacacacaccccctggctctgctgaggttactgccttaccctgggcctcagtttccccaccttccaaagggaggagcatcattccttccttaccccctttctagctgtgtgatgtagaccaaagtcgttgcccctccctgggcctgggaaccagtcggaactgggttccagtccagctgtgctgtgtgagcctgtgcaagtgacatgacctctctaaaccttggttttctgctctctggagcggtgaaccggtggttgtctgcggggaagagatgataaagagcacgggcacggtctggttcatttctgtatctaccccccttccgcccacgcccccgaccctttgctcaataaacattccgcactcc

SEQ ID NO: 27573 - protein, 210 aa, Homo sapiens [sequence omitted]

SEQ ID NO: 27574 - DNA, 1262 bp, Homo sapiens
acgcctccggtcccctccccgcagggcgctccgcagaggcgaggggtgggagcgccggctccaggcggcggaacctccgcactgggctcgcgcgcttccggccggcgccttttcccagggactccgccaacccctcgcacccccgcgcccccagtccccgcgtccccggcgccgccggcccggagctgcccggaagtctcggttccgccgccggcgctcgccaggggaagcccggggccgcccgggacctcggcccgttcctccggacccgagaggccgccgcacgggctgccgctccagatgctgctgctgccgccgcggccaccccaccctcggtcctcctctccggaggccatggacccaccgccccccaaggctccccctttccccaaggcggaaggcccctcctccactccttcctcggcggcggggccccgacccccgcggctgggccgccacctcctcatcgacgccaatggggtcccctacacatacacggtgcagctggaggaggagccccggggcccgccccagcgcgaggcgcccccaggagagcccggccctcgcaagggctacagctgcccggagtgcgcccgtgtctttgccagccctctgcggctgcagagccaccgcgtgtcgcactcggacctcaagcccttcacgtgcggcgcctgcggcaaggccttcaagcgctccagccacctgtcgcggcatcgcgccacgcaccgcgcccgcgccgggccgccgcacacctgcccgctctgcccacgccgcttccaggacgccgcggagctggcgcagcacgtgcgcctccactaagctcgagacccggcctgtgctgccctgcccgtctcagggccaccaagtctgacccacacagcgtcactcactcccacacacaccccctggctctgctgaggttactgccttaccctgggcctcagtttccccaccttccaaagggaggagcatcattccttccttaccccctttctagctgtgtgatgtagaccaaagtcgttgcccctccctgggcctgggaaccagtcggaactgggttccagtccagctgtgctgtgtgagcctgtgcaagtgacatgacctctctaaaccttggttttctgctctctggagcggtgaaccggtggttgtctgcggggaagagatgataaagagcacgggcacggtctggttcatttctgtatctaccccccttccgcccacgcccccgaccctttgctcaataaacattccgcactcca

SEQ ID NO: 27575 - protein, 172 aa, Homo sapiens; identical to SEQ ID NO: 3763

SEQ ID NO: 27576 - DNA, 1026 bp, Homo sapiens
agattagagaaatctcggcggtcaggaggcccggggtctaagatgtaaagagctgccgctccagatgctgctgctgccgccgcggccaccccaccctcggtcctcctctccggaggccatggacccaccgccccccaaggctccccctttccccaaggcggaaggcccctcctccactccttcctcggcggcggggccccgacccccgcggctgggccgccacctcctcatcgacgccaatggggtcccctacacatacacggtgcagctggaggaggagccccggggcccgccccagcgcgaggcgcccccaggagagcccggccctcgcaagggctacagctgcccggagtgcgcccgtgtctttgccagccctctgcggctgcagagccaccgcgtgtcgcactcggacctcaagcccttcacgtgcggcgcctgcggcaaggccttcaagcgctccagccacctgtcgcggcatcgcgccacgcaccgcgcccgcgccgggccgccgcacacctgcccgctctgcccacgccgcttccaggacgccgcggagctggcgcagcacgtgcgcctccactaagctcgagacccggcctgtgctgccctgcccgtctcagggccaccaagtctgacccacacagcgtcactcactcccacacacaccccctggctctgctgaggttactgccttaccctgggcctcagtttccccaccttccaaagggaggagcatcattccttccttaccccctttctagctgtgtgatgtagaccaaagtcgttgcccctccctgggcctgggaaccagtcggaactgggttccagtccagctgtgctgtgtgagcctgtgcaagtgacatgacctctctaaaccttggttttctgctctctggagcggtgaaccggtggttgtctgcggggaagagatgataaagagcacgggcacggtctggttcatttctgtatctaccccccttccgcccacgcccccgaccctttgctcaataaacattccgcactcca

SEQ ID NO: 27577 - protein, 172 aa, Homo sapiens; identical to SEQ ID NO: 3763

SEQ ID NO: 27578 - DNA, 1299 bp, Homo sapiens
tttcctctcggtgtgtgtttctggccggagccgtttcgcgacggcccgggcgccccgccccaaccttccttccctagaccctcttctctcccttcggcttctctctttcggccggcgccgccagttcctggggcacacccagaggtccccttctcgccgccgcctgcaactgcgagggtagcccggggccgcttggagtcgcccggacctgagaggctgctgcactgggcctcagccagccctccggatgctggtgctgccatccccctgccctcagcctctggcattttcctccgttgagaccatggagggccctccccgtcggacttgccgctccccagaacctggaccttcctcctccatcggatctccccaggcttcatctcctccaaggcccaaccactacctgcttattgacactcagggtgtcccctacacagtgctggtggacgaggagtcacagagggagccaggggccagtggggctccaggccagaaaaagtgctacagctgccccgtgtgctcaagggtcttcgagtacatgtcctaccttcagcgacacagcatcacccactcggaggtaaagcccttcgagtgtgacatctgtgggaaggcattcaagcgcgccagccacttggcacggcaccattccattcacctggcgggtggtgggcggccccacggctgcccgctctgccctcgccgcttccgggatgcgggtgagctggcccagcacagccgggtgcactctggggaacgcccgtttcagtgtccacactgccctcgccgctttatggagcagaacacactgcagaaacacacgcggtggaagcatccatgagccgggctgccgggtgccccaggtaccacaggactttgcagggagcctggactcctgtccagacacctggtgagagcctgaggctggtgttcagggccctggacacagacacagagcagccgcatctcaaaggcagagccctgcctgaaggaggaatccgtgagtaatcttcaggtcctccgtgttctggagctgagatgggaatgagcccctacacagaatggagtcctctagcctaaagatatcagctgttccatggcagagccttgactggatggaggtggggagtgtggtgtgtaaagtctctggcctcataaaaggtggctgtgggtcgtcaggaatctgcgccatcttcctggggcttctgcgctgttgttggggaagggaccccagtcctgccttccaccccccaaccaggcctgagactgatcaaacaataaacacgtttcccactctga

SEQ ID NO: 27579 - protein, 197 aa, Homo sapiens; identical to SEQ ID NO: 3767

SEQ ID NO: 27580 - DNA, 1102 bp, Homo sapiens
gggcggcgggaggggctggaccgcgtggagggcctcagccagccctccggatgctggtgctgccatccccctgccctcagcctctggcattttcctccgttgagaccatggagggccctccccgtcggacttgccgctccccagaacctggaccttcctcctccatcggatctccccaggcttcatctcctccaaggcccaaccactacctgcttattgacactcagggtgtcccctacacagtgctggtggacgaggagtcacagagggagccaggggccagtggggctccaggccagaaaaagtgctacagctgccccgtgtgctcaagggtcttcgagtacatgtcctaccttcagcgacacagcatcacccactcggaggtaaagcccttcgagtgtgacatctgtgggaaggcattcaagcgcgccagccacttggcacggcaccattccattcacctggcgggtggtgggcggccccacggctgcccgctctgccctcgccgcttccgggatgcgggtgagctggcccagcacagccgggtgcactctggggaacgcccgtttcagtgtccacactgccctcgccgctttatggagcagaacacactgcagaaacacacgcggtggaagcatccatgagccgggctgccgggtgccccaggtaccacaggactttgcagggagcctggactcctgtccagacacctggtgagagcctgaggctggtgttcagggccctggacacagacacagagcagccgcatctcaaaggcagagccctgcctgaaggaggaatccgtgagtaatcttcaggtcctccgtgttctggagctgagatgggaatgagcccctacacagaatggagtcctctagcctaaagatatcagctgttccatggcagagccttgactggatggaggtggggagtgtggtgtgtaaagtctctggcctcataaaaggtggctgtgggtcgtcaggaatctgcgccatcttcctggggcttctgcgctgttgttggggaagggaccccagtcctgccttccaccccccaaccaggcctgagactgatcaaacaataaacacgtttcccactctga

SEQ ID NO: 27581 - protein, 197 aa, Homo sapiens; identical to SEQ ID NO: 3767

SEQ ID NO: 27582 - DNA, 1089 bp, Homo sapiens
gagaggcctggaggccaggcctcagccagccctccggatgctggtgctgccatccccctgccctcagcctctggcattttcctccgttgagaccatggagggccctccccgtcggacttgccgctccccagaacctggaccttcctcctccatcggatctccccaggcttcatctcctccaaggcccaaccactacctgcttattgacactcagggtgtcccctacacagtgctggtggacgaggagtcacagagggagccaggggccagtggggctccaggccagaaaaagtgctacagctgccccgtgtgctcaagggtcttcgagtacatgtcctaccttcagcgacacagcatcacccactcggaggtaaagcccttcgagtgtgacatctgtgggaaggcattcaagcgcgccagccacttggcacggcaccattccattcacctggcgggtggtgggcggccccacggctgcccgctctgccctcgccgcttccgggatgcgggtgagctggcccagcacagccgggtgcactctggggaacgcccgtttcagtgtccacactgccctcgccgctttatggagcagaacacactgcagaaacacacgcggtggaagcatccatgagccgggctgccgggtgccccaggtaccacaggactttgcagggagcctggactcctgtccagacacctggtgagagcctgaggctggtgttcagggccctggacacagacacagagcagccgcatctcaaaggcagagccctgcctgaaggaggaatccgtgagtaatcttcaggtcctccgtgttctggagctgagatgggaatgagcccctacacagaatggagtcctctagcctaaagatatcagctgttccatggcagagccttgactggatggaggtggggagtgtggtgtgtaaagtctctggcctcataaaaggtggctgtgggtcgtcaggaatctgcgccatcttcctggggcttctgcgctgttgttggggaagggaccccagtcctgccttccaccccccaaccaggcctgagactgatcaaacaataaacacgtttcccactctga

SEQ ID NO: 27583 - protein, 197 aa, Homo sapiens; identical to SEQ ID NO: 3767

SEQ ID NO: 27584 - DNA, 2048 bp, Homo sapiens
ggctggggaggagcaggaacagtcaggactggaatctagctttgctccaaagccagctcttaattaccaacatggggatgggggtggcgtgttcctggccctcattttccgggagaggggtaactcccccgattttggcccccacatccctgagaaccttggggtctggctgtaggaggtaggggagctctgaggggtccgcgctggctagttcctgagagagcgttaaaagtagattctcctttcgctccaactttctcggtgtctcaaacactctcctgccttctgggcccattgggcacaccgccacccaatccggggacccccggagactcgccagctctccaggatgggaatttcgtgatgttccctgcctgagcttcggggagggcgggggagtgctgtaaggggctatcgcgcaagtgcagaccctctgcttctgccgcaaacggcgggcctcacctggacccggggactcttcaacgaggggcgctagcctggcccgactgggcgagtccccgcgtccctgcccgttccgtcgctcagttccacgacacgctcccctgccgccccgcctgttcgcgggtgggtgggcgcttccctcggctccccgtgacactttgcagacgctccccggcgccgggcatgggcgccgccgccgtcggtccccgagccggattccgcgagcgggatggaccctccagtccatctgcgtctctccatttgtggctgccgtttctgtccagtgcccctgaggccctcggctgctggggtccgtaggaagccgcgccatgaatgaccggagcagtcggaggcggacaatgaaggacgatgagaccttcgagatctccattcccttcgatgaggcaccccacctagacccacagatcttttacagtctgagcccctctcggagaaacttcgaggagcctccggaggctgcgtcctccgccctggctctgatgaacagcgtcaagacccagctgcacatggctctggagaggaactcctggctgcagaagcgcatcgaggacctggaggaagagagggacttcctgcggtgccagctggacaaattcatctcttctgctcggatggaggcagaggaccactgccggatgaagcctgggcccaggcggatggagggggacagccgtggtggggctgggggcgaggcctcggaccctgagtcagcagcctcctccctcagcggagcgtccgaagaaggcagcgccagtgagaggaggcggcagaagcagaagggaggtgctagtcggaggcgctttgggaagcccaaggcccgggagaggcagcgagtgaaggacgccgacggggtcctctgccggtacaagaagatcctgggcaccttccagaagctcaagagcatgtcgcgggccttcgagcaccaccgcgtggacaggaacaccgtggcgctgaccacgcccatcgccgagctgctcattgtggcccccgagaagctggccgaggtgggcgagttcgacccctccaaggagcgcctgctcgagtactcccgccgctgctttctggccctggacgacgagacgctcaagaaggtgcaggcgctcaagaagagcaagctgctgctgcccatcacctaccgcttcaagcggtgatcgcaccacgcctccgcgcctccacccgggccttcctcccccgtggaccccggtggatgacctgcccctctccccgccgcgcccctgcccctcctcctcgctccctgggttgggggctcccttagccgggcccccaagcgcgacggccccggaccggccgcggccccttcccgaacgccggcacccccttccgcttgggctgcccagccctgtcctcgccgggccccttcctcctggaaaaccaggcaggcgggtgcccccccctcgagtgggggactgtacagaccccgtctccgccctggccccgcggaggagctgcccacctgattcccggacagacctccccaactccgcgtgagacagagaattattcagataatttaaattaaaaaacgacgtgaaaatttggaataa

SEQ ID NO: 27585 - protein, 280 aa, Homo sapiens; identical to SEQ ID NO: 3769

SEQ ID NO: 27586 - DNA, 1992 bp, Homo sapiens
ggctggggaggagcaggaacagtcaggactggaatctagctttgctccaaagccagctcttaattaccaacatggggatgggggtggcgtgttcctggccctcattttccgggagaggggtaactcccccgattttggcccccacatccctgagaaccttggggtctggctgtaggaggtaggggagctctgaggggtccgcgctggctagttcctgagagagcgttaaaagtagattctcctttcgctccaactttctcggtgtctcaaacactctcctgccttctgggcccattgggcacaccgccacccaatccggggacccccggagactcgccagctctccaggatgggaatttcgtgatgttccctgcctgagcttcggggagggcgggggagtgctgtaaggggctatcgcgcaagtgcagaccctctgcttctgccgcaaacggcgggcctcacctggacccggggactcttcaacgaggggcgctagcctggcccgactgggcgagtccccgcgtccctgcccgttccgtcgctcagttccacgacacgctcccctgccgccccgcctgttcgcgggtgggtgggcgcttccctcggctccccgtgacactttgcagacgctccccggcgccgggcatgggcgccgccgccgtcggtccccgagccggattccgcgagcggtgcccctgaggccctcggctgctggggtccgtaggaagccgcgccatgaatgaccggagcagtcggaggcggacaatgaaggacgatgagaccttcgagatctccattcccttcgatgaggcaccccacctagacccacagatcttttacagtctgagcccctctcggagaaacttcgaggagcctccggaggctgcgtcctccgccctggctctgatgaacagcgtcaagacccagctgcacatggctctggagaggaactcctggctgcagaagcgcatcgaggacctggaggaagagagggacttcctgcggtgccagctggacaaattcatctcttctgctcggatggaggcagaggaccactgccggatgaagcctgggcccaggcggatggagggggacagccgtggtggggctgggggcgaggcctcggaccctgagtcagcagcctcctccctcagcggagcgtccgaagaaggcagcgccagtgagaggaggcggcagaagcagaagggaggtgctagtcggaggcgctttgggaagcccaaggcccgggagaggcagcgagtgaaggacgccgacggggtcctctgccggtacaagaagatcctgggcaccttccagaagctcaagagcatgtcgcgggccttcgagcaccaccgcgtggacaggaacaccgtggcgctgaccacgcccatcgccgagctgctcattgtggcccccgagaagctggccgaggtgggcgagttcgacccctccaaggagcgcctgctcgagtactcccgccgctgctttctggccctggacgacgagacgctcaagaaggtgcaggcgctcaagaagagcaagctgctgctgcccatcacctaccgcttcaagcggtgatcgcaccacgcctccgcgcctccacccgggccttcctcccccgtggaccccggtggatgacctgcccctctccccgccgcgcccctgcccctcctcctcgctccctgggttgggggctcccttagccgggcccccaagcgcgacggccccggaccggccgcggccccttcccgaacgccggcacccccttccgcttgggctgcccagccctgtcctcgccgggccccttcctcctggaaaaccaggcaggcgggtgcccccccctcgagtgggggactgtacagaccccgtctccgccctggccccgcggaggagctgcccacctgattcccggacagacctccccaactccgcgtgagacagagaattattcagataatttaaattaaaaaacgacgtgaaaatttggaataa

SEQ ID NO: 27587 - protein, 280 aa, Homo sapiens; identical to SEQ ID NO: 3769

SEQ ID NO: 27588 - DNA, 2716 bp, Homo sapiens
ggctggggaggagcaggaacagtcaggactggaatctagctttgctccaaagccagctcttaattaccaacatggggatgggggtggcgtgttcctggccctcattttccgggagaggggtaactcccccgattttggcccccacatccctgagaaccttggggtctggctgtaggaggtaggggagctctgaggggtccgcgctggctagttcctgagagagcgttaaaagtagattctcctttcgctccaactttctcggtgtctcaaacactctcctgccttctgggcccattgggcacaccgccacccaatccggggacccccggagactcgccagctctccaggatgggaatttcgtgatgttccctgcctgagcttcggggagggcgggggagtgctgtaaggggctatcgcgcaagtgcagaccctctgcttctgccgcaaacggcgggcctcacctggacccggggactcttcaacgaggggcgctagcctggcccgactgggcgagtccccgcgtccctgcccgttccgtcgctcagttccacgacacgctcccctgccgccccgcctgttcgcgggtgggtgggcgcttccctcggctccccgtgacactttgcagacgctccccggcgccgggcatgggcgccgccgccgtcggtccccgagccggattccgcgagcgggtgggtgagcgcggggggcctcggcccctcggaccccgggcacccgcgggcgggggatggtggccgcgtttgcacccccgccctagtgcatgttcccgctggaatcgttccacgaccgctccccctcccacccgcgggacaaagggcgggggcggggggggcgcacccccacgcgtgacctttccccgtactgcgcacgcgcccagcccccaccaccgggggacggtccgcccgcccacgcgagtgcgggggaggggtgtgggggccccgaaggtagaggaggcagcgcgcacgggctggacctcctcctaccctgggaagttggggcagtttccccctgcacctgcctcttccttaggcctggcagtggcccgcgatgagagagggtccttccccttcaggctaggtgtccctggtcaggcgaccccttggggcacccagcaatttagggcttcagcttccttttccttcgatacccaggagcccacgtccccagctcacttctcccccaggacctaggcggctgggccccctgcccctgactccaggagcccaggagtttgaagcccaggcgcgttttgcctcagtcctggggtccaggctccctcctccctcagaccaggggtccaggccagaaggtccctcctgtctcacttcacctcccccaggatggaccctccagtccatctgcgtctctccatttgtggctgccgtttctgtccagtgcccctgaggccctcggctgctggggtccgtaggaagccgcgccatgaatgaccggagcagtcggaggcggacaatgaaggacgatgagaccttcgagatctccattcccttcgatgaggcaccccacctagacccacagatcttttacagtctgagcccctctcggagaaacttcgaggagcctccggaggctgcgtcctccgccctggctctgatgaacagcgtcaagacccagctgcacatggctctggagaggaactcctggctgcagaagcgcatcgaggacctggaggaagagagggacttcctgcggtgccagctggacaaattcatctcttctgctcggatggaggcagaggaccactgccggatgaagcctgggcccaggcggatggagggggacagccgtggtggggctgggggcgaggcctcggaccctgagtcagcagcctcctccctcagcggagcgtccgaagaaggcagcgccagtgagaggaggcggcagaagcagaagggaggtgctagtcggaggcgctttgggaagcccaaggcccgggagaggcagcgagtgaaggacgccgacggggtcctctgccggtacaagaagatcctgggcaccttccagaagctcaagagcatgtcgcgggccttcgagcaccaccgcgtggacaggaacaccgtggcgctgaccacgcccatcgccgagctgctcattgtggcccccgagaagctggccgaggtgggcgagttcgacccctccaaggagcgcctgctcgagtactcccgccgctgctttctggccctggacgacgagacgctcaagaaggtgcaggcgctcaagaagagcaagctgctgctgcccatcacctaccgcttcaagcggtgatcgcaccacgcctccgcgcctccacccgggccttcctcccccgtggaccccggtggatgacctgcccctctccccgccgcgcccctgcccctcctcctcgctccctgggttgggggctcccttagccgggcccccaagcgcgacggccccggaccggccgcggccccttcccgaacgccggcacccccttccgcttgggctgcccagccctgtcctcgccgggccccttcctcctggaaaaccaggcaggcgggtgcccccccctcgagtgggggactgtacagaccccgtctccgccctggccccgcggaggagctgcccacctgattcccggacagacctccccaactccgcgtgagacagagaattattcagataatttaaattaaaaaacgacgtgaaaatttggaataa

SEQ ID NO: 27589 - protein, 280 aa, Homo sapiens; identical to SEQ ID NO: 3769

SEQ ID NO: 27590 - DNA, 1628 bp, Homo sapiens
gggctggacctcctcctaccctgggaagttggggcagtttccccctgcacctgcctcttccttaggcctggcagtggcccgcgatgagagagggtccttccccttcaggctaggtgtccctggtcaggcgaccccttggggcacccagcaatttagggcttcagcttccttttccttcgatacccaggagcccacgtccccagctcacttctcccccaggacctaggcggctgggccccctgcccctgactccaggagcccaggagtttgaagcccaggcgcgttttgcctcagtcctggggtccaggctccctcctccctcagaccaggggtccaggccagaaggtccctcctgtctcacttcacctcccccaggatggaccctccagtccatctgcgtctctccatttgtggctgccgtttctgtccagtgcccctgaggccctcggctgctggggtccgtaggaagccgcgccatgaatgaccggagcagtcggaggcggacaaagcctccggaggctgcgtcctccgccctggctctgatgaacagcgtcaagacccagctgcacatggctctggagaggaactcctggctgcagaagcgcatcgaggacctggaggaagagagggacttcctgcggtgccagctggacaaattcatctcttctgctcggatggaggcagaggaccactgccggatgaagcctgggcccaggcggatggagggggacagccgtggtggggctgggggcgaggcctcggaccctgagtcagcagcctcctccctcagcggagcgtccgaagaaggcagcgccagtgagaggaggcggcagaagcagaagggaggtgctagtcggaggcgctttgggaagcccaaggcccgggagaggcagcgagtgaaggacgccgacggggtcctctgccggtacaagaagatcctgggcaccttccagaagctcaagagcatgtcgcgggccttcgagcaccaccgcgtggacaggaacaccgtggcgctgaccacgcccatcgccgagctgctcattgtggcccccgagaagctggccgaggtgggcgagttcgacccctccaaggagcgcctgctcgagtactcccgccgctgctttctggccctggacgacgagacgctcaagaaggtgcaggcgctcaagaagagcaagctgctgctgcccatcacctaccgcttcaagcggtgatcgcaccacgcctccgcgcctccacccgggccttcctcccccgtggaccccggtggatgacctgcccctctccccgccgcgcccctgcccctcctcctcgctccctgggttgggggctcccttagccgggcccccaagcgcgacggccccggaccggccgcggccccttcccgaacgccggcacccccttccgcttgggctgcccagccctgtcctcgccgggccccttcctcctggaaaaccaggcaggcgggtgcccccccctcgagtgggggactgtacagaccccgtctccgccctggccccgcggaggagctgcccacctgattcccggacagacctccccaactccgcgtgagacagagaattattcagataatttaaattaaaaaacgacgtgaaaatttggaataa

SEQ ID NO: 27591 - protein, 245 aa, Homo sapiens
MNDRSSRRRTKPPEAASSALALMNSVKTQLHMALERNSWLQKRIEDLEEERDFLRCQLDKFISSARMEAEDHCRMKPGPRRMEGDSRGGAGGEASDPESAASSLSGASEEGSASERRRQKQKGGASRRRFGKPKARERQRVKDADGVLCRYKKILGTFQKLKSMSRAFEHHRVDRNTVALTTPIAELLIVAPEKLAEVGEFDPSKERLLEYSRRCFLALDDETLKKVQALKKSKLLLPITYRFKR

SEQ ID NO: 27592 - DNA, 592 bp, Homo sapiens
ggcaccttccagaagctcaagagcatgtcgcgggccttcgagcaccaccgcgtggacaggaacaccgtggcgctgaccacgcccatcgccgagctgctcattgtggcccccgagaagctggccgaggtgggcgagttcgacccctccaaggagcgcctgctcgagtactcccgccgctgctttctggccctggacgacgagacgctcaagaaggtgcaggcgctcaagaagagcaagctgctgctgcccatcacctaccgcttcaagcggtgatcgcaccacgcctccgcgcctccacccgggccttcctcccccgtggaccccggtggatgacctgcccctctccccgccgcgcccctgcccctcctcctcgctccctgggttgggggctcccttagccgggccccttcctcctggaaaaccaggcaggcgggtgcccccccctcgagtgggggactgtacagaccccgtctccgccctggccccgcggaggagctgcccacctgattcccggacagacctccccaactccgcgtgagacagagaattattcagataatttaaattaaaaaacgacgtgaaaatttggaat

SEQ ID NO: 27593 - protein, 82 aa, Homo sapiens
MSRAFEHHRVDRNTVALTTPIAELLIVAPEKLAEVGEFDPSKERLLEYSRRCFLALDDETLKKVQALKKSKLLLPITYRFKR

SEQ ID NO: 27594 - DNA, 254 bp, Homo sapiens
agcaagctgctgctgcccatcacccccttccgcttgggctgcccagccctgtcctcgccgggccccttcctcctggaaaaccaggcaggcgggtgcccccccctcgagtgggggactgtacagaccccgtctccgccctggccccgcggaggagctgcccacctgattcccggacagacctccccaactccgcgtgagacagagaattattcagataatttaaattaaaaaacgacgtgaaaatttggaataaa

SEQ ID NO: 27595 - protein, 75 aa, Homo sapiens [sequence omitted]

SEQ ID NO: 27596 - DNA, 674 bp, Homo sapiens
gcgcaggcgcaaaaagccgcgctggcaacctccgcagcggtcgcgcgcacccttcatccctcttgctgcttttgtctggcacaaccttctcaggccctccgcgaggccggccctttttttctttcactttccccacccggagagccaggtgccgagaactaggacctcgtccccttctctatcccttcccctgatccatctcgtctctgttctccttcccttttccgttcccgaagccggaaggagccgaggtacccacggaaaaagtcgaagctgtccccggagagtgaggccttcacgaagcggtggcggaaggagccgaagttctctgatcggaggcgtgagcaagtggcatctccggaaagagccgaaacacggactcgagcttaatcccaggaggggcccgagggcgagatccggaaatctccggaaagagccgaaggccgggacggttaggattgtcggaagtggccgattgcttggacagggccggcggagaagatcggagcaagtccgtggaagaagccaaagactgggacggattgaattgttggaagaacccgaactcgcagaggggactgggcgcatagccgaagccagcggcggaagtagccgaagcggctggagcgggcggcaaggcgaggcgaaagctgcacagggccctacgcggccgc

SEQ ID NO: 27597 - protein, 223 aa, Homo sapiens
RRRKKPRWQPPQRSRAPFIPLAAFVWHNLLRPSARPALFFFHFPHPESQVPRTRTSSPSLSLPLIHLVSVLLPFSVPEAGRSRGTHGKSRSCPRRVRPSRSGGGRSRSSLIGGVSKWHLRKEPKHGLELNPRRGPRARSGNLRKEPKAGTVRIVGSGRLLGQGRRRRSEQVRGRSQRLGRIELLEEPELAEGTGRIAEASGGSSRSGWSGRQGEAKAAQGPTR

SEQ ID NO: 27598 - DNA, 3047 bp, Homo sapiens
gcgcaggcgcaaaaagccgcgctggcaacctccgcagcggtcgcgcgcacccttcatccctcttgctgcttttgtctggcacaaccttctcaggccctccgcgaggccggccctttttttctttcactttccccacccggagagccaggtgccgagaactaggacctcgtccccttctctatcccttcccctgatccatctcgtctctgttctccttcccttttccgttcccgaagccggaaggagccgaggtacccacggaaaaagtcgaagctgtccccggagagtgaggccttcacgaagcggtggcggaaggagccgaagttctctgatcggaggcgtgagcaagtggcatctccggaaagagccgaaacacggactcgagcttaatcccaggaggggcccgagggcgagatccggaaatctccggaaagagccgaaggccgggacggttaggattgtcggaagtggccgattgcttggacagggccggcggagaagatcggagcaagtccgtggaagaagccaaagactgggacggattgaattgttggaagaacccgaactcgcagaggggactgggcgcagtggcacacgaggacacacggaaacctccgaacgttgaggagataatctcggaaaagttacggaaacctgggaagtcggcgaaaccctacgttcgggtgttttcggaagcagccgaagcggccgcctgcttcgccttcgtccagtatccggagatagccgaggcgcttcggagccaggctcggggggaggggcaagctcgcgggcgggcgggcgggtgagggggcggagcccgggcggggcggggagggctgccggaggcttgattaggtaggaggtggcgaagcgccggcggcggccggaagtagccgaagccagcggcggaagtagccgaagcggctggagcgggcggcaaggcgaggcgaaagctgcacagggccctacgcggccgcctcagcatgtcggacttcgacgagttcgagcggcagctcaacgagaataaacaagagcgggacaaggagaaccggcatcggaagcgcagccacagccgctctcggagccgggaccgcaaacgccggagccggagccgcgaccggcgcaaccgggaccagcggagcgcctcccgggacaggcgacgacgcagcaaacctttgaccagaggcgctaaagaggagcacggtggactgattcgttccccccgccacgagaagaagaagaaggtccgtaaatactgggacgtgccacccccaggctttgagcacatcaccccaatgcagtacaaggccatgcaagctgcgggtcagattccagccactgctcttctccccaccatgacccctgacggtctggctgtgaccccaacgccggtgcccgtggtcgggagccagatgaccagacaagcccggcgcctctacgtgggcaacatcccctttggcatcactgaggaggccatgatggatttcttcaacgcccagatgcgcctgggggggctgacccaggcccctggcaacccagtgttggctgtgcagattaaccaggacaagaattttgcctttttggagttccgctcagtggacgagactacccaggctatggcctttgatggcatcatcttccagggccagtcactaaagatccgcaggcctcacgactaccagccgcttcctggcatgtcagagaacccctccgtctatgtgcctggggttgtgtccactgtggtccccgactctgcccacaagctgttcatcgggggcttacccaactacctgaacgatgaccaggtcaaagagctgctgacatcctttgggcccctcaaggccttcaacctggtcaaggacagtgccacggggctctccaagggctacgccttctgtgagtacgtggacatcaacgtcacggatcaggccattgcggggctgaacggcatgcagctgggggataagaagctgctggtccagagggcgagtgtgggagccaagaatgccacgctgagcaccatcaatcagacgcctgtgaccctgcaagtgccgggcttgatgagctcccaggtgcagatgggcggccacccgactgaggtcctgtgcctcatgaacatggtgctgcctgaggagctgctggacgacgaggagtatgaggagatcgtggaggacgtgcgggacgagtgcagcaagtacgggcttgtcaagtccatcgagatcccccggcctgtggacggcgtcgaggtgcccggctgcggaaagatctttgtggagttcacctctgtgtttgactgccagaaagccatgcagggcctgacgggccgcaagttcgccaacagagtggttgtcacaaaatactgtgaccccgactcttatcaccgccgggacttctggtagaggcggctgggggagggtgggggcagggctggctgggggcttctccccactcccgccccccccttatccccctctgaagacgatgggcagaggagtgacagccgcagacacacgacagccggcagcaactggaatggcagcaattaagggtggggggcgggggttggggggttggggggttagggcagggaggggactggggaagtgcgcacacagcccacacagacaacacgcacccacacagacacagagggaaggggttgggatggggacagggtgcacagcagggcggggtaggaccccagcccctcccaaaacagcctctccttctcccatagacccctttcttctccccttccccacggtaggaacatagcgtgtttatattttatggccaaactattttgaattttgttgtccggccctcagtgccctgccctctcccttaccaggaccacagctctgttccttcggcctctggtcctctctggtcccctcctgggtttcttacgtagttgatttttcctctttagtctcccccgacctgcgcccagccccgtggcccctgcccctctcctactctctgtggcagtttcatatttgctaagacgaatttgctcattaaacattttgttgtattttacttta

SEQ ID NO: 27599 - protein, 471 aa, Homo sapiens; identical to SEQ ID NO: 3771

SEQ ID NO: 27600 - DNA, 1110 bp, Homo sapiens
gcgcgcacccttcatccctcttgctgcttttgtctggcacaaccttctcaggccctccgcgaggccggccctttttttctttcactttccccacccggagagccaggtgccgagaactaggacctcgtccccttctctatcccttcccctgatccatctcgtctctgttctccttcccttttccgttcccgaagccggaaggagccgaggtacccacggaaaaagtcgaagctgtccccggagagtgaggccttcacgaagcggtggcggaaggagccgaagttctctgatcggaggcgtgagcaagtggcatctccggaaagagccgaaacacggactcgagcttaatcccaggaggggcccgagggcgagatccggaaatctccggaaagagccgaaggccgggacggttaggattgtcggaagtggccgattgcttggacagggccggcggagaagatcggagcaagtccgtggaagaagccaaagactgggacggattgaattgttggaagaacccgaactcgcagaggggactgggcgcagtggcacacgaggacacacggaaacctccgaacgttgaggagataatctcggaaaagttacggaaacctgggaagtcggcgaaaccctacgttcgggtgttttcggaagcagccgaagcggccgcctgcttcgccttcgtccagtatccggagatagccgaggcgcttcggagccaggctcggggggaggggcaagctcgcgggcgggcgggcgggtgagggggcggagcccgggcggggcggggagggctgccggaggcttgattaggtaggaggtggcgaagcgccggcggcggccggaagtagccgaagccagcggcggaagtagccgaagcggctggagcggtgccctgccctctcccttaccaggaccacagctctgttccttcggcctctggtcctctctggtcccctcctgggtttcttacgtagttgatttttcctctttagtctcccccgacctgcgcccagccccgtggcccctgcccctctcctactctctgtggcagtttcatatttgctaagacgaatttgctcattaaacattttgttgtattttacttta

SEQ ID NO: 27601 - protein, 83 aa, Homo sapiens
EVAKRRRRPEVAEASGGSSRSGWSGALPSPLPGPQLCSFGLWSSLVPSWVSYVVDFSSLVSPDLRPAPWPLPLSYSLWQFHIC

SEQ ID NO: 27602 - DNA, 842 bp, Homo sapiens
gctgccggaggcttgattaggtaggaggtggcgaagcgccggcggcggccggaagtagccgaagccagcggcggaagtagccgaagcggctggagcgggcggcaaggcgaggcgaaagctgcacagggccctacgcggccgcctcagcatgtcggacttcgacgagttcgagcggcagctcaacgagaataaacaagagcgggacaaggagaaccggcatcggaagcgcagccacagccgctctcggagccgggaccgcaaacgccggagccggagccgcgaccggcgcaaccgggaccagcggagcgcctcccgggacaggcgacgacgcagcaaacctttgaccagaggcgctaaagaggagcacggtggactgattcgttccccccgccacgagaagaagaagaaggtccgtaaatactgggacgtgccacccccaggctttgagcacatcaccccaatgcagtacaaggccatgcaagctgcgggtcagattccacccctcccaaaacagcctctccttctcccatagacccctttcttctccccttccccacggtaggaacatagcgtgtttatattttatggccaaactattttgaattttgttgtccggccctcagtgccctgccctctcccttaccaggaccacagctctgttccttcggcctctggtcctctctggtcccctcctgggtttcttacgtagttgatttttcctctttagtctcccccgacctgcgcccagccccgtggcccctgcccctctcctactctctgtggcagtttcatatttgctaagacgaatttgctcattaaacattttgttgtattttacttta

SEQ ID NO: 27603 - protein, 127 aa, Homo sapiens
MSDFDEFERQLNENKQERDKENRHRKRSHSRSRSRDRKRRSRSRDRRNRDQRSASRDRRRRSKPLTRGAKEEHGGLIRSPRHEKKKKVRKYWDVPPPGFEHITPMQYKAMQAAGQIPPLPKQPLLLP

SEQ ID NO: 27604 - DNA, 612 bp, Homo sapiens
gctgccggaggcttgattaggtaggaggtggcgaagcgccggcggcggccggaagtagccgaagccagcggcggaagtagccgaagcggctggagcgggcggcaaggcgaggcgaaagctgcacagggccctacgcggccgcctcagcatgtcggacttcgacgagttcgagcggcagagcccacacagacaacacgcacccacacagacacagagggaaggggttgggatggggacagggtgcacagcagggcggggtaggaccccagcccctcccaaaacagcctctccttctcccatagacccctttcttctccccttccccacggtaggaacatagcgtgtttatattttatggccaaactattttgaattttgttgtccggccctcagtgccctgccctctcccttaccaggaccacagctctgttccttcggcctctggtcctctctggtcccctcctgggtttcttacgtagttgatttttcctctttagtctcccccgacctgcgcccagccccgtggcccctgcccctctcctactctctgtggcagtttcatatttgctaagacgaatttgctcattaaacattttgttgtattttacttta

SEQ ID NO: 27605 - protein, 63 aa, Homo sapiens [sequence omitted]

SEQ ID NO: 27606 - DNA, 447 bp, Homo sapiens
agagcgggacaaggagaaccggcatcggaagcgcagccacagccgctctcggagccgggaccgcaaacgccggagccggagccgcgaccggcgcaaccgggaccagcggagcgcctcccgggacaggcgacgacgcagcaaacctttgaccagaggcgctaaagaggagcacggtggactgatgtgagcttctcttcctgccccttcctccctgatgtccactcccttcaccttcctcacgcccgtgcaccctgtcccgcccatttccagccctggcccaagcactgggaagagtccacttaccttgaaaccagcacccctttcccaggccctgccccagaccctctccttccctggagagagtggagcttacatggttgcggggagggtgaaagggtgcctgggagggggctcgcaggcccactgttggtcagactgaggttgccc

SEQ ID NO: 27607 - protein, 74 aa, Homo sapiens
MSTPFTFLTPVHPVPPISSPGPSTGKSPLTLKPAPLSQALPQTLSFPGESGAYMVAGRVKGCLGGGSQAHCWSD

SEQ ID NO: 27608 - DNA, 797 bp, Homo sapiens
ctttgctcgtctctgcccctgcctgccacttcctttctactttcctgccacttttctgtctgtctccactgggtggcccttcctgtgtgctctgtctcttcatctcttgtgtttcgtgtttttcttcattttgtgttgtcatcatgccctctgccttttcttgaacaatcttctcctttcccctgattttttggggcccctgtggctgtcccccaacgcctgtccatcgcctgcccttggccgtctcttgctactgcttcctccccattttctctcttgcttctgttcttactattgacttctacacccccacccatattccactgttccttccccccctcctccctcccctcatccctctccccttacccccaaacccctctgtgtctccctctctcacccttcccctcctctctccacctcccttcccccgcccccccccttgtctcctattccctctgcaggaggccatgatggatttcttcaacgcccagatgcgcctgggggggctgacccaggcccctggcaacccagtgttggctgtgcagaagcctctccttctcccatagacccctttcttctccccttccccacggtaggaacatagcgtgtttatattttatggccaaactattttgaattttgttgtccggccctcagtgccctgccctctcccttaccaggaccacagctctgttccttcggcctctggtcctctctggtcccctctcctactctctgtggcagtttcatatttgctaagacgaatttgctcattaaacattttgttgtatttt

SEQ ID NO: 27609 - protein, 32 aa, Homo sapiens
MMDFFNAQMRLGGLTQAPGNPVLAVQKPLLLP

SEQ ID NO: 27610 - DNA, 785 bp, Homo sapiens
caaggtcaagaggtggcagtgagcaggtgagtgagcgaggtggtggggccagggctgagtggcaggccttggagggctgcctgggtcttggaacgaccgcttattttgacaccttgtcgggggtgagcggggggtggggggcagctagctggctttgcggtttctgagacacccagtagagatgtcaaggaaaaattagctggacaggtctgtgttcccagcatgagggctgatggacactcaggtgtctgtcgaggccctgcttgggatgtcggagtggtttgcccagggagagcagggttggggagggcggctggagaggtggaaggagcatcttagaaaaggggcatggggaaggccaacggcatctcctctcactgcagctcctgcccactgccctccagagtccccttcccttgagctggtatgtcagggctgctcagggctgccctctggtgctgggatggagcttggctcaagcaggggctgaggaaacatttgtgggaagaaggaatggagagaccctggcctttgggatcagctgacctgttttgcatattaaatttattgcatcggcggcccggcgaggtggctcacgcctgtaatcccagcactttgggaggccgagacgggcggatcatgaggtcaggagttggagaccagcctggccaatgtggtgaaaccccatctctactaaaaaatacaaaaattagccaggcatggtggcggtgcgtgcctgtaatcccagctactcaggagtctgaggcaggagaattacttgaacc

SEQ ID NO: 27611 - protein, 118 aa, Homo sapiens
MSGLLRAALWCWDGAWLKQGLRKHLWEEGMERPWPLGSADLFCILNLLHRRPGEVAHACNPSTLGGRDGRIMRSGVGDQPGQCGETPSLLKNTKISQAWWRCVPVIPATQESEAGELL

SEQ ID NO: 27612 - DNA, 335 bp, Homo sapiens
gtggagttcacctctgtgtttgactgccagaaagccatgcagggcctgacggtaggaacatagcgtgtttatattttatggccaaactattttgaattttgttgtccggccctcagtgccctgccctctcccttaccaggaccacagctctgttccttcggcctctggtcctctctggtcccctcctgggtttcttacgtagttgatttttcctctttagtctcccccgacctgcgcccagccccgtggcccctgcccctctcctactctctgtggcagtttcatatttgctaagacgaatttgctcattaaacattttgttgtattttacttta

SEQ ID NO: 27613 - protein, 76 aa, Homo sapiens
RVYILWPNYFEFCCPALSALPSPLPGPQLCSFGLWSSLVPSWVSYVVDFSSLVSPDLRPAPWPLPLSYSLWQFHIC

SEQ ID NO: 27614 - DNA, 318 bp, Homo sapiens
ggggaagtgcgcacacagcccacacagacaacacgcacccacacagacacagagggaaggggttgggatggggacagggtgcacagcagggcggggtaggaccccagcccctcccaaaacagcctctccttctcccatagacccctttcttctccccttccccacggtaggaacatagcgtgtttatattttatggccaaactattttgaattttgttgtccggccctcagtgccctgccccctctcctactctctgtggcagtttcatatttgctaagacgaatttgctcattaaacattttgttgtattttacttt

SEQ ID NO: 27615 - protein, 36 aa, Homo sapiens
MGTGCTAGRGRTPAPPKTASPSPIDPFLLPFPTVGT

SEQ ID NO: 27616 - DNA, 2394 bp, Homo sapiens
gcctccttctgttgcttcccgtctcctcggcggctcccctcccccgcccggctctccgcgccccttctgggcggcggggcggcggagccgtcggcgtgcggccctccttgcgttcgtgcgtgcgcccgtggcccggcgcacgtcccgcgacaccgaggccgagcggggcagggggctgaccgccatgaccccccagagcccggcgtgagggggccgagatgcggtgacctgccagcacctgccgcagccttcgtccgggagtcgccccatctctccacgcatcggggccctgtgccccttgctgctgcagccgggcaccatgtcgacctcgtccttgaggcgccagatgaagaacatcgtccacaactactcagaggcggagatcaaggttcgagaggccacgagcaatgacccctggggcccatccagctccctcatgtcagagattgccgacctcacctacaacgttgtcgccttctcggagatcatgagcatgatctggaagcggctcaatgaccatggcaagaactggcgtcacgtttacaaggccatgacgctgatggagtacctcatcaagaccggctcggagcgcgtgtcgcagcagtgcaaggagaacatgtacgccgtgcagacgctgaaggacttccagtacgtggaccgcgacggcaaggaccagggcgtgaacgtgcgtgagaaagctaagcagctggtggccctgctgcgcgacgaggaccggctgcgggaagagcgggcgcacgcgctcaagaccaaggaaaagctggcacagaccgccacggcctcatcagcagctgtgggctcaggcccccctcccgaggcggagcaggcgtggccgcagagcagcggggaggaggagctgcagctccagctggccctggccatgagcaaggaggaggccgaccaggaggagcggatccgtcgcggggatgacctgcggctgcagatggcaatcgaggagagcaagagggagactgggggcaaggaggagtcgtccctcatggaccttgctgacgtcttcacggccccagctcctgccccgaccacagacccctgggggggcccagcacccatggctgctgccgtccccacggctgcccccacctcggacccctggggcggcccccctgtccctccagctgctgatccctggggaggtccagcccccacgccggcctctggggacccctggaggcctgctgcccctgcaggaccctcagttgacccttggggtgggaccccagcccctgcagctggggaggggcccacgcctgatccatggggaagttccgatggtggggtcccggtcagtgggccctcagcctccgatccctggacaccggccccggccttctcagatccctggggagggtcacctgccaagcccagcaccaatggcacaacagcagccgggggattcgacacggagcccgacgagttctctgactttgaccgactccgcacggcactgccgacctccgggagcagcgcaggagagctggagctgctggcaggagaggtgccggcccgaagccctggggcgtttgacatgagtggggtcaggggatctctggctgaggctgtgggcagccccccacctgcagccacaccaactcccacgccccccacccggaagacgccggagtcattcctggggcccaatgcagccctcgtcgacctggactcgctggtgagccggccgggccccacgccgcctggagccaaggcctccaaccccttcctgccaggcggaggcccagccactggcccttccgtcaccaaccccttccagcccgcgcctcccgcgacgctcaccctgaaccagctccgtctcagtcctgtgcctcccgtccctggagcgccacccacgtacatctctccccttggcgggggccctggcctgccccccatgatgcccccgggccccccggcccccaacactaatcccttcctcctataatccagggcggaagggggcctggctccatccggctgccccattccggctccctgggagatcagtgttgtgagtgcatgtgaaatgggggatccccacccccagtgcccttccccttcctggggcccactcacactacaccctcttcctttcccaccccacctccccggagagaaactggacatggggcctggggaggggagctggccagaggaggacccctttcccgtggcattagaagggggaggggtggctggggcccccacccattccccctccctccaaactcccaacccccagtcagtgtttgagcctcctcgttcccctcacgcacccgctcacgcaccctcggtgaatccttggtgatgattttggcaactttgggaataaatggcaattcccacgggcttggcactcccaga

SEQ ID NO: 27617 - protein, 551 aa, Homo sapiens
MSTSSLRRQMKNIVHNYSEAEIKVREATSNDPWGPSSSLMSEIADLTYNVVAFSEIMSMIWKRLNDHGKNWRHVYKAMTLMEYLIKTGSERVSQQCKENMYAVQTLKDFQYVDRDGKDQGVNVREKAKQLVALLRDEDRLREERAHALKTKEKLAQTATASSAAVGSGPPPEAEQAWPQSSGEEELQLQLALAMSKEEADQEERIRRGDDLRLQMAIEESKRETGGKEESSLMDLADVFTAPAPAPTTDPWGGPAPMAAAVPTAAPTSDPWGGPPVPPAADPWGGPAPTPASGDPWRPAAPAGPSVDPWGGTPAPAAGEGPTPDPWGSSDGGVPVSGPSASDPWTPAPAFSDPWGGSPAKPSTNGTTAAGGFDTEPDEFSDFDRLRTALPTSGSSAGELELLAGEVPARSPGAFDMSGVRGSLAEAVGSPPPAATPTPTPPTRKTPESFLGPNAALVDLDSLVSRPGPTPPGAKASNPFLPGGGPATGPSVTNPFQPAPPATLTLNQLRLSPVPPVPGAPPTYISPLGGGPGLPPMMPPGPPAPNTNPFLL

SEQ ID NO: 27618 - DNA, 2469 bp, Homo sapiens
gcctccttctgttgcttcccgtctcctcggcggctcccctcccccgcccggctctccgcgccccttctgggcggcggggcggcggagccgtcggcgtgcggccctccttgcgttcgtgcgtgcgcccgtggcccggcgcacgtcccgcgacaccgaggccgagcggggcagggggctgaccgccatgaccccccagagcccggcgtgagggggccgagatgcggtgacctgccagcacctgccgcagccttcgtccgggagtcgccccatctctccacgcatcggggccctgtgccccttgctgctgcagccgggcaccatgtcgacctcgtccttgaggcgccagatgaagaacatcgtccacaactactcagaggcggagatcaaggttcgagaggccacgagcaatgacccctggggcccatccagctccctcatgtcagagattgccgacctcacctacaacgttgtcgccttctcggagatcatgagcatgatctggaagcggctcaatgaccatggcaagaactggcgtcacgtttacaaggccatgacgctgatggagtacctcatcaagaccggctcggagcgcgtgtcgcagcagtgcaaggagaacatgtacgccgtgcagacgctgaaggacttccagtacgtggaccgcgacggcaaggaccagggcgtgaacgtgcgtgagaaagctaagcagctggtggccctgctgcgcgacgaggaccggctgcgggaagagcgggcgcacgcgctcaagaccaaggaaaagctggcacagaccgccacggcctcatcagcagctgtgggctcaggcccccctcccgaggcggagcaggcgtggccgcagagcagcggggaggaggagctgcagctccagctggccctggccatgagcaaggaggaggccgaccagcccccgtcctgcggccccgaggacgacgcccagctccagctggcccttagtttgagccgagaagagcatgataaggaggagcggatccgtcgcggggatgacctgcggctgcagatggcaatcgaggagagcaagagggagactgggggcaaggaggagtcgtccctcatggaccttgctgacgtcttcacggccccagctcctgccccgaccacagacccctgggggggcccagcacccatggctgctgccgtccccacggctgcccccacctcggacccctggggcggcccccctgtccctccagctgctgatccctggggaggtccagcccccacgccggcctctggggacccctggaggcctgctgcccctgcaggaccctcagttgacccttggggtgggaccccagcccctgcagctggggaggggcccacgcctgatccatggggaagttccgatggtggggtcccggtcagtgggccctcagcctccgatccctggacaccggccccggccttctcagatccctggggagggtcacctgccaagcccagcaccaatggcacaacagcagccgggggattcgacacggagcccgacgagttctctgactttgaccgactccgcacggcactgccgacctccgggagcagcgcaggagagctggagctgctggcaggagaggtgccggcccgaagccctggggcgtttgacatgagtggggtcaggggatctctggctgaggctgtgggcagccccccacctgcagccacaccaactcccacgccccccacccggaagacgccggagtcattcctggggcccaatgcagccctcgtcgacctggactcgctggtgagccggccgggccccacgccgcctggagccaaggcctccaaccccttcctgccaggcggaggcccagccactggcccttccgtcaccaaccccttccagcccgcgcctcccgcgacgctcaccctgaaccagctccgtctcagtcctgtgcctcccgtccctggagcgccacccacgtacatctctccccttggcgggggccctggcctgccccccatgatgcccccgggccccccggcccccaacactaatcccttcctcctataatccagggcggaagggggcctggctccatccggctgccccattccggctccctgggagatcagtgttgtgagtgcatgtgaaatgggggatccccacccccagtgcccttccccttcctggggcccactcacactacaccctcttcctttcccaccccacctccccggagagaaactggacatggggcctggggaggggagctggccagaggaggacccctttcccgtggcattagaagggggaggggtggctggggcccccacccattccccctccctccaaactcccaacccccagtcagtgtttgagcctcctcgttcccctcacgcacccgctcacgcaccctcggtgaatccttggtgatgattttggcaactttgggaataaatggcaattcccacgggcttggcactcccaga

SEQ ID NO: 27619 - protein, 576 aa, Homo sapiens
MSTSSLRRQMKNIVHNYSEAEIKVREATSNDPWGPSSSLMSEIADLTYNVVAFSEIMSMIWKRLNDHGKNWRHVYKAMTLMEYLIKTGSERVSQQCKENMYAVQTLKDFQYVDRDGKDQGVNVREKAKQLVALLRDEDRLREERAHALKTKEKLAQTATASSAAVGSGPPPEAEQAWPQSSGEEELQLQLALAMSKEEADQPPSCGPEDDAQLQLALSLSREEHDKEERIRRGDDLRLQMAIEESKRETGGKEESSLMDLADVFTAPAPAPTTDPWGGPAPMAAAVPTAAPTSDPWGGPPVPPAADPWGGPAPTPASGDPWRPAAPAGPSVDPWGGTPAPAAGEGPTPDPWGSSDGGVPVSGPSASDPWTPAPAFSDPWGGSPAKPSTNGTTAAGGFDTEPDEFSDFDRLRTALPTSGSSAGELELLAGEVPARSPGAFDMSGVRGSLAEAVGSPPPAATPTPTPPTRKTPESFLGPNAALVDLDSLVSRPGPTPPGAKASNPFLPGGGPATGPSVTNPFQPAPPATLTLNQLRLSPVPPVPGAPPTYISPLGGGPGLPPMMPPGPPAPNTNPFLL

SEQ ID NO: 27620 - DNA, 2955 bp, Homo sapiens
aattctttcatttcagagttgagcaaactgtgtctcaaggaggtgtgcgctgcaggtagctgatgtggccaggatttgaacccacattttatattctttgccattagattccatttttcttatctcttatttctcagcgccaggtctctttttgtttctgggcctctttcttccttggcctcctgcctccctgtcttcccatgttcttgtatctgctgctgcctgtgtttttctcattgtgtctctgcctagctccctctgcccaggtttctatgtgtctctttctgtcagaactgtcttctatttcttctcagtccccttctctgcatttgttacatcatctcttcatcttaatgtattaggctggggctgttttgggactccagagagttactttttaactagctacatctgtcttcaggtgcctggctttctggcctgaggtggaagcagaggccagcctctctccgtcatccctatctcccctgggcttacatcatggcggggctttgaaaatctccctctgtggcttcttggagccgcatagatgggtgatcagagctggctctggaaccaggctgctccaggagtaaggagcccagtctttgcatgcagtgttgaaaaaggtaatgtccctcttgtgctgagcgagcacctggcacacagcagggacccaggcagtggggctgttaggttccttatctctcctgagccttgggcttccgctatccttgggacgtctggtcttctggcttccccggttcttcctgccgccctggatgcggtgacctgccagcacctgccgcagccttcgtccgggagtcgccccatctctccacgcatcggggccctgtgccccttgctgctgcagccgggcaccatgtcgacctcgtccttgaggcgccagatgaagaacatcgtccacaactactcagaggcggagatcaaggttcgagaggccacgagcaatgacccctggggcccatccagctccctcatgtcagagattgccgacctcacctacaacgttgtcgccttctcggagatcatgagcatgatctggaagcggctcaatgaccatggcaagaactggcgtcacgtttacaaggccatgacgctgatggagtacctcatcaagaccggctcggagcgcgtgtcgcagcagtgcaaggagaacatgtacgccgtgcagacgctgaaggacttccagtacgtggaccgcgacggcaaggaccagggcgtgaacgtgcgtgagaaagctaagcagctggtggccctgctgcgcgacgaggaccggctgcgggaagagcgggcgcacgcgctcaagaccaaggaaaagctggcacagaccgccacggcctcatcagcagctgtgggctcaggcccccctcccgaggcggagcaggcgtggccgcagagcagcggggaggaggagctgcagctccagctggccctggccatgagcaaggaggaggccgaccaggaggagcggatccgtcgcggggatgacctgcggctgcagatggcaatcgaggagagcaagagggagactgggggcaaggaggagtcgtccctcatggaccttgctgacgtcttcacggccccagctcctgccccgaccacagacccctgggggggcccagcacccatggctgctgccgtccccacggctgcccccacctcggacccctggggcggcccccctgtccctccagctgctgatccctggggaggtccagcccccacgccggcctctggggacccctggaggcctgctgcccctgcaggaccctcagttgacccttggggtgggaccccagcccctgcagctggggaggggcccacgcctgatccatggggaagttccgatggtggggtcccggtcagtgggccctcagcctccgatccctggacaccggccccggccttctcagatccctggggagggtcacctgccaagcccagcaccaatggcacaacagcagccgggggattcgacacggagcccgacgagttctctgactttgaccgactccgcacggcactgccgacctccgggagcagcgcaggagagctggagctgctggcaggagaggtgccggcccgaagccctggggcgtttgacatgagtggggtcaggggatctctggctgaggctgtgggcagccccccacctgcagccacaccaactcccacgccccccacccggaagacgccggagtcattcctggggcccaatgcagccctcgtcgacctggactcgctggtgagccggccgggccccacgccgcctggagccaaggcctccaaccccttcctgccaggcggaggcccagccactggcccttccgtcaccaaccccttccagcccgcgcctcccgcgacgctcaccctgaaccagctccgtctcagtcctgtgcctcccgtccctggagcgccacccacgtacatctctccccttggcgggggccctggcctgccccccatgatgcccccgggccccccggcccccaacactaatcccttcctcctataatccagggcggaagggggcctggctccatccggctgccccattccggctccctgggagatcagtgttgtgagtgcatgtgaaatgggggatccccacccccagtgcccttccccttcctggggcccactcacactacaccctcttcctttcccaccccacctccccggagagaaactggacatggggcctggggaggggagctggccagaggaggacccctttcccgtggcattagaagggggaggggtggctggggcccccacccattccccctccctccaaactcccaacccccagtcagtgtttgagcctcctcgttcccctcacgcacccgctcacgcaccctcggtgaatccttggtgatgattttggcaactttgggaataaatggcaattcccacgggcttggcactcccaga

SEQ ID NO: 27621 - protein, 662 aa, Homo sapiens
MGDQSWLWNQAAPGVRSPVFACSVEKGNVPLVLSEHLAHSRDPGSGAVRFLISPEPWASAILGTSGLLASPVLPAALDAVTCQHLPQPSSGSRPISPRIGALCPLLLQPGTMSTSSLRRQMKNIVHNYSEAEIKVREATSNDPWGPSSSLMSEIADLTYNVVAFSEIMSMIWKRLNDHGKNWRHVYKAMTLMEYLIKTGSERVSQQCKENMYAVQTLKDFQYVDRDGKDQGVNVREKAKQLVALLRDEDRLREERAHALKTKEKLAQTATASSAAVGSGPPPEAEQAWPQSSGEEELQLQLALAMSKEEADQEERIRRGDDLRLQMAIEESKRETGGKEESSLMDLADVFTAPAPAPTTDPWGGPAPMAAAVPTAAPTSDPWGGPPVPPAADPWGGPAPTPASGDPWRPAAPAGPSVDPWGGTPAPAAGEGPTPDPWGSSDGGVPVSGPSASDPWTPAPAFSDPWGGSPAKPSTNGTTAAGGFDTEPDEFSDFDRLRTALPTSGSSAGELELLAGEVPARSPGAFDMSGVRGSLAEAVGSPPPAATPTPTPPTRKTPESFLGPNAALVDLDSLVSRPGPTPPGAKASNPFLPGGGPATGPSVTNPFQPAPPATLTLNQLRLSPVPPVPGAPPTYISPLGGGPGLPPMMPPGPPAPNTNPFLL

SEQ ID NO: 27622 - DNA, 250 bp, Homo sapiens
ccaagcccagcaccaatggcacaacagcagccgggggattcgacacggagcccgacgagttctctgactttgaccgactccgcacggcactgccgacctccgggagcagcgcagcttactggacacgacttcctcctggcttctactccctcaacagctatcgttcttgctttatacgttgaatctctgtctctttataacttctaaatgttctcagcatcaggaaaatataaaaaataagttcacaaat

SEQ ID NO: 27623 - protein, 63 aa, Homo sapiens
MAQQQPGDSTRSPTSSLTLTDSARHCRPPGAAQLTGHDFLLASTPSTAIVLALYVESLSLYNF

SEQ ID NO: 27624 - DNA, 537 bp, Homo sapiens
aagccctgatttccctgaccctcccaggtcaagggatggctgggttgagggtggactgtgcgaggcctggcggagctgtagcccacacaggtccaggtggtcgggaggccactcatggccagacgcttccggtgcaggaggccttgctcttgtgttgaggggacaccaggatgaggtcagagagtgcactggggttcagggaggagaagaatcctgagagatggcacatgtgcaacacaggtcaccgtcgccatcgcccgggcccaccgcaagcatcactaatccatccctgcactcctggaaagccgggtcagcctctgccggctgagctgagtggaccaccaggcgcctcctggttgtcctctgtgtgctgttttcctctgtgtgctcttgtcctgggctggaccacacctgaatattccagccaccaaagtgctcagcaggagctgctgtgtaggagtcccccatgaggcccaagcacctgagcttagtgacatacacggttgaacgctgggagaatgctgggagcctgctgtt

SEQ ID NO: 27625 - protein, 99 aa, Homo sapiens
MRSESALGFREEKNPERWHMCNTGHRRHRPGPPQASLIHPCTPGKPGQPLPAELSGPPGASWLSSVCCFPLCALVLGWTTPEYSSHQSAQQELLCRSPP

SEQ ID NO: 27626 - DNA, 518 bp, Homo sapiens
aaagaaatcacttctcctaacaaagagcagcctgatctttcaggctgtaaaacacagataagcaactcgggcacagacttgggaggttcctgggtaatcaccaagccacatacatagatgggccccagtgaaaacagtgggcctaaagcacattcctttccctttctttaggcacactaagggaagctggaagcgcgtgggggagatgcctgcagctgcacgaaggtgcctgggaatgggcacagaaacactccctccccttttagcacacacagataagcagcagcgcagagcagcacaaacgaagggcctgcctgcaggatcaaagaatggggtgggggcccggcgcggtggctcacgcctgcaatcccactactttgggagggtctgacaagtgaggggcccaggagctatgaccctgtggggagaccaagattggcaagagggaggctcggctcgcctcccctttccatgtgatcccacccagagctgccgccttcagctggctctctgtgccc

SEQ ID NO: 27627 - protein, 61 aa, Homo sapiens [sequence omitted]

SEQ ID NO: 27628 - DNA, 3484 bp, Homo sapiens; identical to SEQ ID NO: 3776

SEQ ID NO: 27629 - protein, 991 aa, Homo sapiens; identical to SEQ ID NO: 3777

SEQ ID NO: 27630 - DNA, 2958 bp, Homo sapiens
atggcagaatcttttttttcggattttggcttgttgtggtatctgaaggagctcagaaaggaagagttttggaaatttaaggagctcctcaaacaacctttggagaaatttgaactcaagccaatcccctgggctgagctgaagaaggcctccaaagaagatgtagcaaagctgctggacaaacattacccaggaaagcaggcatgggaggtaacactgaacctgtttctacagatcaataggaaagatctctggacaaaggctcaggaagagatgagaaataagctaaacccatacagaaagcatatgaaggaaacatttcaactcatatgggagaaggaaacctgtcttcacgtccctgagcatttctacaaagaaaccatgaaaaatgagtataaagaattgaatgacgcatatactgctgcggctagacgacacactgtggtcctggaaggtcctgatggaattggaaaaacaacccttttaagaaaagtgatgttggactgggcagagggaaacttatggaaggacaggttcacatttgtgtttttcctcaatgtctgtgaaatgaacggtatcgcagagaccagcttactggagctcctctctagggactggccggagtcttcagagaagatcgaagacattttttcccagccagagagaattctgttcatcatggatggctttgagcaactgaagtttaacttacaacttaaggctgacttgagcgatgattggaggcagcggcagccaatgccaattatcctgagcagtttgttgcaaaaaaagatgcttccagaatcctctctccttattgcattaggaaaactggctatgcaaaaacactattttatgttgcggcatccaaaactcataaagctcttaggattcagtgaatctgaaaagaagtcgtatttctcctacttctttggtgagaagagcaaagccctgaaagtcttcaattttgtgagagataatgggccgctgtttatcttgtgccataatccctttacgtgctggttggtctgtacttgtgtgaaacagaggctagagaggggagaagaccttgaaataaactcccaaaacaccacctatttatatgcatcctttttaacaactgtattcaaagcaggaagtcagagttttccacctaaggtgaacagagcccgactaaaaagcctgtgtgctttggctgcagagggaatttggacatatacatttgtattttcccatggggatctccggaggaatgggttatctgagtctgagggcgtgatgtgggtgggtatgagactcctccaaaggagaggggactgttttgccttcatgcatctgtgtatccaagagttttgtgccgccatgttttatttgctcaaacgacccaaagacgatcctaacccggccattggaagcataacccagcttgtaagagcaagtgtggttcagcctcaaaccctcttgacccaggtggggatattcatgtttggaatttcaacagaagaaatcgtcagcatgctggagacctcctttggttttccactgtcaaaagacctaaagcaggaaataacccaatgccttgaaagtttaagtcaatgtgaagctgatagggaagccatagctttccaggaactattcattggtttgtttgaaactcaggaaaaagaatttgtaaccaaagtgatgaatttctttgaagaagttttcatttatattggtaacatagaacatttggtaatagcttcattctgcctgaagcattgtcaacatttaacgacacttcgcatgtgtgtggagaatatctttccagatgactcaggatgcatctcagattacaatgagaagctcgtctactggcgggagctttgctcaatgttcattaccaacaagaacttccagattttagacatggaaaataccagccttgatgatccctccctggcgattctttgcaaagcgctggctcagcctgtttgtaaactccgaaaactcatatttacttctgtgtactttggacatgattcagaattatttaaggcagttcttcacaaccctcatctgaaacttctgagcctgtacggcactagcctctcccagtctgacatcagacacctgtgtgagacgctgaaacatccaatgtgcaagatagaagagctgatactgggaaagtgtgacatctccagtgaagtttgtgaagacatcgcctccgtcctggcctgcaacagcaagctgaaacacctctccttggtagaaaatcccttgagggacgaaggaatgacgttgctgtgtgaagccctgaagcactcacactgtgccctggagaggctgatgttgatgtactgctgtctcacctctgtctcctgtgactccatttccgaagtcctcttgtgcagtaagtccctgtccctcctcgatctgggctcaaatgccctggaagataatggagtggcatctctgtgtgcagcgctgaagcacccaggctgcagcatacgggagctgtggttgatgggctgtttccttacttccgattcctgtaaggacattgctgctgttcttatttgcaatgggaaactgaagaccctgaaacttgggcataatgaaataggagacactggtgtcagacagttatgtgcagctttgcagcatcctcactgtaaattagagtgtctcgggctgcaaacgtgtccgatcacccgtgcctgctgcgacgacatcgccgcagcactcatcgcctgcaaaacactgaggagcctgaacctcgactggattgccttggatgctgatgcagtggtggtgctgtgtgaggcattgagccacccggactgtgccctgcagatgctgggaaattgtcagaagtccctcggagacacagttgcaccaggtgagaaccactgctctataaaacatcttctacttacgttgcccataaatatgcaacgccagctcagacttcagaag

SEQ ID NO: 27631 - protein, 985 aa, Homo sapiens
MAESFFSDFGLLWYLKELRKEEFWKFKELLKQPLEKFELKPIPWAELKKASKEDVAKLLDKHYPGKQAWEVTLNLFLQINRKDLWTKAQEEMRNKLNPYRKHMKETFQLIWEKETCLHVPEHFYKETMKNEYKELNDAYTAAARRHTVVLEGPDGIGKTTLLRKVMLDWAEGNLWKDRFTFVFFLNVCEMNGIAETSLLELLSRDWPESSEKIEDIFSQPERILFIMDGFEQLKFNLQLKADLSDDWRQRQPMPIILSSLLQKKMLPESSLLIALGKLAMQKHYFMLRHPKLIKLLGFSESEKKSYFSYFFGEKSKALKVFNFVRDNGPLFILCHNPFTCWLVCTCVKQRLERGEDLEINSQNTTYLYASFLTTVFKAGSQSFPPKVNRARLKSLCALAAEGIWTYTFVFSHGDLRRNGLSESEGVMWVGMRLLQRRGDCFAFMHLCIQEFCAAMFYLLKRPKDDPNPAIGSITQLVRASVVQPQTLLTQVGIFMFGISTEEIVSMLETSFGFPLSKDLKQEITQCLESLSQCEADREAIAFQELFIGLFETQEKEFVTKVMNFFEEVFIYIGNIEHLVIASFCLKHCQHLTTLRMCVENIFPDDSGCISDYNEKLVYWRELCSMFITNKNFQILDMENTSLDDPSLAILCKALAQPVCKLRKLIFTSVYFGHDSELFKAVLHNPHLKLLSLYGTSLSQSDIRHLCETLKHPMCKIEELILGKCDISSEVCEDIASVLACNSKLKHLSLVENPLRDEGMTLLCEALKHSHCALERLMLMYCCLTSVSCDSISEVLLCSKSLSLLDLGSNALEDNGVASLCAALKHPGCSIRELWLMGCFLTSDSCKDIAAVLICNGKLKTLKLGHNEIGDTGVRQLCAALQHPHCKLECLGLQTCPITRACCDDIAAALIACKTLRSLNLDWIALDADAVVVLCEALSHPDCALQMLGNCQKSLGDTVAPGENHCSIKHLLLTLPINMQRQLRLQ

SEQ ID NO: 27632 - DNA, 1188 bp, Homo sapiens
atggaagaaaggtattggcaggacttcaatttcaaaacccaggctggtgtactgacaagggccttcattttctttaatcaaatcatagcttcaaagactctgcaggacgctggtaaaaacctgtccaatagtaacaatctcaatgatggcagaatgaaatcagaatctgattggattaaaaaggagggaaagggtgtggctaaggtgggtggagacaccctctggtataaaagcccctggcaggcagctctcactccagatctgagctgtccgcagaagcagctggaggccaggggagaaactccagaaggagagacatttgccatggctgagcacttcaaacagatcattagatgtcctgtctgtctaaaagatcttgaagaagccgtgcaactgaaatgtggatatgcctgctgcctccagtgcctcaattcactccagaaggagcccgatggggaaggtttactgtgccgtttctgctctgtggtctctcagaaggatgacatcaagcccaagtacaagctgagggcgctggtttccatcatcaaggaactagagcccaagctgaaatctgttctaacaatgaacccaaggatgaggaagtttcaagtggatatgacgttcgatgtggacacagccaacaactatctcatcatttctgaagacctgaggagtttccgaagtggggatttgagccagaataggaaggagcaagctgagaggttcgacactgccctgtgcgtcctgggcacccctcgcttcacttccggccgccattactgggaggtggacgtgggcaccagccaagtgtgggatgtgggcgtgtgcaaggaatctgtgaaccgacaggggaagattgtgctttcttcagaacacggcttcttgactgtgggttgcagagaaggaaaggtctttgctgccagcactgtgcctatgactcctctctgggtgagtccccagttgcacagagtggggattttcctggatgtaggtatgaggtccattgccttttacaatgttagtgatgggtgccatatctacacattcatcgagattcctgtttgcgagccctggcgtccattttttgctcataaacgtggaagtcaagatgatcagagcatcctgagtatctgttctgtgatcaatccatccgctgccagtgccccagtttcttctgagggaaagtaa

SEQ ID NO: 27633 - protein, 395 aa, Homo sapiens [sequence omitted]

SEQ ID NO: 27634 - DNA, 1728 bp, Homo sapiens
atggctgagcacttcaaacagatcattagatgtcctgtctgtctaaaagatcttgaagaagccgtgcaactgaaatgtggatatgcctgctgcctccagtgcctcaattcactccagaaggagcccgatggggaaggtttactgtgccgtttctgctctgtggtctctcagaaggatgacatcaagcccaagtacaagctgagggcgctggtttccatcatcaaggaactagagcccaagctgaaatctgttctaacaatgaacccaaggatgaggaagtttcaagtggatatgaccttcgatgtggacacagccaacaactatctcatcatttctgaagacctgaggagtttccgaagtggggatttgagccagaataggaaggagcaagctgagaggttcgacactgccctgtgcgtcctgggcacccctcgcttcacttccggccgccattactgggaggtggacgtgggcaccagccaagtgtgggatgtgggcgtgtgcaaggaatctgtcaaccgacaggggaagattgagctttcttcagaacacggcttcttgactgtgggttgcagagaaggaaaggtctttgctgccagcactgtgcctatgactcctctctgggtgagtccccagttgcacagagtggggattttcctggatgtaggtatgaggtccattgccttttacaatgttagtgatgggtgccatatcaacacattcatcgagattcctgtttgcgagccctggcgtccattttttgctcataaacgtggaagtcaagatgatcagagcatcctgagtatctgttctgtgatcaatccatccactgccagtgccccagtttcttctgagggaaataccagtgctttacaaagagtaggcgatgatgtcttcatgcagacagtggccatggctgaacactttaaacaagcaagcagttgtcctatctgcctggattatcttgaaaaccccacgcacctgaaatgtggatacatctgttgcctccgatgcatgaactcactgcgaaaggggcccgatgggaagggggtgctgtgccctttctgccctgtggtctctcagaaaaatgacatcaggcccgctgcccagctgggggcgctggtgtccaagatcaaggaactagagcccaaggtgagagctgttctgcagatgaatccaaggatgagaaagttccaagtggatatgaccttggatgtggacacagccaacaacgatctcatcgtttctgaagacctgaggcgtgtccgatgtgggaatttcagacagaataggaaggagcaagctgagaggttcgacactgccctgtgcgtcctgggcacccctcgcttcacttccggccgccattactgggaggtgggcgtgggcaccagccaagtgtgggatgtgggcgtgtgcaaggaatctgtgaaccgacaggggaacgttgtactctcttcagaactcggcttctggactgtgggtttgagacaaggacagatctactttgccagcactaagcctgtgacgggtctctgggtgagctcaggtctacaccgagtggggatttacctggatataaaaacgagggccatttccttctataatgtcagtgataggtcacatatcttcacattcacgaaaatttctgctactgagccactgcgcccatgttttgctcatgcagatacaagtcgtgatgatcacggatacttgagtgtgtgtgtgtaa

SEQ ID NO: 27635 - protein, 575 aa, Homo sapiens
MAEHFKQIIRCPVCLKDLEEAVQLKCGYACCLQCLNSLQKEPDGEGLLCRFCSVVSQKDDIKPKYKLRALVSIIKELEPKLKSVLTMNPRMRKFQVDMTFDVDTANNYLIISEDLRSFRSGDLSQNRKEQAERFDTALCVLGTPRFTSGRHYWEVDVGTSQVWDVGVCKESVNRQGKIELSSEHGFLTVGCREGKVFAASTVPMTPLWVSPQLHRVGIFLDVGMRSIAFYNVSDGCHINTFIEIPVCEPWRPFFAHKRGSQDDQSILSICSVINPSTASAPVSSEGNTSALQRVGDDVFMQTVAMAEHFKQASSCPICLDYLENPTHLKCGYICCLRCMNSLRKGPDGKGVLCPFCPVVSQKNDIRPAAQLGALVSKIKELEPKVRAVLQMNPRMRKFQVDMTLDVDTANNDLIVSEDLRRVRCGNFRQNRKEQAERFDTALCVLGTPRFTSGRHYWEVGVGTSQVWDVGVCKESVNRQGNVVLSSELGFWTVGLRQGQIYFASTKPVTGLWVSSGLHRVGIYLDIKTRAISFYNVSDRSHIFTFTKISATEPLRPCFAHADTSRDDHGYLSVCV

SEQ ID NO: 27636 - DNA, 2106 bp, Homo sapiens
aaggggcgtgacttccagctctgctgccaaacacccactgatctacatgcccactttcttgctgatgcgttgacatcagaggctggacttactgccaatcagtatcacctaggtctcctaaaacgtctgtgtttgctggctgcaggaggactgtttctgagcaccctgaatttcagtggtgaagacctcagatgtgttgggtttactgaggctgatgtctctgtgttgcaggccgcgaatattcttttgccgagcaacactcataaagaccgttacaagttcatacacttgaacgtccaggagttttgtacagccattgcatttctgatggcagtacccaactatctgatcccctcaggcagcagagagtataaagagaagagagaacaatactctgactttaatcaagtgtttactttcatttttggtcttctaaatgcaaacaggagaaagattcttgagacatcctttggataccagctaccgatggtagacagcttcaagtggtactcggtgggatacatgaaacatttggaccgtgacccggaaaagttgacgcaccatatgcctttgttttactgtctctatgagaatcgggaagaagaatttgtgaagacgattgtggatgctctcatggaggttacagtttaccttcaatcagacaaggatatgatggtctcattatactgtctggattactgctgtcacctgaggacacttaagttgagtgttcagcgcatctttcaaaacaaagagccacttataaggccaactgctaggttgtcctatgtctcgactgcttctggttttgaagacttactcaaggctttggctcgtaatcggagcctgacatacctgagtatcaactgtacgtccatttccctaaatatgttttcacttctgcatgacatcctgcacgagcccacatgccaaataagtcatctgagcttgatgaaatgtgatttgcgagccagcgaatgtgaagaaatcgcctctctcctcatcagtggcgggagtctgagaaaactgaccttatccagcaatccgctgaggagcgacgggatgaacatactgtgtgatgccttgcttcatcccaactgcactcttatatcactggtgttagtcttctgctgtctcactgaaaattgctgcagcgcccttggaagagtgcttctgttcagcccaactctaagacaactagacctgtgtgtgaatcgcttaaaaaattacggagtgttgcatgtgacgtttcccttgctgtttccaacctgtcagttagaggagcttcatctgtctggctgtttctttagcagcgatatctgtcaatatattgccatagttattgctactaatgaaaaactgaggagcctggagattgggagcaacaaaatagaagatgcaggaatgcagctgctatgtggtggtttgagacatcccaactgcatgttggtgaatattgggctagaagagtgcatgttaaccagtgcctgctgtcgatctcttgcctctgttcttaccaccaacaaaacactagaaagactcaacttgcttcaaaatcacttgggcaatgatggagttgcaaaacttcttgagagcttgatcagcccagattgtgtacttaaggtagttgggcttccattaactggcctgaacacacaaacccagcagttgctgatgactgtaaaggaaagaaaacccagtttgatctttctgtctgaaacttggtctttaaaggaaggcagagaaattggtgtgacacctgcttctcagccaggttcaataatacctaattctaatttggattacatgtttttcaaatttcccagaatgtctgcagccatgagaacgtcaaatacagcatctaggcaacccctttgatcatgttgtacgtaaacagtatttattataaattactaccgtgactgggatgcaagagaattaggactataattttcctatttgatgtgtgtgtgtgtgtgtgtgtgtgtgtgtgtgtgtgtgtgtgtgtgaccttgatccagtcaaccacttcaaattcctacactgtctcaagagtattaaaaggattatatgaagtaataaaggataaaatgcattggaaaaagc

SEQ ID NO: 27637 - protein, 516 aa, Homo sapiens
MAVPNYLIPSGSREYKEKREQYSDFNQVFTFIFGLLNANRRKILETSFGYQLPMVDSFKWYSVGYMKHLDRDPEKLTHHMPLFYCLYENREEEFVKTIVDALMEVTVYLQSDKDMMVSLYCLDYCCHLRTLKLSVQRIFQNKEPLIRPTARLSYVSTASGFEDLLKALARNRSLTYLSINCTSISLNMFSLLHDILHEPTCQISHLSLMKCDLRASECEEIASLLISGGSLRKLTLSSNPLRSDGMNILCDALLHPNCTLISLVLVFCCLTENCCSALGRVLLFSPTLRQLDLCVNRLKNYGVLHVTFPLLFPTCQLEELHLSGCFFSSDICQYIAIVIATNEKLRSLEIGSNKIEDAGMQLLCGGLRHPNCMLVNIGLEECMLTSACCRSLASVLTTNKTLERLNLLQNHLGNDGVAKLLESLISPDCVLKVVGLPLTGLNTQTQQLLMTVKERKPSLIFLSETWSLKEGREIGVTPASQPGSIIPNSNLDYMFFKFPRMSAAMRTSNTASRQPL

SEQ ID NO: 27638 - DNA, 3393 bp, Homo sapiens
gatctcatatttcttgtgcctcaaaatcccttctctgaagtctgccttccctggagaagcaagatggcagaatcggattctactgactttgacctgctgtggtatctagagaatctcagtgacaaggaatttcagagttttaagaagtatctggcacgcaagattcttgatttcaaactgccacagtttccactgatacagatgacaaaagaagaactggctaacgtgttgccaatctcttatgagggacagtatatatggaatatgctcttcagcatattttcaatgatgcgtaaggaagatctttgtaggaagatcattggcagacgaaaccgcaatcaggaggcatgcaaagctgtcatgaggagaaaattcatgctgcaatgggaaagtcacacttttggaaaatttcattataaattttttcgtgacgtttcgtcagatgtgttctacatacttcaattagcctatgattctaccagctattattcagcaaacaatctcaatgtgttcctgatgggagagagagcatctggaaaaactattgttataaatctggctgtgttgaggtggatcaagggtgagatgtggcagaacatgatctcgtacgtcgttcacctcactgctcacgaaataaaccagatgaccaacagcagcttggctgagctaatcgccaaggactggcctgacggccaggctcccattgcagacatcctgtctgatcccaagaaactccttttcatcctcgaggacttggacaacataagattcgagttaaatgtcaatgaaagtgctttgtgtagtaacagcacccagaaagttcccattccagttctcctggtcagtttgctgaagagaaaaatggctccaggctgctggttcctcatctcctcaaggcccacacgtgggaataatgtaaaaacgttcttgaaagaggtagattgctgcacgaccttgcagctgtcgaatgggaagagggagatatattttaactctttctttaaagaccgccagagggcgtcggcagccctccagcttgtacatgaggatgaaatactcgtgggtctgtgccgagtcgccatcttatgctggatcacgtgtactgtcctgaagcggcagatggacaaggggcgtgacttccagctctgctgccaaacacccactgatctacatgcccactttcttgctgatgcgttgacatcagaggctggacttactgccaatcagtatcacctaggtctcctaaaacgtctgtgtttgctggctgcaggaggactgtttctgagcaccctgaatttcagtggtgaagacctcagatgtgttgggtttactgaggctgatgtctctgtgttgcaggccgcgaatattcttttgccgagcaacactcataaagaccgttacaagttcatacacttgaacgtccaggagttttgtacagccattgcatttctgatggcagtacccaactatctgatcccctcaggcagcagagagtataaagagaagagagaacaatactctgactttaatcaagtgtttactttcatttttggtcttctaaatgcaaacaggagaaagattcttgagacatcctttggataccagctaccgatggtagacagcttcaagtggtactcggtgggatacatgaaacatttggaccgtgacccggaaaagttgacgcaccatatgcctttgttttactgtctctatgagaatcgggaagaagaatttgtgaagacgattgtggatgctctcatggaggttacagtttaccttcaatcagacaaggatatgatggtctcattatactgtctggattactgctgtcacctgaggacacttaagttgagtgttcagcgcatctttcaaaacaaagagccacttataaggccaactgctagtcaaatgaagagccttgtctactggagagagatctgctctcttttttatacaatggagagcctccgggagctgcatatctttgacaatgaccttaatggtatttcagaaaggattctgtctaaagccctggagcattctagctgtaaacttcgcacactcaagttgtcctatgtctcgactgcttctggttttgaagacttactcaaggctttggctcgtaatcggagcctgacatacctgagtatcaactgtacgtccatttccctaaatatgttttcacttctgcatgacatcctgcacgagcccacatgccaaataagtcatctgagcttgatgaaatgtgatttgcgagccagcgaatgtgaagaaatcgcctctctcctcatcagtggcgggagtctgagaaaactgaccttatccagcaatccgctgaggagcgacgggatgaacatactgtgtgatgccttgcttcatcccaactgcactcttatatcactggtgttagtcttctgctgtctcactgaaaattgctgcagcgcccttggaagagtgcttctgttcagcccaactctaagacaactagacctgtgtgtgaatcgcttaaaaaattacggagtgttgcatgtgacgtttcccttgctgtttccaacctgtcagttagaggagcttcatctgtctggctgtttctttagcagcgatatctgtcaatatattgccatagttattgctactaatgaaaaactgaggagcctggagattgggagcaacaaaatagaagatgcaggaatgcagctgctatgtggtggtttgagacatcccaactgcatgttggtgaatattgggctagaagagtgcatgttaaccagtgcctgctgtcgatctcttgcctctgttcttaccaccaacaaaacactagaaagactcaacttgcttcaaaatcacttgggcaatgatggagttgcaaaacttcttgagagcttgatcagcccagattgtgtacttaaggtagttgggcttccattaactggcctgaacacacaaacccagcagttgctgatgactgtaaaggaaagaaaacccagtttgatctttctgtctgaaacttggtctttaaaggaaggcagagaaattggtgtgacacctgcttctcagccaggttcaataatacctaattctaatttggattacatgtttttcaaatttcccagaatgtctgcagccatgagaacgtcaaatacagcatctaggcaacccctttgatcatgttgtacgtaaacagtatttattataaattactaccgtgactgggatgcaagagaattaggactataattttcctatttgatgtgtgtgtgtgtgtgtgtgtgtgtgtgtgtgtgtgtgtgtgtgtgaccttgatccagtcaaccacttcaaattcctacactgtctcaagagtattaaaaggattatatgaagtaataaaggataaaatgcattggaaaaagc

SEQ ID NO: 27639 - protein, 1033 aa, Homo sapiens
MAESDSTDFDLLWYLENLSDKEFQSFKKYLARKILDFKLPQFPLIQMTKEELANVLPISYEGQYIWNMLFSIFSMMRKEDLCRKIIGRRNRNQEACKAVMRRKFMLQWESHTFGKFHYKFFRDVSSDVFYILQLAYDSTSYYSANNLNVFLMGERASGKTIVINLAVLRWIKGEMWQNMISYVVHLTAHEINQMTNSSLAELIAKDWPDGQAPIADILSDPKKLLFILEDLDNIRFELNVNESALCSNSTQKVPIPVLLVSLLKRKMAPGCWFLISSRPTRGNNVKTFLKEVDCCTTLQLSNGKREIYFNSFFKDRQRASAALQLVHEDEILVGLCRVAILCWITCTVLKRQMDKGRDFQLCCQTPTDLHAHFLADALTSEAGLTANQYHLGLLKRLCLLAAGGLFLSTLNFSGEDLRCVGFTEADVSVLQAANILLPSNTHKDRYKFIHLNVQEFCTAIAFLMAVPNYLIPSGSREYKEKREQYSDFNQVFTFIFGLLNANRRKILETSFGYQLPMVDSFKWYSVGYMKHLDRDPEKLTHHMPLFYCLYENREEEFVKTIVDALMEVTVYLQSDKDMMVSLYCLDYCCHLRTLKLSVQRIFQNKEPLIRPTASQMKSLVYWREICSLFYTMESLRELHIFDNDLNGISERILSKALEHSSCKLRTLKLSYVSTASGFEDLLKALARNRSLTYLSINCTSISLNMFSLLHDILHEPTCQISHLSLMKCDLRASECEEIASLLISGGSLRKLTLSSNPLRSDGMNILCDALLHPNCTLISLVLVFCCLTENCCSALGRVLLFSPTLRQLDLCVNRLKNYGVLHVTFPLLFPTCQLEELHLSGCFFSSDICQYIAIVIATNEKLRSLEIGSNKIEDAGMQLLCGGLRHPNCMLVNIGLEECMLTSACCRSLASVLTTNKTLERLNLLQNHLGNDGVAKLLESLISPDCVLKVVGLPLTGLNTQTQQLLMTVKERKPSLIFLSETWSLKEGREIGVTPASQPGSIIPNSNLDYMFFKFPRMSAAMRTSNTASRQPL

SEQ ID NO: 27640 - DNA, 3784 bp, Homo sapiens
ataaacacagggcgttcatctaccccactaactggagagaaggaaaacgctgggtaaatagaatggagaggcctggctgtgatcgatcagcctcaagaaaggagacagggtaaaagggagaaagaaaaggaagacccaaagtaacccaggaaatcagcacatagaagagacgaacagcccagcacgaagcgctgactcaccgctccacgccttcctggtccttaatgattggcggctggaagcgggaagaaaagatccgtggtgccatttgattggccaacgaattgctcccttgccattggctcagagggcttttgatgaacagatccagaaaatatgtgaagcgaaacgcccaccgccccttgaggggctgttctagacctttgctcctggtgtcgtatagagcgggggatatttcaagctggagatccgttttcttgtcccagtgaacaggtgcactatgttgaaataagagtggtgacggaggccttgtttatcttgtatcttattgtaaaaggtcatcaagaacccaccttggccaatcaagagaggagtcagctggctaatcaccgggcaggcaccgcctttttcttcccgctgcctagcttgtttgctttcgaccagccaaggagacctggtggcagggttggcaatcaggaggcatgcaaagctgtcatgaggagaaaattcatgctgcaatgggaaagtcacacttttggaaaatttcattataaattttttcgtgacgtttcgtcagatgtgttctacatacttcaattagcctatgattctaccagctattattcagcaaacaatctcaatgtgttcctgatgggagagagagcatctggaaaaactattgttataaatctggctgtgttgaggtggatcaagggtgagatgtggcagaacatgatctcgtacgtcgttcacctcactgctcacgaaataaaccagatgaccaacagcagcttggctgagctaatcgccaaggactggcctgacggccaggctcccattgcagacatcctgtctgatcccaagaaactccttttcatcctcgaggacttggacaacataagattcgagttaaatgtcaatgaaagtgctttgtgtagtaacagcacccagaaagttcccattccagttctcctggtcagtttgctgaagagaaaaatggctccaggctgctggttcctcatctcctcaaggcccacacgtgggaataatgtaaaaacgttcttgaaagaggtagattgctgcacgaccttgcagctgtcgaatgggaagagggagatatattttaactctttctttaaagaccgccagagggcgtcggcagccctccagcttgtacatgaggatgaaatactcgtgggtctgtgccgagtcgccatcttatgctggatcacgtgtactgtcctgaagcggcagatggacaaggggcgtgacttccagctctgctgccaaacacccactgatctacatgcccactttcttgctgatgcgttgacatcagaggctggacttactgccaatcagtatcacctaggtctcctaaaacgtctgtgtttgctggctgcaggaggactgtttctgagcaccctgaatttcagtggtgaagacctcagatgtgttgggtttactgaggctgatgtctctgtgttgcaggccgcgaatattcttttgccgagcaacactcataaagaccgttacaagttcatacacttgaacgtccaggagttttgtacagccattgcatttctgatggcagtacccaactatctgatcccctcaggcagcagagagtataaagagaagagagaacaatactctgactttaatcaagtgtttactttcatttttggtcttctaaatgcaaacaggagaaagattcttgagacatcctttggataccagctaccgatggtagacagcttcaagtggtactcggtgggatacatgaaacatttggaccgtgacccggaaaagttgacgcaccatatgcctttgttttactgtctctatgagaatcgggaagaagaatttgtgaagacgattgtggatgctctcatggaggttacagtttaccttcaatcagacaaggatatgatggtctcattatactgtctggattactgctgtcacctgaggacacttaagttgagtgttcagcgcatctttcaaaacaaagagccacttataaggccaactgctagtcaaatgaagagccttgtctactggagagagatctgctctcttttttatacaatggagagcctccgggagctgcatatctttgacaatgaccttaatggtatttcagaaaggattctgtctaaagccctggagcattctagctgtaaacttcgcacactcaagttgtcctatgtctcgactgcttctggttttgaagacttactcaaggctttggctcgtaatcggagcctgacatacctgagtatcaactgtacgtccatttccctaaatatgttttcacttctgcatgacatcctgcacgagcccacatgccaaataagtcatctgagaatacacaggccaacgcgacggctcacgcctggaatcccaacactttgggaggccgaggcgggcagatcacctgagcttgatgaaatgtgatttgcgagccagcgaatgtgaagaaatcgcctctctcctcatcagtggcgggagtctgagaaaactgaccttatccagcaatccgctgaggagcgacgggatgaacatactgtgtgatgccttgcttcatcccaactgcactcttatatcactggtgttagtcttctgctgtctcactgaaaattgctgcagcgcccttggaagagtgcttctgttcagcccaactctaagacaactagacctgtgtgtgaatcgcttaaaaaattacggagtgttgcatgtgacgtttcccttgctgtttccaacctgtcagttagaggagcttcatctgtctggctgtttctttagcagcgatatctgtcaatatattgccatagttattgctactaatgaaaaactgaggagcctggagattgggagcaacaaaatagaagatgcaggaatgcagctgctatgtggtggtttgagacatcccaactgcatgttggtgaatattgggctagaagagtgcatgttaaccagtgcctgctgtcgatctcttgcctctgttcttaccaccaacaaaacactagaaagactcaacttgcttcaaaatcacttgggcaatgatggagttgcaaaacttcttgagagcttgatcagcccagattgtgtacttaaggtagttgggcttccattaactggcctgaacacacaaacccagcagttgctgatgactgtaaaggaaagaaaacccagtttgatctttctgtctgaaacttggtctttaaaggaaggcagagaaattggtgtgacacctgcttctcagccaggttcaataatacctaattctaatttggattacatgtttttcaaatttcccagaatgtctgcagccatgagaacgtcaaatacagcatctaggcaacccctttgatcatgttgtacgtaaacagtatttattataaattactaccgtgactgggatgcaagagaattaggactataattttcctatttgatgtgtgtgtgtgtgtgtgtgtgtgtgtgtgtgtgtgtgtgtgtgtgaccttgatccagtcaaccacttcaaattcctacactgtctcaagagtattaaaaggattatatgaagtaataaaggataaaatgcattggaaaaagc

SEQ ID NO: 27641 - protein, 654 aa, Homo sapiens
MRRKFMLQWESHTFGKFHYKFFRDVSSDVFYILQLAYDSTSYYSANNLNVFLMGERASGKTIVINLAVLRWIKGEMWQNMISYVVHLTAHEINQMTNSSLAELIAKDWPDGQAPIADILSDPKKLLFILEDLDNIRFELNVNESALCSNSTQKVPIPVLLVSLLKRKMAPGCWFLISSRPTRGNNVKTFLKEVDCCTTLQLSNGKREIYFNSFFKDRQRASAALQLVHEDEILVGLCRVAILCWITCTVLKRQMDKGRDFQLCCQTPTDLHAHFLADALTSEAGLTANQYHLGLLKRLCLLAAGGLFLSTLNFSGEDLRCVGFTEADVSVLQAANILLPSNTHKDRYKFIHLNVQEFCTAIAFLMAVPNYLIPSGSREYKEKREQYSDFNQVFTFIFGLLNANRRKILETSFGYQLPMVDSFKWYSVGYMKHLDRDPEKLTHHMPLFYCLYENREEEFVKTIVDALMEVTVYLQSDKDMMVSLYCLDYCCHLRTLKLSVQRIFQNKEPLIRPTASQMKSLVYWREICSLFYTMESLRELHIFDNDLNGISERILSKALEHSSCKLRTLKLSYVSTASGFEDLLKALARNRSLTYLSINCTSISLNMFSLLHDILHEPTCQISHLRIHRPTRRLTPGIPTLWEAEAGRSPELDEM

SEQ ID NO: 27642 - DNA, 3349 bp, Homo sapiens
ggagaagctggagaacatagacagggatgaggttttatttatttattgttcctggtcactgtctctttgaggattggtatctctgctccagaaaagatggcagcctctttcttctctgattttggtcttatgtggtatctggaggagctcaaaaaggaggagttcaggaaatttaaagaacatctcaagcaaatgactttgcagcttgaactcaagcagattccctggactgaggtcaaaaaagcatcccgggaagaacttgcaaacctcttgatcaagcactatgaagaacaacaagcttggaacataaccttaagaatctttcaaaagatggatagaaaggatctctgcatgaaggtcatgagggagagaacaggatacacaaagacctatcaagctcacgcaaagcagaaattcagccgcttatggtccagcaagtctgtcactgagattcacctatactttgaggaggaagtcaagcaagaagaatgtgaccatttggaccgcctttttgctcccaaggaagctgggaaacagccacgtacagtgatcattcaaggaccacaaggaattggaaaaacgacactcctgatgaagctgatgatggcctggtcggacaacaagatctttcgggataggttcctgtacacgttctatttctgctgcagagaactgagggagttgccgccaacgagtttggctgacttgatttccagagagtggcctgaccccgctgctcctataacagagatcgtgtctcaaccggagagactcttgttcgtcatcgacagcttcgaagagctgcagggcggcttgaacgaacccgattcggatctgtgtggtgacttgatggagaaacggccggtgcaggtgcttctgagcagtttgctgaggaagaagatgctcccggaggcctccctgctcatcgctatcaaacccgtgtgcccgaaggagctccgggatcaggtgacgatctcagaaatctaccagccccggggattcaacgagagtgataggttagtgtatttctgctgtttcttcaaagacccgaaaagagccatggaagccttcaatcttgtaagagaaagtgaacagctgttttccatatgccaaatcccgctcctctgctggatcctgtgtaccagtctgaagcaagagatgcagaaaggaaaagacctggccctgacctgccagagcactacctctgtgtactcctctttcgtctttaacctgttcacacctgagggtgccgagggcccgactccgcaaacccagcaccagctgaaggccctgtgctccctggctgcagagggtatgtggacagacacatttgagttttgtgaagacgacctccggagaaatggggttgttgacgctgacatccctgcgctgctgggcaccaagatacttctgaagtacggggagcgtgagagctcctacgtgttcctccacgtgtgtatccaggagttctgtgccgccttgttctatttgctcaagagccaccttgatcatcctcacccagctgtgagatgtgtacaggaattgctagttgccaattttgaaaaagcaaggagagcacattggatttttttggggtgttttctaactggccttttaaataaaaaggaacaagaaaaactggatgcgttttttggcttccaactgtcccaagagataaagcagcaaattcaccagtgcctgaagagcttaggggagcgtggcaatcctcagggacaggtggattccttggcgatattttactgtctctttgaaatgcaggatcctgcctttgtgaagcaggcagtgaacctcctccaagaagctaactttcatattattgacaacgtggacttggtggtttctgcctactgcttaaaatactgctccagcttgaggaaactctgtttttccgttcaaaatgtctttaagaaagaggatgaacacagctctacgtcggattacagcctcatctgttggcatcacatctgctctgtgctcaccaccagcgggcacctcagagagctccaggtgcaggacagcaccctcagcgagtcgacctttgtgacctggtgtaaccagctgaggcatcccagctgtcgccttcagaagcttggaataaataacgtttccttttctggccagagtgttctgctctttgaggtgctcttttatcagccagacttgaaatacctgagcttcaccctcacgaaactctctcgtgatgacatcaggtccctctgtgatgccttgaactacccagcaggcaacgtcaaagagctagcgctggtaaattgtcacctctcacccattgattgtgaagtccttgctggccttctaaccaacaacaagaagctgacgtatctgaatgtatcctgcaaccagttagacacaggcgtgccccttttgtgtgaagccctgtgcagcccagacacggtcctggtatacctgatgttggctttctgccacctcagcgagcagtgctgcgaatacatctctgaaatgcttctgcgtaacaagagcgtgcgctatctagacctcagtgccaatgtcctgaaggacgaaggactgaaaactctctgcgaggccttgaaacatccggactgctgcctggattcactgtgtttggtaaaatgttttatcactgctgctggctgtgaagacctcgcctctgctctcatcagcaatcaaaacctgaagattctgcaaattgggtgcaatgaaatcggagatgtgggtgtgcagctgttgtgtcgggctctgacgcatacggattgccgcttagagattcttgggttggaagaatgtgggttaacgagcacctgctgtaaggatctcgcgtctgttctcacctgcagtaagaccctgcagcagctcaacctgaccttgaacaccttggaccacacaggggtggttgtactctgtgaggccctgagacacccagagtgtgccctgcaggtgctcgggctgagaaaaactgattttgatgaggaaacccaggcacttctgacggctgaggaagagagaaatcctaacctgaccatcacagacgactgtgacacaatcacaagggtagagatctgattgcgaggaacctgggctctgactcgaacacctgcaaaggacagggactgggaccgttacttacatgacactgcacccaggagatacaaatcattgatactctgagttgtgagatttctggcaccccattcatagatttgatatgatacacgtggtttttatgtgctctgtggccttggatgagtcactgaaaggccttcatggtctctcggtctcacaaggacctcttaacccctcaataaagtgttacatttctaaacattggaaa

SEQ ID NO: 27643 - protein, 994 aa, Homo sapiens
MAASFFSDFGLMWYLEELKKEEFRKFKEHLKQMTLQLELKQIPWTEVKKASREELANLLIKHYEEQQAWNITLRIFQKMDRKDLCMKVMRERTGYTKTYQAHAKQKFSRLWSSKSVTEIHLYFEEEVKQEECDHLDRLFAPKEAGKQPRTVIIQGPQGIGKTTLLMKLMMAWSDNKIFRDRFLYTFYFCCRELRELPPTSLADLISREWPDPAAPITEIVSQPERLLFVIDSFEELQGGLNEPDSDLCGDLMEKRPVQVLLSSLLRKKMLPEASLLIAIKPVCPKELRDQVTISEIYQPRGFNESDRLVYFCCFFKDPKRAMEAFNLVRESEQLFSICQIPLLCWILCTSLKQEMQKGKDLALTCQSTTSVYSSFVFNLFTPEGAEGPTPQTQHQLKALCSLAAEGMWTDTFEFCEDDLRRNGVVDADIPALLGTKILLKYGERESSYVFLHVCIQEFCAALFYLLKSHLDHPHPAVRCVQELLVANFEKARRAHWIFLGCFLTGLLNKKEQEKLDAFFGFQLSQEIKQQIHQCLKSLGERGNPQGQVDSLAIFYCLFEMQDPAFVKQAVNLLQEANFHIIDNVDLVVSAYCLKYCSSLRKLCFSVQNVFKKEDEHSSTSDYSLICWHHICSVLTTSGHLRELQVQDSTLSESTFVTWCNQLRHPSCRLQKLGINNVSFSGQSVLLFEVLFYQPDLKYLSFTLTKLSRDDIRSLCDALNYPAGNVKELALVNCHLSPIDCEVLAGLLTNNKKLTYLNVSCNQLDTGVPLLCEALCSPDTVLVYLMLAFCHLSEQCCEYISEMLLRNKSVRYLDLSANVLKDEGLKTLCEALKHPDCCLDSLCLVKCFITAAGCEDLASALISNQNLKILQIGCNEIGDVGVQLLCRALTHTDCRLEILGLEECGLTSTCCKDLASVLTCSKTLQQLNLTLNTLDHTGVVVLCEALRHPECALQVLGLRKTDFDEETQALLTAEEERNPNLTITDDCDTITRVEI

SEQ ID NO: 27644 - DNA, 563 bp, Homo sapiens
gccatacacttcagcagagtttgcaacttctcttctaagtctttatccttcccccaaggcatgcctagcacaggactcttgaacagtgatgcctcaattagagttgctagccaatagattgaagctatgttggcacaatatcctacatcctcccgatctactggctgagcccaaccccacctaagaaggacaataaagatctgtgttcagagtcatactgaatagagacttctggactctatagaacccactgcctcctgatgaagtccctactgttcacccttgcagtttttatgctcctggcccaattggtctcaggtaattggtatgtgaaaaagtgtctaaacgacgttggaatttgcaagaagaagtgcaaacctgaagagatgcatacaaagactacaagaatttcaacagtaacagcaacaacagcaacaacaactttgatgatgactactgcttcgatgtcttcgatggctcctacccccgtttctcccactggttgaacattccagcctctgtctcctgctctaggatccccgactcattaaagcaaagaggct

SEQ ID NO: 27645 - protein, 81 aa, Homo sapiens
MKSLLFTLAVFMLLAQLVSGNWYVKKCLNDVGICKKKCKPEEMHTKTTRISTVTATTATTTLMMTTASMSSMAPTPVSPTG

SEQ ID NO: 27646 - DNA, 654 bp, Homo sapiens
ccatacacttcagcagagtttgcaacttctcttctaagtctttatccttcccccaaggcatgcctagcacaggactcttgaacagtgatgcctcaattagagttgctagccaatagattgaagctatgttggcacaatatcctacatcctcccgatctactggctgagcccaaccccacctaagaaggacaataaagatctgtgttcagagtcatactgaatagagacttctggactctatagaacccactgcctcctgatgaagtccctactgttcacccttgcagtttttatgctcctggcccaattggtctcaggtaattggtatgtgaaaaagtgtctaaacgacgttggaatttgcaagaagaagtgcaaacctgaagagatgcatgtaaagaatggttgggcaatgtgcggcaaacaaagggactgctgtgttccagctgacagacgtgctaattatcctgttttctgtgtccagacaaagactacaagaatttcaacagtaacagcaacaacagcaacaacaactttgatgatgactactgcttcgatgtcttcgatggctcctacccccgtttctcccactggttgaacattccagcctctgtctcctgctctaggatccccgactcattaaagcaaagaggctta

SEQ ID NO: 27647 - protein, 111 aa, Homo sapiens; identical to SEQ ID NO: 3785

SEQ ID NO: 27648 - DNA, 514 bp, Homo sapiens
ctctgaggaaggtagcatagtgtgcagttcactggaccaaaagctttggctgcacctcttctggaaagcctggccatggggctcttcatgatcattgcaattctgctgttccagaaacccacagtaaccgaacaacttaagaagtgctggaataactatgtacaaggacattgcaggaaaatctgcagagtaaatgaagtgcctgaggcactatgtgaaaatgggagatactgttgcctcaatatcaaggaactggaagcatgtaaaaaaattacaaagccacctcgtccaaagccagcaacacttgcactgactcttcaagactatgttacaataatagaaaatttcccaagcctgaagacacagtctacataaatcaaatacaatttcgttttcacttgcttctcaacctagtctaataaactaaggtgatgagatatacatcttcttccttttggtttcttgatccttaaaatgaccttcgagcatattctaataaagtgcattgccagtt

SEQ ID NO: 27649 - protein, 99 aa, Homo sapiens; identical to SEQ ID NO: 3787

SEQ ID NO: 27650 - DNA, 282 bp, Homo sapiens; identical to SEQ ID NO: 5223

SEQ ID NO: 27651 - protein, 93 aa, Homo sapiens; identical to SEQ ID NO: 5224

SEQ ID NO: 27652 - DNA, 674 bp, Homo sapiens
caaccatgaagctcctttttcctatctttgccagcctcatgctacagtaccaggtgaacacagaatttattggcttgagacgctgtttaatgggtttggggagatgcagggatcactgcaatgtggatgaaaaagagatacagaaatgcaagatgaaaaaatgttgtgttggaccaaaagtggttaaattgattaaaaactacctgcaatatggaacaccaaatgtacttaatgaagacgtccaagaaatgctaaaacctgccaagaattctagtgctgtgatacaaagaaaacatattttatctgttctcccccaaatcaaaagcactagcttttttgctaataccaactttgtcatcattccaaatgccacccctatgaactctgccaccatcagcactatgaccccaggacagatcacatacactgctacttctaccaagagtaacaccaaagaaagcagagattctgccactgcctcgccaccaccagcaccacctccaccaaacatactgccaacaccatcactggagctagaggaagcagaagagcagtaatgtggatctttcccttaaaactccaagttcctctctatttttgctatctataaaatgacatagaactgtttcctctgtcatcagtcattcaataaacactgtttgagcacctacagt

SEQ ID NO: 27653 - protein, 183 aa, Homo sapiens; identical to SEQ ID NO: 3789

SEQ ID NO: 27654 - DNA, 2119 bp, Homo sapiens
ctccattaaaccaccaccagctccccaagccaccccttcagccatgaagttcctgctcctggtcttggcagccctcggattcctgacccaggtgatcccagccagtgcaggtgggtcaaaatgtgtgagtaacaccccaggatactgcaggacatgttgccactggggggagacagcattgttcatgtgcaacgcttccagaaaatgctgcatcagctactccttcctgccgaagcctgacctaccacagctcatcggtaaccactggcaatcaaggagaagaaacacacaaaggaaagacaagaagcaacaaacgaccgtaacatcataataaccactgctatcgcctccaccaactcagagaaatatcatttccacagttccaattcctcctacattgctgagtactagccaaggctcctctttatggggcagatatctatagccaaccccaaaacttctgtcttctatcattctgtcattcatctagtaactaatttggagtttgtatctatcttacgagaacaatcatcatgcagattcgtccacaggggatctgtcagtttgggtcctccaaatgaaaaatgtcaagacagaattggacatgcaaaagattgactgggagaacacacctctgatggacaaaggtgagacagagcagccacaggcagggagagccttcagactgcaacgctggcctgatacgtgtcaaaggagagagggatagaggaggattgaatagaaggagactaagactgcagctctaagaaagtctcagccaaacagatggggaggcccaaagcaaggcttgcccctcagaggagctcacgcagggcaggaatagccaggttctcatatcccaggggttcagactttggctgagaacagcccctggagaacatggggtgactgctaccataggtctggaagtatgaggctgtccaccaactatccccttgaagcaagttctcttgaaaggaaatctaaacagtgcacccccatggctgccacggagtataaggagggagagaaaggagctgaaagtctaggtttggccagctaggtagactgacttgtgaggtatttatttattcatttgagtaacaaagcagacagaatacatagccaccattggtagtacaccccaaaagcaaggatggcatgatgctggtgactcaaacgtgcctactcatggtgtcaaattggcataatcctcttgggaagctgtgtggaaataagcacagagaagcagaactctaattgcttaatccactaaacattacttctgggaattggctcatcataaattatccaagagaagcacaaagttatgggcacaaaggttttccatataatattatttaaaatgctgagaaaatgaaaaaatctaaatggtgaaatatatactaatgccatctataaatacaaacaaatagaatgtttatagaataatggaacataataacattattcaaaattgcatttatgctatagttgtcaaaattgtctccttatatgatacaaaactcatgaaaattatgacttttttgtttggttggaaagcagaattatgcataaatttcctcttacagttcgatgcccattagttttatataacatttatttgacacgtactgacttctatctgagaagaacaaaccaaaacactcaggcctaaataattaaaaacggtcctaaaaactagcaaaccagataagaaaagatgttaatgcccattccctaacttatgtcttagaccaaaattaattctagatggttttaaaatgacagtgtaaaagtaaagtattaaaagattgtgtggtcaaatattcaatttaagagcaaggaaattcttataaatataacaatagaggcagaactcatgtaagaataaattgattaggtggtattaaatattaagttcttatgtatgtcaaaagatatcattttgaaattcatccatcttattgggtattgcaggagttcattcctttttgtttataaatactcttccgtcatatgaatagtattcatttgtatactggtttgttgatggacatttgggttgttcccagtttatggctattacaaataaagcttctatgaacatttatgtaca

SEQ ID NO: 27655 - protein, 95 aa, Homo sapiens; identical to SEQ ID NO: 3791

SEQ ID NO: 27656 - DNA, 3549 bp, Homo sapiens
cttatacaatacaactaaaaaccggatatatacaggtaatttataaattaaacacaaaattaatttacttaatcatctccatagttaatgccagcatttctcaggatgaaggacattgatctattaaagagattagtatctctcccagatgagctgggttgtacctgaagcagggattttggtgaggactgagagtacagctggatccacctgggcgatttgtcccatgtcattgcacgacaggcagagaggaaacagggattctgagaatatgccccccaaatgcctgtactcttatctggcagaaccacagcccttagagtgtttcagagacagccagttggagttttgcgtggctgctgtgccttcgtctggtgttgtggtcccacttctcaggtcactagaagtaagagtaacaactggtaatgtgtatccagcactgaatatgcatcaggcactattccaaacacctttaaggtatagtaacttctttcatcttcaggaagactctatgaggtgggcgtgatgattattcccattttataggtggacgaatggagggacacagaggtcatttgacttgctcaaggtcacgcagctagtagaaggcagaacctggaatttttaaaaatttatttttatgattatatatattttttgagatagagtctctgtcacccaggctggagtgcagtggcgggatctcgcaccactgcaacctccgcctcccgagttcaaacgattctcttgcctcagcctcccaagtagctgggattacaggcgcccatcatcatgtccatctcattttttgtatttttaatagagacagggtttcaccatgttggccaggctgatcttgaactgttgaccacaggtgatccgcccgccttggcctcccaaagtgttgagattacaggcgtgagccgccatgcctggccaagagcctggatttaaacttggactgtctggctcattagttcttgctcttaacccctaccccatcaggccttctgccagccaggttggtgggacagcagggatttggattcaggcctgccagactctggtctttctgctgtcctgtgctgcagtagctactggaaagacacaaggagtgggagttcccgactctctttctgactggacatttgagagcggggttcctggctgccctgccctcccctctgtccatgtccatagttactgctttcacctgggcttgtccctccctcatattgaggcccagagtctgtcctgggagcttagtgaagggtgtgaatttcaccctcggtctagtgtcacattataaggcagtcagagggtggagctggggtctggccctcctctcattaatggtgcactcccgggaacctggcctcaggccttccgggaccctcactctctccctgtcctttcctgtctacccctagtgtttcacttcaagcccactacggtggtgacaagctgccagccgaagaatccaagagaactacatagaaggcggaagttggaccctgggaagatgcatgccaaaatctggttaatgaagacctcgctcaggagcgggagggccgctctgcgagagctccgaagccgtgagaacttcctcagcaagctcaaccgggagctgatcgagaccatccaggagatggagaacagcacgaccctgcacgtgcgggccctgctgcagcagcaggacaccctggcgaccatcatcgacatcttggagtactcaaacaagaagaggctgcagcaattgaaatctgagcttcaggagtgggaagaaaagaagaaatgcaagatgagctatcttgagcagcaggcagagcagctgaatgccaagattgagaagacccaggaggaagtgaacttcctgagcacttacatggaccatgagtattccatcaagtctgtccagatctccactcttatgcgccagctgcagcaggttaaggacagccagcaggatgagctggatgacctcggtgagatgcgcagaaaggtcctggaatccttgtctgacaagattcagaagaagaagaaaaaaattctgagttctgtggtggcggtgagtagccagttgctgtgtgggagcggggatccaggtctcacccccaccccgccctcttccccatcctctgcctccaggcccactgcagccccatcggtctctaccatgttctgctgcccaggaagaggcacctgggggccagacctcttcttcctccacaggaaacccagcgtccctatgaagaggctctcctacagaagatgtgggaaagccaggacttcctgaaatgcatgcaaaggttcagagaagtgcgtgggcaaggaaggtggtggtccctgtagggaagcagtggatgggcagtccccacggcctgtgggaatgagtcaggcttctcctgatctggcgctcaggaggtctctgactctggtgttggcctccctccttgccggtgccattactgtcacttgtctttcatctgggaaggcgattggcactgacctaggccttgcctcattagccagcaatgctggctaatgacccatttacaaccatcaccaaacatcacctattcagccattaaccaccgtgcatctttaccccttgattcttgttactgcccaccacccattatcagtgttaatgaacttcaccatcactgccttcttgaattaattttcattatcttgcctcttcactggtttttaatgtgtatgcccttcactatctctgccagcctccattcattcccatgattgagcattccccgccactttgtaacctgtctccattctccatgatccctcacctgtttcagcaccactgaatattgtcactaacttggaagccagccgcaccttgcatggggaagtcccctccctggagtccagcaagtcccagtgacagaacccataccatttccccagatagctttgctcctcgttcattttggcctttctccctttggttgggggccatttgcctctcccttctcccctgctgtgcctttcctctcagattattgaccagtttgaggagaacatgcctgtattaagggccgaggtggaagagctccaagcccagacccgggaaccccgagaggtcatatttgaggatgttctgcttcggagacccaagtgcaccccagacatggatgtcatcctcaacattcctgtggaagagccactacccttctagatggcagtgccatgggccgccctcccctcctgctctcttcccagcacctggagccttggatcatttacttccaggaccggatctccattcagaccctgatctacagtctccctgctccctctgcccttcctccctctttctttccctccctccctccctcccttcttccccccttcccttccctcctccttccttcctcctctccctccctccctcctttctttcttcctgtggttttttcctctcttcttcccttctttctggttggtgctgctgggccaggtgggaatttctgattaaatctgctattccttttttaccaataaagctggatttacatttgc

SEQ ID NO: 27657 - protein, 257 aa, Homo sapiens [sequence omitted]

SEQ ID NO: 27658 - DNA, 2120 bp, Homo sapiens
attgtccccggtaaactgcagtttctggttcgagactccaatcctgtttcgaattgctgcttgctgccccttgggctggggataatggaagttctttcccttcccaactctttccagacccaagcactctgggactcactccatagtccaggagttccaggttccggattatgttccatggcagcagtccaagcaggaaaccaagccatctactctgcctccagtccaacaagccaacagccttcatacaagcaaaatgaagactttgactagggtccaaccagacctcgctcaggagcgggagggccgctctgcgagagctccgaagccgtgagaacttcctcagcaagctcaaccgggagctgatcgagaccatccaggagatggagaacagcacgaccctgcacgtgcgggccctgctgcagcagcaggacaccctggcgaccatcatcgacatcttggagtactcaaacaagaagaggctgcagcaattgaaatctgagcttcaggagtgggaagaaaagaagaaatgcaagatgagctatcttgagcagcaggcagagcagctgaatgccaagattgagaagacccaggaggaagtgaacttcctgagcacttacatggaccatgagtattccatcaagtctgtccagatctccactcttatgcgccagctgcagcaggttaaggacagccagcaggatgagctggatgacctcggtgagatgcgcagaaaggtcctggaatccttgtctgacaagattcagaagaagaagaaaaaaattctgagttctgtggtggcggaaacccagcgtccctatgaagaggctctcctacagaagatgtgggaaagccaggacttcctgaaatgcatgcaaaggttcagagaagtgcgtgggcaaggaaggtggtggtccctgtagggaagcagtggatgggcagtccccacggcctgtgggaatgagtcaggcttctcctgatctggcgctcaggaggtctctgactctggtgttggcctccctccttgccggtgccattactgtcacttgtctttcatctgggaaggcgattggcactgacctaggccttgcctcattagccagcaatgctggctaatgacccatttacaaccatcaccaaacatcacctattcagccattaaccaccgtgcatctttaccccttgattcttgttactgcccaccacccattatcagtgttaatgaacttcaccatcactgccttcttgaattaattttcattatcttgcctcttcactggtttttaatgtgtatgcccttcactatctctgccagcctccattcattcccatgattgagcattccccgccactttgtaacctgtctccattctccatgatccctcacctgtttcagcaccactgaatattgtcactaacttggaagccagccgcaccttgcatggggaagtcccctccctggagtccagcaagtcccagtgacagaacccataccatttccccagatagctttgctcctcgttcattttggcctttctccctttggttgggggccatttgcctctcccttctcccctgctgtgcctttcctctcagattattgaccagtttgaggagaacatgcctgtattaagggccgaggtggaagagctccaagcccagacccgggaaccccgagaggtcatatttgaggatgttctgcttcggagacccaagtgcaccccagacatggatgtcatcctcaacattcctgtggaagagccactacccttctagatggcagtgccatgggccgccctcccctcctgctctcttcccagcacctggagccttggatcatttacttccaggaccggatctccattcagaccctgatctacagtctccctgctccctctgcccttcctccctctttctttccctccctccctccctcccttcttccccccttcccttccctcctccttccttcctcctctccctccctccctcctttctttcttcctgtggttttttcctctcttcttcccttctttctggttggtgctgctgggccaggtgggaatttctgattaaatctgctattccttttttaccaataaagctggatttacatttgc

SEQ ID NO: 27659 - protein, 179 aa, Homo sapiens
MENSTTLHVRALLQQQDTLATIIDILEYSNKKRLQQLKSELQEWEEKKKCKMSYLEQQAEQLNAKIEKTQEEVNFLSTYMDHEYSIKSVQISTLMRQLQQVKDSQQDELDDLGEMRRKVLESLSDKIQKKKKKILSSVVAETQRPYEEALLQKMWESQDFLKCMQRFREVRGQGRWWSL

SEQ ID NO: 27660 - DNA, 2259 bp, Homo sapiens
cgccccactcccgcggggctattgtccccggtaaactgcagtttctggttcgagactccaatcctgtttcgaattgctgcttgctgccccttgggctggggataatggaagttctttcccttcccaactctttccagacccaagcactctgggactcactccatagtccaggagttccaggttccggattatgttccatggcagcagtccaagcaggaaaccaagccatctactctgcctccagtccaacaagccaacagccttcatacaagcaaaatgaagactttgactagggtccaaccagtgtttcacttcaagcccactacggtggtgacaagctgccagccgaagaatccaagagaactacatagaaggcggaagttggaccctgggaagatgcatgccaaaatctggttaatgaagacctcgctcaggagcgggagggccgctctgcgagagctccgaagccgtgagaacttcctcagcaagctcaaccgggagctgatcgagaccatccaggagatggagaacagcacgaccctgcacgtgcgggccctgctgcagcagcaggacaccctggcgaccatcatcgacatcttggagtactcaaacaagaagaggctgcagcaattgaaatctgagcttcaggagtgggaagaaaagaagaaatgcaagatgagctatcttgagcagcaggcagagcagctgaatgccaagattgagaagacccaggaggaagtgaacttcctgagcacttacatggaccatgagtattccatcaagtctgtccagatctccactcttatgcgccagctgcagcaggttaaggacagccagcaggatgagctggatgacctcggtgagatgcgcagaaaggtcctggaatccttgtctgacaagattcagaagaagaagaaaaaaattctgagttctgtggtggcggaaacccagcgtccctatgaagaggctctcctacagaagatgtgggaaagccaggacttcctgaaatgcatgcaaaggttcagagaagtgcgtgggcaaggaaggtggtggtccctgtagggaagcagtggatgggcagtccccacggcctgtgggaatgagtcaggcttctcctgatctggcgctcaggaggtctctgactctggtgttggcctccctccttgccggtgccattactgtcacttgtctttcatctgggaaggcgattggcactgacctaggccttgcctcattagccagcaatgctggctaatgacccatttacaaccatcaccaaacatcacctattcagccattaaccaccgtgcatctttaccccttgattcttgttactgcccaccacccattatcagtgttaatgaacttcaccatcactgccttcttgaattaattttcattatcttgcctcttcactggtttttaatgtgtatgcccttcactatctctgccagcctccattcattcccatgattgagcattccccgccactttgtaacctgtctccattctccatgatccctcacctgtttcagcaccactgaatattgtcactaacttggaagccagccgcaccttgcatggggaagtcccctccctggagtccagcaagtcccagtgacagaacccataccatttccccagatagctttgctcctcgttcattttggcctttctccctttggttgggggccatttgcctctcccttctcccctgctgtgcctttcctctcagattattgaccagtttgaggagaacatgcctgtattaagggccgaggtggaagagctccaagcccagacccgggaaccccgagaggtcatatttgaggatgttctgcttcggagacccaagtgcaccccagacatggatgtcatcctcaacattcctgtggaagagccactacccttctagatggcagtgccatgggccgccctcccctcctgctctcttcccagcacctggagccttggatcatttacttccaggaccggatctccattcagaccctgatctacagtctccctgctccctctgcccttcctccctctttctttccctccctccctccctcccttcttccccccttcccttccctcctccttccttcctcctctccctccctccctcctttctttcttcctgtggttttttcctctcttcttcccttctttctggttggtgctgctgggccaggtgggaatttctgattaaatctgctattccttttttaccaataaagctggatttacatttgc

SEQ ID NO: 27661 - protein, 261 aa, Homo sapiens
MKTLTRVQPVFHFKPTTVVTSCQPKNPRELHRRRKLDPGKMHAKIWLMKTSLRSGRAALRELRSRENFLSKLNRELIETIQEMENSTTLHVRALLQQQDTLATIIDILEYSNKKRLQQLKSELQEWEEKKKCKMSYLEQQAEQLNAKIEKTQEEVNFLSTYMDHEYSIKSVQISTLMRQLQQVKDSQQDELDDLGEMRRKVLESLSDKIQKKKKKILSSVVAETQRPYEEALLQKMWESQDFLKCMQRFREVRGQGRWWSL

SEQ ID NO: 27662 - DNA, 2423 bp, Homo sapiens
cgccccactcccgcggggctattgtccccggtaaactgcagtttctggttcgagactccaatcctgtttcgaattgctgcttgctgccccttgggctggggataatggaagttctttcccttcccaactctttccagacccaagcactctgggactcactccatagtccaggagttccaggttccggattatgttccatggcagcagtccaagcaggaaaccaagccatctactctgcctccagtccaacaagccaacagccttcatacaagcaaaatgaagactttgactagggtccaaccagtgtttcacttcaagcccactacggtggtgacaagctgccagccgaagaatccaagagaactacatagaaggcggaagttggaccctgggaagatgcatgccaaaatctggttaatgaagacctcgctcaggagcgggagggccgctctgcgagagctccgaagccgtgagaacttcctcagcaagctcaaccgggagctgatcgagaccatccaggagatggagaacagcacgaccctgcacgtgcgggccctgctgcagcagcaggacaccctggcgaccatcatcgacatcttggagtactcaaacaagaagaggctgcagcaattgaaatctgagcttcaggagtgggaagaaaagaagaaatgcaagatgagctatcttgagcagcaggcagagcagctgaatgccaagattgagaagacccaggaggaagtgaacttcctgagcacttacatggaccatgagtattccatcaagtctgtccagatctccactcttatgcgccagctgcagcaggttaaggacagccagcaggatgagctggatgacctcggtgagatgcgcagaaaggtcctggaatccttgtctgacaagattcagaagaagaagaaaaaaattctgagttctgtggtggcggtgagtagccagttgctgtgtgggagcggggatccaggtctcacccccaccccgccctcttccccatcctctgcctccaggcccactgcagccccatcggtctctaccatgttctgctgcccaggaagaggcacctgggggccagacctcttcttcctccacaggaaacccagcgtccctatgaagaggctctcctacagaagatgtgggaaagccaggacttcctgaaatgcatgcaaaggttcagagaagtgcgtgggcaaggaaggtggtggtccctgtagggaagcagtggatgggcagtccccacggcctgtgggaatgagtcaggcttctcctgatctggcgctcaggaggtctctgactctggtgttggcctccctccttgccggtgccattactgtcacttgtctttcatctgggaaggcgattggcactgacctaggccttgcctcattagccagcaatgctggctaatgacccatttacaaccatcaccaaacatcacctattcagccattaaccaccgtgcatctttaccccttgattcttgttactgcccaccacccattatcagtgttaatgaacttcaccatcactgccttcttgaattaattttcattatcttgcctcttcactggtttttaatgtgtatgcccttcactatctctgccagcctccattcattcccatgattgagcattccccgccactttgtaacctgtctccattctccatgatccctcacctgtttcagcaccactgaatattgtcactaacttggaagccagccgcaccttgcatggggaagtcccctccctggagtccagcaagtcccagtgacagaacccataccatttccccagatagctttgctcctcgttcattttggcctttctccctttggttgggggccatttgcctctcccttctcccctgctgtgcctttcctctcagattattgaccagtttgaggagaacatgcctgtattaagggccgaggtggaagagctccaagcccagacccgggaaccccgagaggtcatatttgaggatgttctgcttcggagacccaagtgcaccccagacatggatgtcatcctcaacattcctgtggaagagccactacccttctagatggcagtgccatgggccgccctcccctcctgctctcttcccagcacctggagccttggatcatttacttccaggaccggatctccattcagaccctgatctacagtctccctgctccctctgcccttcctccctctttctttccctccctccctccctcccttcttccccccttcccttccctcctccttccttcctcctctccctccctccctcctttctttcttcctgtggttttttcctctcttcttcccttctttctggttggtgctgctgggccaggtgggaatttctgattaaatctgctattccttttttaccaataaagctggatttacatttgc

SEQ ID NO: 27663 - protein, 297 aa, Homo sapiens
MKTLTRVQPVFHFKPTTVVTSCQPKNPRELHRRRKLDPGKMHAKIWLMKTSLRSGRAALRELRSRENFLSKLNRELIETIQEMENSTTLHVRALLQQQDTLATIIDILEYSNKKRLQQLKSELQEWEEKKKCKMSYLEQQAEQLNAKIEKTQEEVNFLSTYMDHEYSIKSVQISTLMRQLQQVKDSQQDELDDLGEMRRKVLESLSDKIQKKKKKILSSVVAVSSQLLCGSGDPGLTPTPPSSPSSASRPTAAPSVSTMFCCPGRGTWGPDLFFLHRKPSVPMKRLSYRRCGKARTS

SEQ ID NO: 27664 - DNA, 1588 bp, Homo sapiens
cgagacgctggcgaaagcatcgggtctcgggacttctgagtggcctgggttaccgcgcgatctacactgagacaaggaagttggaaaagccgagtagttataccagaagatcagggtctcacagactcgcaacttctcttccattttccccaatggcgcatgtcttacaaaaacccaagcactctgggactcactccatagtccaggagttccaggttccggattatgttccatggcagcagtccaagcaggaaaccaagccatctactctgcctccagtccaacaagccaacagccttcatacaagcaaaatgaagactttgactagggtccaaccagtgtttcacttcaagcccactacggtggtgacaagctgccagccgaagaatccaagagaactacatagaaggcggaagttggaccctgggaagatgcatgccaaaatctggttaatgaagacctcgctcaggagcgggagggccgctctgcgagagctccgaagccgtgagaacttcctcagcaagctcaaccgggagctgatcgagaccatccaggagatggagaacagcacgaccctgcacgtgcgggccctgctgcagcagcaggacaccctggcgaccatcatcgacatcttggagtactcaaacaagaagaggctgcagcaattgaaatctgagcttcaggagtgggaagaaaagaagaaatgcaagatgagctatcttgagcagcaggcagagcagctgaatgccaagattgagaagacccaggaggaagtgaacttcctgagcacttacatggaccatgagtattccatcaagtctgtccagatctccactcttatgcgccagctgcagcaggttaaggacagccagcaggatgagctggatgacctcggtgagatgcgcagaaaggtcctggaatccttgtctgacaagattcagaagaagaagaaaaaaattctgagttctgtggtggcggaaacccagcgtccctatgaagaggctctcctacagaagatgtgggaaagccaggacttcctgaaatgcatgcaaaggttcagagaaattattgaccagtttgaggagaacatgcctgtattaagggccgaggtggaagagctccaagcccagacccgggaaccccgagaggtcatatttgaggatgttctgcttcggagacccaagtgcaccccagacatggatgtcatcctcaacattcctgtggaagagccactacccttctagatggcagtgccatgggccgccctcccctcctgctctcttcccagcacctggagccttggatcatttacttccaggaccggatctccattcagaccctgatctacagtctccctgctccctctgcccttcctccctctttctttccctccctccctccctcccttcttccccccttcccttccctcctccttccttcctcctctccctccctccctcctttctttcttcctgtggttttttcctctcttcttcccttctttctggttggtgctgctgggccaggtgggaatttctgattaaatctgctattccttttttaccaataaagctggatttacatttgc

SEQ ID NO: 27665 - protein, 363 aa, Homo sapiens
MAHVLQKPKHSGTHSIVQEFQVPDYVPWQQSKQETKPSTLPPVQQANSLHTSKMKTLTRVQPVFHFKPTTVVTSCQPKNPRELHRRRKLDPGKMHAKIWLMKTSLRSGRAALRELRSRENFLSKLNRELIETIQEMENSTTLHVRALLQQQDTLATIIDILEYSNKKRLQQLKSELQEWEEKKKCKMSYLEQQAEQLNAKIEKTQEEVNFLSTYMDHEYSIKSVQISTLMRQLQQVKDSQQDELDDLGEMRRKVLESLSDKIQKKKKKILSSVVAETQRPYEEALLQKMWESQDFLKCMQRFREIIDQFEENMPVLRAEVEELQAQTREPREVIFEDVLLRRPKCTPDMDVILNIPVEEPLPF

SEQ ID NO: 27666 - DNA, 1703 bp, Homo sapiens
cgggggcgggcgtctggcggggccggggcggcgggtccacgggctttcgggggctcaggccgggcagggcgcagcgccgcctctctgctcttccctccgcccgcagacctcgctcaggagcgggagggccgctctgcgagagctccgaagccgtgagaacttcctcagcaagctcaaccgggagctgatcgagaccatccaggagatggagaacagcacgaccctgcacgtgcgggccctgctgcagcagcaggacaccctggcgaccatcatcgacatcttggagtactcaaacaagaagaggctgcagcaattgaaatctgagcttcaggagtgggaagaaaagaagaaatgcaagatgagctatcttgagcagcaggcagagcagctgaatgccaagattgagaagacccaggaggaagtgaacttcctgagcacttacatggaccatgagtattccatcaagtctgtccagatctccactcttatgcgccagctgcagcaggttaaggacagccagcaggatgagctggatgacctcggtgagatgcgcagaaaggtcctggaatccttgtctgacaagattcagaagaagaagaaaaaaattctgagttctgtggtggcggtgagtagccagttgctgtgtgggagcggggatccaggtctcacccccaccccgccctcttccccatcctctgcctccaggcccactgcagccccatcggtctctaccatgttctgctgcccaggaagaggcacctgggggccagacctcttcttcctccacaggaaacccagcgtccctatgaagaggctctcctacagaagatgtgggaaagccaggacttcctgaaatgcatgcaaaggttcagagaagtgcgtgggcaaggaaggtggtggtccctgtagggaagcagtggatgggcagtccccacggcctgtgggaatgagtcaggcttctcctgatctggcgctcaggaggtctctgactctggtgttggcctccctccttgccggtgccattactgtcacttgtctttcatctgggaaggcgattggcactgacctaggccttgcctcattagccagcaatgctggctaatgacccatttacaaccatcaccaaacatcacctattcagccattaaccaccgtgcatctttaccccttgattcttgttactgcccaccacccattatcagtgttaatgaacttcaccatcactgccttcttgaattaattttcattatcttgcctcttcactggtttttaatgtgtatgcccttcactatctctgccagcctccattcattcccatgattgagcattccccgccactttgtaacctgtctccattctccatgatccctcacctgtttcagcaccactgaatattgtcactaacttggaagccagccgcaccttgcatggggaagtcccctccctggagtccagcaagtcccagtgacagaacccataccatttccccagatagctttgctcctcgttcattttggcctttctccctttggttgggggccatttgcctctcccttctcccctgctgtgcctttcctctcagattattgaccagtttgaggagaacatgcctgtattaagggccgaggtggaagagctccaagcccagacccgggaaccccgagaggtcatatttgaggatgttctgcttcggagacccaagt

SEQ ID NO: 27667 - protein, 215 aa, Homo sapiens
MENSTTLHVRALLQQQDTLATIIDILEYSNKKRLQQLKSELQEWEEKKKCKMSYLEQQAEQLNAKIEKTQEEVNFLSTYMDHEYSIKSVQISTLMRQLQQVKDSQQDELDDLGEMRRKVLESLSDKIQKKKKKILSSVVAVSSQLLCGSGDPGLTPTPPSSPSSASRPTAAPSVSTMFCCPGRGTWGPDLFFLHRKPSVPMKRLSYRRCGKARTS

SEQ ID NO: 27668 - DNA, 1579 bp, Homo sapiens
atcctgtttcgaattgctgcttgctgccccttgggctggggataatggaagttctttcccttcccaactctttccagacccaagcactctgggactcactccatagtccaggagttccaggttccggattatgttccatggcagcagtccaagcaggaaaccaagccatctactctgcctccagtccaacaagccaacagccttcatacaagcaaaatgaagactttgactagggtccaaccaggtgggcggaggcacctgggagctggtgtgggggttggagacaggatagagtggctgcttttggctcttggtgacaccacttatattagggtaggctaactgatgtaataaacaatgcccaaattgcaagtattgatatagaagtttatatctcatttatgccacagtacatttgtggatctgaggaaggagggattctgttccacatggtcattcagggatccaggttcctttgaccttgtgggtctgatattttgtaaggtcttgaagtcttctgctggatacttttgcatccagctggcatagagggaagagagagaacaagaacatggacaattatgtgggcattttttttggggggggtccagatttgaagtgacaaatgttactcctactcatgtttcaggggccataatttagccacatgacctctgctaaccacaagggaaggtgggaaatgtagtccatctgtttttccaggaggaaaagaaaacaaggtttggtgaaatcgtagaataaactctgccacatcattatcatgctttacaggggagttccgaggccttgggtcaggctcaggcagacatggggtcagattttggctctgccatttactcacttggaaaaatcattcatctctctgagccttggttttctcatttgtgaaatggggacactaataccacctaggattgttgtgagaattaataacaaatattttgtaatatttctttggtatcctgaaatgaacttcatagacaatctagcatacttatgtatacatctatgtataaaatcactcataccacctcattgcctctgagtaagtaatgttagatcagctcccctgtgggcaacactgaaacacagaaaggagatgggagagtagaatgccaagttgccctgcatctcactaccttattttacctcactgatgctgggtggggatagaggctcaggctcccaccaggctctactgacataggtaggctgggggaggggagtgaagcccagaggtgatgagtcccacctcatgacacttcatgaaatcttgtcactgctagactctgttgacactaccctagagagagagtcagagcactgtcttctgccaggtgggggttagaagatgacctccccactcatccctgccagcactatcccagttggggaatcagcaccaccaagcagggaatgaaggatcagctacctgctggacactgccaacacttcccagtgaggaaaagggaataaatccataccaatattcccaatgggtttttcagaaagtggaaaaacaattcagtggaggaagaaagccttttccatgggtggc

SEQ ID NO: 27669 - protein, 62 aa, Homo sapiens
MEVLSLPNSFQTQALWDSLHSPGVPGSGLCSMAAVQAGNQAIYSASSPTSQQPSYKQNEDFD

SEQ ID NO: 27670 - DNA, 3357 bp, Homo sapiens
ttttagcaatacaaaagataaatatttattcagaacaaaacttttaacaatcaattttacattctaagccacaaggaaatagcaaaacatatagcaaaggaaaagcaaacactaaaagaaaagcagtgtactgtcttttctactggataacacttagttggcccatgacctctcgcttggcctatctcccaagtacattttagagttaacagctcactcataattttgggttaaaatccatctttctcctgagaatcaggagttgcacatgagctccagctagctgcttctctagggttcgtagctattgaggctaaggtgcaaatgtaaacctttggtaggtttctttacacaggggcacccccatttctcactggtggcaatgaatggggaaggggtagggcctccaaaggacctggcacactgtaatccagaagtggtgccccagggagcaacgaatgcaccctggagtgtggtccttggtccgttccgtatctcccaagtattcagaagcccctccttaaaaaccttctctttctgctccctcctccaggtgatttctcagcattcctctgggctgatcattctggagagatcagactttctgggccctcaagtgttgaggaaattgttgtgaagtgtgagaggtagtggaatgagcaccgggcttggggtcaggggactctactataggctggctctggcaccagacagctatgtgattttcacccagtcatttaacctctttgggcctgtttcatctgctggaaaaccagggaattggtccaaaccaactctcaggttctttccagcaggaatattctagattccatgattctataaaaaatggcttctgagccaccaaaagagctgtcatgaagtccatgcatctttgtgccataagagaggcccttggccaccattcagagcttattgattcagattatatacacttctaacaacactggtttcacaaattctcagaccacgtagattaaaagcagcaaattaaatgagggaggggaagagctgcaaaaggtagacactctgatagaagccacagtcaacaatgttttcaattcagcaaacactgatggagtgcctaccacgtgttgggccccgtacctagtgctggggcataaagatgagcaaggcagcccaaagggtgaaaatccaggggaagaaaaggtatggggcggggagggcgggaggggggcaaggagagagagaaaaagtacaagaaacaaaacaaatacccaatagaaaaacgaaaataaaattttaaaagggaggggcaacacatctgcacgctacagttctccgcagtcgttattggtgacagagtcaccaattcagaacaggctgaaatggagtaaactcggtttaagaaggcatagagagatgtctcttgtaggttttaaaaagatctccttcaaaaacgataaaaaatggtttaaaaaaaagttttggcacttaagagggataagctggctgtgtgttcaccctggcaggcaggcgggtgtttagtgcccggccacgccggttagctgagctgccacggaattgtgcactgctttgggacactgggcaaaggcgtgtcctcgcttgccacagaggttgcacacgatgcccttccggcagtaagggctcaggtgcccctcctccccgcacctgaagcacctgtcctgcgtgcagctgccgctcatgtgggtccgggaaccacatttaaagcatgtcttgggctgccccttgtaccagctgtagcccctctcggcccccaggaagaaggcccctggcaagtgcctgaccccgccctccccctggcgcagctcgatctcgcatttgtactccccggtccagatcccaaacctgtcggtcactttcaccggcacggccagcacgtcgcagtggcgcttgagccaagtcacaatgtcctccacgtccaccgtctcgttccggaagaggatgaagagcgtcttcaagctggacttgctccgccccagcaccacaaagttctcccagcagtcctcctgctcccgcttctcctcgtagacgcgtaggaacagggccagcttctccgctgagcggaagctcacgtcgaattcgcggctgcccgggatctggatgaccgcgtagatgtcgctcgggtccatgccgatggagcgcaggataagcgctcctaccacgaagtcccgggtcgggcaggcgccctcgtctccctggaaacagatgcggacgaggaagcgacccttgcccgggcctgccgccgccgccgccggctcatcctggaggggccgctcggccgcgtcctcggcctcgccgggcctggccggggtcgccatggcggccgccgccgcctcggccttcttcctcctgcccgcctccgcagcgcccttctttttgcgggggtccaccgcctcgccggccggatctctccgacggcccttcggatccccgcggccagccggtgggaagtcgccgaggtccggcgccgccaggcccgcggggccgccgagcccggcgctccctccaccgccgccgctttcctcctcccgccgcggcggccgcggctcgcggaattcgcccttcttctcggctagattcttcaccacctgggcccagcccatcttctcgcggccgccgtcggcctcctcgccccgggccgcgggccgcgcggggggcagaagctgcggccgcccccgtttcctctcttcctccgcgccgccgccggtggccattttacctccttcccagcatcctccactcgctcccgcagccaaagggcgcccatcgcgcgcgcccgcccgccggggctgtgtgggtttggtttttttttttttttgaaatttgacgctaccctcccccgccgcgccctcaaaggtatcacatgcggcgcatattggccagcgccggctctgcgccccctgcgctgagcctctcttccgccagcgctcgctccaacctcacctccgtccgcagcgggatggggcgcccggaggcggccctttccccagcgcgggtttggcagcctccggcctcgctctcgaggatttggcgtttcgcaagcggtgctcgacgatttcatgctagcagctttgctaacggcccacagcccacaggcgggacggagttcggcaacatctctcccattttttcttttttgtaccttttctgttaaaaaagcaaaagcaatagcaaaattaaaacttagctttccgtttccccagaactgactgcaatgcgttattttttttcccacgtcggattatgcacgttttcaagaagaaaagttgaaagttttacagtgaacattttaccattaactttttatcattaaaattttactctgtcacacta

SEQ ID NO: 27671 - protein, 235 aa, Homo sapiens
MSLGSMPMERRISAPTTKSRVGQAPSSPWKQMRTRKRPLPGPAAAAAGSSWRGRSAASSASPGLAGVAMAAAAASAFFLLPASAAPFFLRGSTASPAGSLRRPFGSPRPAGGKSPRSGAARPAGPPSPALPPPPPLSSSRRGGRGSRNSPFFSARFFTTWAQPIFSRPPSASSPRAAGRAGGRSCGRPRFLSSSAPPPVAILPPSQHPPLAPAAKGRPSRAPARRGCVGLVFFFF

SEQ ID NO: 27672 - DNA, 2689 bp, Homo sapiens
gcttttttaacagaaaaggtacaaaaaagaaaaaatgggagagatgttgccgaactccgtcccgcctgtgggctgtgggccgttagcaaagctgctagcatgaaatcgtcgagcaccgcttgcgaaacgccaaatcctcgagagcgaggccggaggctgccaaacccgcgctggggaaagggccgcctccgggcgccccatcccgctgcggacggaggtgaggttggagcgagcgctggcggaagagaggctcagcgcagggggcgcagagccggcgctggccaatatgcgccgcatgtgatacctttgagggcgcggcgggggagggtagcgtcaaatttcaaaaaaaaaaaaaaaccaaacccacacagccccggcgggcgggcgcgcgcgatgggcgccctttggctgcgggagcgagtggaggatgctgggaaggaggtaaaatggccaccggcggcggcgcggaggaagagaggaaacgggggcggccgcagcttctgccccccgcgcggcccgcggcccggggcgaggaggccgacggcggccgcgagaagatgggctgggcccaggtggtgaagaatgaattcgacgtgagcttccgctcagcggagaagctggccctgttcctacgcgtctacgaggagaagcgggagcaggaggactgctgggagaactttgtggtgctggggcggagcaagtccagcttgaagacgctcttcatcctcttccggaacgagacggtggacgtggaggacattgtgacttggctcaagcgccactgcgacgtgctggccgtgccggtgaaagtgaccgacaggtttgggatctggaccggggagtacaaatgcgagatcgagctgcgccagggggagggcggggtcaggcacttgccaggggccttcttcctgggggccgagaggggctacagctggtacaaggggcagcccaagacatgctttaaatgtggttcccggacccacatgagcggcagctgcacgcaggacaggtgcttcaggtgcggggaggaggggcacctgagcccttactgccggaagggcatcgtgtgcaacctctgtggcaagcgaggacacgcctttgcccagtgtcccaaagcagtgcacaattccgtggcagctcagctaaccggcgtggccgggcactaaacacccgcctgcctgccagggtgaacacacagccagcttatccctcttaagtgccaaaacttttttttaaaccattttttatcgtttttgaaggagatctttttaaaacctacaagagacatctctctatgccttcttaaaccgagtttactccatttcagcctgttctgaattggtgactctgtcaccaataacgactgcggagaactgtagcgtgcagatgtgttgcccctcccttttaaaattttattttcgtttttctattgggtatttgttttgtttcttgtactttttctctctctccttgcccccctcccgccctccccgccccataccttttcttcccctggattttcaccctttgggctgccttgctcatctttatgccccagcactaggtacggggcccaacacgtggtaggcactccatcagtgtttgctgaattgaaaacattgttgactgtggcttctatcagagtgtctaccttttgcagctcttcccctccctcatttaatttgctgcttttaatctacgtggtctgagaatttgtgaaaccagtgttgttagaagtgtatataatctgaatcaataagctctgaatggtggccaagggcctctcttatggcacaaagatgcatggacttcatgacagctcttttggtggctcagaagccattttttatagaatcatggaatctagaatattcctgctggaaagaacctgagagttggtttggaccaattccctggttttccagcagatgaaacaggcccaaagaggttaaatgactgggtgaaaatcacatagctgtctggtgccagagccagcctatagtagagtcccctgaccccaagcccggtgctcattccactacctctcacacttcacaacaatttcctcaacacttgagggcccagaaagtctgatctctccagaatgatcagcccagaggaatgctgagaaatcacctggaggagggagcagaaagagaaggtttttaaggaggggcttctgaatacttgggagatacggaacggaccaaggaccacactccagggtgcattcgttgctccctggggcaccacttctggattacagtgtgccaggtcctttggaggccctaccccttccccattcattgccaccagtgagaaatgggggtgcccctgtgtaaagaaacctaccaaaggtttacatttgcaccttagcctcaatagctacgaaccctagagaagcagctagctggagctcatgtgcaactcctgattctcaggagaaagatggattttaacccaaaattatgagtgagctgttaactctaaaatgtacttgggagataggccaagcgagaggtcatgggccaactaagtgttatccagtagaaaagacagtacactgcttttcttttagtgtttgcttttcctttgctatatgttttgctatttccttgtggcttagaatgtaaaattgattgttaaaagttttgttctgaataaatatttatcttttgtattgctaaaa

SEQ ID NO: 27673 - protein, 239 aa, Homo sapiens
MATGGGAEEERKRGRPQLLPPARPAARGEEADGGREKMGWAQVVKNEFDVSFRSAEKLALFLRVYEEKREQEDCWENFVVLGRSKSSLKTLFILFRNETVDVEDIVTWLKRHCDVLAVPVKVTDRFGIWTGEYKCEIELRQGEGGVRHLPGAFFLGAERGYSWYKGQPKTCFKCGSRTHMSGSCTQDRCFRCGEEGHLSPYCRKGIVCNLCGKRGHAFAQCPKAVHNSVAAQLTGVAGH

SEQ ID NO: 27674 - DNA, 1511 bp, Homo sapiens
cgtggaggacattgtgacttggctcaagcgccactgcgacgtgctggccgtgccggtgaaagtgaccgacaggtttgggatctggaccggggagtacaaatgcgagatcgagctgcgccagggggagggcggggtcaggcacttgccaggggccttcttcctgggggccgagaggggctacagctggtacaaggggcagcccaagacatgctttaaatgtggttcccggacccacatgagcggcagctgcacgcaggacaggtgcttcaggtgcggggaggaggggcacctgagcccttactgccggaagggcatcgtgtgcaacctctgtggcaagcgaggacacgcctttgcccagtgtcccaaagcagtgcacaattccgtggcagctcagctaaccggcgtggccgggcactaaacacccgcctgcctgccagggtgaacacacagccagcttatccctcttaagtgccaaaacttttttttaaaccattttttatcgtttttgaaggagatctttttaaaacctacaagagacatctctctatgccttcttaaaccgagtttactccatttcagcctgttctgaattggtgactctgtcaccaataacgactgcggagaactgtagcgtgcagatgtgttgcccctcccttttaaaattttattttcgtttttctattgggtatttgttttgtttcttgtactttttctctctctccttgcccccctcccgccctccccgccccataccttttcttcccctggattttcaccctttgggctgccttgctcatctttatgccccagcactaggtacggggcccaacacgtggtaggcactccatcagtgtttgctgaattgaaaacattgttgactgtggcttctatcagagtgtctaccttttgcagctcttcccctccctcatttaatttgctgcttttaatctacgtggtctgagaatttgtgaaaccagtgttgttagaagtgtatataatttctgaatacttgggagatacggaacggaccaaggaccacactccagggtgcattcgttgctccctggggcaccacttctggattacagtgtgccaggtcctttggaggccctaccccttccccattcattgccaccagtgagaaatgggggtgcccctgtgtaaagaaacctaccaaaggtttacatttgcaccttagcctcaatagctacgaaccctagagaagcagctagctggagctcatgtgcaactcctgattctcaggagaaagatggattttaacccaaaattatgagtgagctgttaactctaaaatgtacttgggagataggccaagcgagaggtcatgggccaactaagtgttatccagtagaaaagacagtacactgcttttcttttagtgtttgcttttcctttgctatatgttttgctatttccttgtggcttagaatgtaaaattgattgttaaaagttttgttctgaataaatatttatcttttgtattgctaaaa

SEQ ID NO: 27675 - protein, 83 aa, Homo sapiens
MWFPDPHERQLHAGQVLQVRGGGAPEPLLPEGHRVQPLWQARTRLCPVSQSSAQFRGSSANRRGRALNTRLPARVNTQPAYPS

SEQ ID NO: 27676 - DNA, 1458 bp, Homo sapiens
ggccgcgcgctcccggctcaccacgtgtgagccagttcgggcaccactgggcgtgtgccgcccctgggggaggtcaccttcacggcgtcgtgagcatgggcgatgggagggggcgctgaggcctcgcccttgggaagcaggagctgggaggtgcccggattagggtctttaagacatttatgcagtgtgtgattctttctaaaacaactccctggaagagaggacatttaattcaacaatttattggccacctactgtgcaccaggcagtgaacttggaactggggctactgggttacagcagtgaccaagacagaggtccctgttcttaaggagcaagtgagggcaacagaaaagagcagtcagctgtcatgcgagggcactcaagcagccctgtggaaagctctacgtggtgagaaactgaagcctcctgccaacaccaacaaggaactgagacctacttccaacagccatctgagtgatcgatccatcctggaatcagatcctccagccccagtcaagtcttcagatgactgcagccctgaccagcatctcaactgcaacctcgtgaatgaccctgagccagaaccatgcaactaaactctgcgtggattcatgacccacagaaactgtgagatggtagctgtttgctttgttaagcctctaagtctggaaagaatgtcttaagcagtagcagacaatgaacacaagattattattcagctgttgaattggaagaggaggggaagaaaaaattttcagatcacaaaatattcattgtgtaaaacttcaaaaattctgaaatttaaggaaaaaatatcatttgttgggaatttgttgggattcattgtctcagtgccaagagacacccactctttttttttttttgagacagagtcctgctctgttgcccaggctgaagggcagtggcacgatctcagctcaccacaacctctgcctcccgggttcaagtgattctcctccctaagcctcccaagtggctgggactacaggcatgcatcaccatgcccggctaatttttgtatttttagtagagacggggtttcactatgttggccggctgatctcaaactcttgaccccgtgatccgcccgcatcagcctcccaaagtgccgggattacaggcatgagccactgcgcccggccgagacactcactcttaacattttggtatattttttctctctgcacattttttatccagctgactttattttgtctcctgaaatcttcatttttaaattatagcttcagcatttaagaaaatgtgtctaacaaagtcttcgcaagcatacatttttcccatagttagtatacttagaatttatttgtcaagcaattttgaagggctttcactatgaaaaactttagggcttattgatattctctttaagtagaagtatgttttttattattacaaaagttatatatgtatata

SEQ ID NO: 27677 - protein, 44 aa, Homo sapiens
MSHCARPRHSLLTFWYIFSLCTFFIQLTLFCLLKSSFLNYSFSI

SEQ ID NO: 27678 - DNA, 1399 bp, Homo sapiens
aggggttggaggaagggtaggggacgcgagcctgcttccatctgacgctggacgcttgtccctgccccgcgttgccttttaaattttagctcattccgagacacctgccgtcagacatttatgcagtgtgtgattctttctaaaacaactccctggaagagaggacatttaattcaacaatttattggccacctactgtgcaccaggcagtgaacttggaactggggctactgggttacagcagtgaccaagacagaggtccctgttcttaaggagcaagtgagggcaacagaaaagagcagtcagctgtcatgcgagggcactcaagcagccctgtggaaagctctacgtggtgagaaactgaagcctcctgccaacaccaacaaggaactgagacctacttccaacagccatctgagtgatcgatccatcctggaatcagatcctccagccccagtcaagtcttcagatgactgcagccctgaccagcatctcaactgcaacctcgtgaatgaccctgagccagaaccatgcaactaaactctgcgtggattcatgacccacagaaactgtgagatggtagctgtttgctttgttaagcctctaagtctggaaagaatgtcttaagcagtagcagacaatgaacacaagattattattcagctgttgaattggaagaggaggggaagaaaaaattttcagatcacaaaatattcattgtgtaaaacttcaaaaattctgaaatttaaggaaaaaatatcatttgttgggaatttgttgggattcattgtctcagtgccaagagacacccactctttttttttttttgagacagagtcctgctctgttgcccaggctgaagggcagtggcacgatctcagctcaccacaacctctgcctcccgggttcaagtgattctcctccctaagcctcccaagtggctgggactacaggcatgcatcaccatgcccggctaatttttgtatttttagtagagacggggtttcactatgttggccggctgatctcaaactcttgaccccgtgatccgcccgcatcagcctcccaaagtgccgggattacaggcatgagccactgcgcccggccgagacactcactcttaacattttggtatattttttctctctgcacattttttatccagctgactttattttgtctcctgaaatcttcatttttaaattatagcttcagcatttaagaaaatgtgtctaacaaagtcttcgcaagcatacatttttcccatagttagtatacttagaatttatttgtcaagcaattttgaagggctttcactatgaaaaactttagggcttattgatattctctttaagtagaagtatgttttttattattacaaaagttatatatgtatata

SEQ ID NO: 27679 - protein, 44 aa, Homo sapiens; identical to SEQ ID NO: 27677

SEQ ID NO: 27680 - DNA, 1410 bp, Homo sapiens
gcggagggtgcggccagcgcggtacccgccccggcgaggcgctggggaggcccgggtggggagaagaaatggggcctgggggacggtaggagcctccgtgcggagaccactgttcaaggccacagacatttatgcagtgtgtgattctttctaaaacaactccctggaagagaggacatttaattcaacaatttattggccacctactgtgcaccaggcagtgaacttggaactggggctactgggttacagcagtgaccaagacagaggtccctgttcttaaggagcaagtgagggcaacagaaaagagcagtcagctgtcatgcgagggcactcaagcagccctgtggaaagctctacgtggtgagaaactgaagcctcctgccaacaccaacaaggaactgagacctacttccaacagccatctgagtgatcgatccatcctggaatcagatcctccagccccagtcaagtcttcagatgactgcagccctgaccagcatctcaactgcaacctcgtgaatgaccctgagccagaaccatgcaactaaactctgcgtggattcatgacccacagaaactgtgagatggtagctgtttgctttgttaagcctctaagtctggaaagaatgtcttaagcagtagcagacaatgaacacaagattattattcagctgttgaattggaagaggaggggaagaaaaaattttcagatcacaaaatattcattgtgtaaaacttcaaaaattctgaaatttaaggaaaaaatatcatttgttgggaatttgttgggattcattgtctcagtgccaagagacacccactctttttttttttttgagacagagtcctgctctgttgcccaggctgaagggcagtggcacgatctcagctcaccacaacctctgcctcccgggttcaagtgattctcctccctaagcctcccaagtggctgggactacaggcatgcatcaccatgcccggctaatttttgtatttttagtagagacggggtttcactatgttggccggctgatctcaaactcttgaccccgtgatccgcccgcatcagcctcccaaagtgccgggattacaggcatgagccactgcgcccggccgagacactcactcttaacattttggtatattttttctctctgcacattttttatccagctgactttattttgtctcctgaaatcttcatttttaaattatagcttcagcatttaagaaaatgtgtctaacaaagtcttcgcaagcatacatttttcccatagttagtatacttagaatttatttgtcaagcaattttgaagggctttcactatgaaaaactttagggcttattgatattctctttaagtagaagtatgttttttattattacaaaagttatatatgtatata

SEQ ID NO: 27681 - protein, 44 aa, Homo sapiens; identical to SEQ ID NO: 27677

SEQ ID NO: 27682 - DNA, 3054 bp, Homo sapiens
cgggcggggagcggcgcgcgcgggccgcggcggagccagaggctgcaggaagagcccgcgggggcccggagggtgcgattcctcggcccccgcaaaacaatgtgtgttgtgagccaggacgcaacttgccggaggcggcgggggcgcgccgagcccgcctgagaccgcgctgacctcctcccccacccccagccgcggaggatgcggacggcccccggcggcgtctagcggccccgggcccaggcgcgatggtgcagcagcggggcgcgagggccaagcgggacggcgggccgccgcccccgggacccgggccggccgaggagggggcgcgcgagcccggctggtgcaagaccccgagcggccacatcaagaggccgatgaacgcattcatggtgtggtcgcagcacgaacggcggaagatcatggaccagtggcccgacatgcacaacgccgagatctccaagcgcctgggccgccgctggcagctgctgcaggactcggagaagatcccgttcgtgcgggaggcggagcggctgcggctcaagcacatggcggattacccggactacaagtaccggccgcgcaaaaagagcaagggggcgcccgccaaggcgcggccccgcccccccggtggtagcggtggcggcagccggctcaagcccgggccgcagctgcctggccgcgggggccgccgagcagcgggagggcctttggggggcggggcggcggcgcccgaggacgacgatgaagacgacgacgaggagctgctggaagtgcgcctggtcgagaccccggggcgggagctgtggaggatggtcccggcgggacgggccgctcggggacaagcggagcgcgcccaagggccgtcgggcgagggggcggccgccgccgccgccgcctccccgacaccgtcggaggacgaggagccggaggaagaggaggaggaggcggcagcggctgaggaaggtgaagaggagacggtggcgtcgggggaggagtcgctgggctttctgtccaggctgccccctggcccggccggcctggactgcagcgccctggatcgcgacccggacctgcagcctccctcgggcacgtcgcacttcgagttcccggactactgcacccccgaggttaccgagatgatcgcgggggactggcgcccgtctagcatcgcagacctggttttcacctactgagcccaccgtcagcggggcgcgcacgcccccaaaccagctgtttacatacaggaatcaggtattggggcccctcggaggccgaggctggcaccccatctcccgcgcagcctgccccctcctggacgtgcccatcccccctcagatccagacatgcccctcccccgcagacacaccccaaggcagcccaacccccaccccttccccgacacccaagcccctccccacgtcgccccctcctgcacagccaccagcagccagccccctccgatacacctcccgtcctctcctacagacctgcacccctccccccttttgcacacgcccctcctcgtggccggaggacccgccccctcctttgctccggaatctctcctccctcgcccggcccgccttctctgggttaggggggcgatgcggccgggtggcaacgcacgcgcctcctgcgcccctcccttccctggggggaggggcgcaccccttttatccccggagcgctagggcccgcccctccgctggggcccacccccttcgtgcgcatgcttaatgcttctggggaggagggggctggtcccagcggagccgcactcttcgcccgctccgggcaaaagcgggggcgagtgtagagcgatcctgggaaatcctttgatccgggagccctaggtttcctctccagccaacggggcgtcgctgccttaatgggaggagcactcggaagggttggtttgggcctgaaactctcccaagtggcatagccccttttccggtatggggtctcctacacccacgcgcaccacctctccggtcgcgtggctgcctctacagcctacctatacgtccctttttccccccaactgggaattgagaggtaaggtctttctctggaaatccagcagtagaggaagggaccacccaagaaaactaaaaaccaaggcaccttaccagtctgtctggggacaggatccctgctgcaccttccccaccccctcctgggaagtgccccctcacctcagggcacccgcaacctgggctcctccctgagcgcaccggcccttcctgtcacccaggtccaccctcagtactcaagctgcagtatacagcgggaaaaactgaggcactttggtgctaggggtttgggactgaggcgtggagagcagatgtgatggcaggaagactctcgcttttaaacatctggtttgggagagaccatcgacttggccagtgagactgagaatggattccgagtagtgatgggccgtttgcacctcggtttttccacgtgagaaatggggagaacgctgctgttaggaggaagttgtgtccagttcagggtgccctcgggagccctgtccctgttgctgtggcccctctcacgccgccatctctctgccccgccccgcccctccggcctccccacaccccccttgccctcactacctgtatctcaccggcgtgtgttcaccctcccgggtggctcacacactctcattcacacacacaaatctcaggaacaaacggtcccagagtcctccggacccctgcccagggtctctgcaggtctctgccccacgcgttcccgtcgctgacaaagccaccagctgcctcctttaagcttggtgctccggctctgggcctttcttgcgctctattttttttttttttttttttaagaaaaacaacaacaacaaaaaaagacaatgaaaaaaaaaacgtcatgtgagtgaagagatgtcactgtctgtggtcttggagaactagtctcgtagctgaggggtggggtccctctgtctggggcactggcacccacagcaggactccgccagtctgatgccaggactgaataaagtgtatttgccccgac

SEQ ID NO: 27683 - protein, 315 aa, Homo sapiens; identical to SEQ ID NO: 3797

SEQ ID NO: 27684 - DNA, 4551 bp, Homo sapiens
cgggcggggagcggcgcgcgcgggccgcggcggagccagaggctgcaggaagagcccgcgggggcccggagggtgcgattcctcggcccccgcaaaacaatgtgtgttgtgagccaggacgcaacttgccggaggcggcgggggcgcgccgagcccgcctgagaccgcgctgacctcctcccccacccccagccgcggaggatgcggacggcccccggcggcgtctagcggccccgggcccaggcgcgatggtgcagcagcggggcgcgagggccaagcgggacggcgggccgccgcccccgggacccgggccggccgaggagggggcgcgcgagcccggctggtgcaagaccccgagcggccacatcaagaggccgatgaacgcattcatggtgtggtcgcagcacgaacggcggaagatcatggaccagtggcccgacatgcacaacgccgagatctccaagcgcctgggccgccgctggcagctgctgcaggactcggagaagatcccgttcgtgcgggaggcggagcggctgcggctcaagcacatggcggattacccggactacaagtaccggccgcgcaaaaagagcaagggggcgcccgccaaggcgcggccccgcccccccggtggtagcggtggcggcagccggctcaagcccgggccgcagctgcctggccgcgggggccgccgagcagcgggagggcctttggggggcggggcggcggcgcccgaggacgacgatgaagacgacgacgaggagctgctggaagtgcgcctggtcgagaccccggggcgggagctgtggaggatggtcccggcgggacgggccgctcggggacaagcggagcgcgcccaagggccgtcgggcgagggggcggccgccgccgccgccgcctccccgacaccgtcggaggacgaggagccggaggaagaggaggaggaggcggcagcggctgaggaaggtgaagaggagacggtggcgtcgggggaggagtcgctgggctttctgtccaggctgccccctggcccggccggcctggactgcagcgccctggatcgcgacccggacctgcagcctccctcgggcacgtcgcacttcgagttcccggactactgcacccccgaggttaccgagatgatcgcgggggactggcgcccgtctagcatcgcagacctggttttcacctactgagcccaccgtcagcggggcgcgcacgcccccaaaccagctgtttacatacaggaatcaggtattggggcccctcggaggccgaggctggcaccccatctcccgcgcagcctgccccctcctggacgtgcccatcccccctcagatccagacatgcccctcccccgcagacacaccccaaggcagcccaacccccaccccttccccgacacccaagcccctccccacgtcgccccctcctgcacagccaccagcagccagccccctccgatacacctcccgtcctctcctacagacctgcacccctccccccttttgcacacgcccctcctcgtggccggaggacccgccccctcctttgctccggaatctctcctccctcgcccggcccgccttctctgggttaggggggcgatgcggccgggtggcaacgcacgcgcctcctgcgcccctcccttccctggggggaggggcgcaccccttttatccccggagcgctagggcccgcccctccgctggggcccacccccttcgtgcgcatgcttaatgcttctggggaggagggggctggtcccagcggagccgcactcttcgcccgctccgggcaaaagcgggggcgagtgtagagcgatcctgggaaatcctttgatccgggagccctaggtttcctctccagccaacggggcgtcgctgccttaatgggaggagcactcggaagggttggtttgggcctgaaactctcccaagtggcatagccccttttccggtatggggtctcctacacccacgcgcaccacctctccggtcgcgtggctgcctctacagcctacctatacgtccctttttccccccaactgggaattgagaggtaaggtctttctctggaaatccagcagtagaggaagggaccacccaagaaaactaaaaaccaaggcaccttaccagtctgtctggggacaggatccctgctgcaccttccccaccccctcctgggaagtgccccctcacctcagggcacccgcaacctgggctcctccctgagcgcaccggcccttcctgtcacccaggtccaccctcagtactcaagctgcagtatacagcgggaaaaactgaggcactttggtgctaggggtttgggactgaggcgtggagagcagatgtgatggcaggaagactctcgcttttaaacatctggtttgggagagaccatcgacttggccagtgagactgagaatggattccgagtagtgatgggccgtttgcacctcggtttttccacgtgagaaatggggagaacgctgctgttaggaggaagttgtgtccagttcagggtgccctcgggagccctgtccctgttgctgtggcccctctcacgccgccatctctctgccccgccccgcccctccggcctccccacaccccccttgccctcactacctgtatctcaccggcgtgtgttcaccctcccgggtggctcacacactctcattcacacacacaaatctcaggaacaaacggtcccagagtcctccggacccctgcccagggtctctgcaggtctctgccccacgcgttcccgtcgctgacaaagccaccagctgcctcctttaagcttggtgctccggctctgggcctttcttgcgctctattttttttttttttttttttaagaaaaacaacaacaacaaaaaaagacaatgaaaaaaaaaacgtcatgtgagtgaagagatgtcactgtctgtggtcttggagaactagtctcgtagctgaggggtggggtccctctgtctggggcactggcacccacagcaggactccgccagtctgatgccaggactgaataaagtgtatttgccccgaccttgccctgtggttctgcatgtctgtgctcttcctcaaccctccctaaacagtttgccagattcaagtccgtgtgatttgggcccgagctgggtgtcccagggcaagccaccttgcctgtctaggcctctatgtcaggactccctggccttcatgaagaatagcaaactcatccctgtagggaccaggcaggtaacatagacgagtgactctgggtggacagtggtgtcatgacccacttcaaggggcctacctcctgccagttgtgaccctgtgggaatgcagtccacagtggccaggtggccagatttttcaagaaaagctggatggatgtttctgagtcatcttaatttcaaaatgagactcatattttaaaatttctgtgggccaaatgaaacaagtatgcaggcaggtctggtccgagggggctggcttggccatgcctttctgtgcctttaatgaggactaagaagcaagattgggccacactgtctggactcaaagcccagctccaccactgagcacccgtgtgactctttccatatgtataacgtggggataataataatagctgcttcacaggatgaaatgaagtttgaggtgagaagcattcaccatggtgcccatcgtgttactccattgtcagaggaggaaacggggtcaggcaggaaagcaacttaaaggagggcctgcaagcagccagggtcagagacagggcttggttctgcttcctggtgaagcatggcttcggggtgctgcctctccctccctgtttgaatctgcagattgtgttaggcccccagctgagggcctggagtggtgggattggtcccagtgcctggcgcacattggcctgcagagtagattaactgaatgaccaaagagcaacagaagtctagtgattcttgtctttgaggttctgactggtgttttacaactgagtccaaggcttttccctcctttgtccctctgacacccctccccctaattctcatctgtcagatccagtgtattcctaagctgggacaaagcctctgttttcccagtaggagccagggctgagtgtggaaattacagtgactgcttcttctcagcttctctggttgaaagcaagctggcgaagtaagaggaggtagagttgagaaggtgtggaagatagggacagctgcccccagaactcccttcaagggaggacttccccagctatgggaagtgccatcagggtggccgcagctgcagagagccacttcacctgagaccacgcccttcctggggcagcctgtatctggtgtctgagtgaggcatggtataaacacctggtcatttcaatccaacatgggacggacactgacagacagtactcccagcaggcccaggccagccagggcttcgtcaggcctgcagcacaatttgacttcctatgcccaggcctgcttcctcttcttcctcttcttttcacaggtgcttattcctaataaacatcttgcaacccaaactc

SEQ ID NO: 27685 - protein, 315 aa, Homo sapiens; identical to SEQ ID NO: 3797

SEQ ID NO: 27686 - DNA, 4641 bp, Homo sapiens
gcggcgcgcgcgggccgcggcggagccagaggctgcaggaagagcccgcgggggcccggagggtgcgattcctcggcccccgcaaaacaatgtgtgttgtgagccaggacgcaacttgccggaggcggcgggggcgcgccgagcccgcctgagaccgcgctgaccttctccccccgccgtccgttgggcccgagcgcccagctcctcgctccccagttcgcgggggccgggccgagccgcggggcggggccgcccctccgtcgccgctgcctcctcccccacccccagccgcggaggatgcggacggcccccggcggcgtctagcggccccgggcccaggcgcgatggtgcagcagcggggcgcgagggccaagcgggacggcgggccgccgcccccgggacccgggccggccgaggagggggcgcgcgagcccggctggtgcaagaccccgagcggccacatcaagaggccgatgaacgcattcatggtgtggtcgcagcacgaacggcggaagatcatggaccagtggcccgacatgcacaacgccgagatctccaagcgcctgggccgccgctggcagctgctgcaggactcggagaagatcccgttcgtgcgggaggcggagcggctgcggctcaagcacatggcggattacccggactacaagtaccggccgcgcaaaaagagcaagggggcgcccgccaaggcgcggccccgcccccccggtggtagcggtggcggcagccggctcaagcccgggccgcagctgcctggccgcgggggccgccgagcagcgggagggcctttggggggcggggcggcggcgcccgaggacgacgatgaagacgacgacgaggagctgctggaagtgcgcctggtcgagaccccggggcgggagctgtggaggatggtcccggcgggacgggccgctcggggacaagcggagcgcgcccaagggccgtcgggcgagggggcggccgccgccgccgccgcctccccgacaccgtcggaggacgaggagccggaggaagaggaggaggaggcggcagcggctgaggaaggtgaagaggagacggtggcgtcgggggaggagtcgctgggctttctgtccaggctgccccctggcccggccggcctggactgcagcgccctggatcgcgacccggacctgcagcctccctcgggcacgtcgcacttcgagttcccggactactgcacccccgaggttaccgagatgatcgcgggggactggcgcccgtctagcatcgcagacctggttttcacctactgagcccaccgtcagcggggcgcgcacgcccccaaaccagctgtttacatacaggaatcaggtattggggcccctcggaggccgaggctggcaccccatctcccgcgcagcctgccccctcctggacgtgcccatcccccctcagatccagacatgcccctcccccgcagacacaccccaaggcagcccaacccccaccccttccccgacacccaagcccctccccacgtcgccccctcctgcacagccaccagcagccagccccctccgatacacctcccgtcctctcctacagacctgcacccctccccccttttgcacacgcccctcctcgtggccggaggacccgccccctcctttgctccggaatctctcctccctcgcccggcccgccttctctgggttaggggggcgatgcggccgggtggcaacgcacgcgcctcctgcgcccctcccttccctggggggaggggcgcaccccttttatccccggagcgctagggcccgcccctccgctggggcccacccccttcgtgcgcatgcttaatgcttctggggaggagggggctggtcccagcggagccgcactcttcgcccgctccgggcaaaagcgggggcgagtgtagagcgatcctgggaaatcctttgatccgggagccctaggtttcctctccagccaacggggcgtcgctgccttaatgggaggagcactcggaagggttggtttgggcctgaaactctcccaagtggcatagccccttttccggtatggggtctcctacacccacgcgcaccacctctccggtcgcgtggctgcctctacagcctacctatacgtccctttttccccccaactgggaattgagaggtaaggtctttctctggaaatccagcagtagaggaagggaccacccaagaaaactaaaaaccaaggcaccttaccagtctgtctggggacaggatccctgctgcaccttccccaccccctcctgggaagtgccccctcacctcagggcacccgcaacctgggctcctccctgagcgcaccggcccttcctgtcacccaggtccaccctcagtactcaagctgcagtatacagcgggaaaaactgaggcactttggtgctaggggtttgggactgaggcgtggagagcagatgtgatggcaggaagactctcgcttttaaacatctggtttgggagagaccatcgacttggccagtgagactgagaatggattccgagtagtgatgggccgtttgcacctcggtttttccacgtgagaaatggggagaacgctgctgttaggaggaagttgtgtccagttcagggtgccctcgggagccctgtccctgttgctgtggcccctctcacgccgccatctctctgccccgccccgcccctccggcctccccacaccccccttgccctcactacctgtatctcaccggcgtgtgttcaccctcccgggtggctcacacactctcattcacacacacaaatctcaggaacaaacggtcccagagtcctccggacccctgcccagggtctctgcaggtctctgccccacgcgttcccgtcgctgacaaagccaccagctgcctcctttaagcttggtgctccggctctgggcctttcttgcgctctattttttttttttttttttttaagaaaaacaacaacaacaaaaaaagacaatgaaaaaaaaaacgtcatgtgagtgaagagatgtcactgtctgtggtcttggagaactagtctcgtagctgaggggtggggtccctctgtctggggcactggcacccacagcaggactccgccagtctgatgccaggactgaataaagtgtatttgccccgaccttgccctgtggttctgcatgtctgtgctcttcctcaaccctccctaaacagtttgccagattcaagtccgtgtgatttgggcccgagctgggtgtcccagggcaagccaccttgcctgtctaggcctctatgtcaggactccctggccttcatgaagaatagcaaactcatccctgtagggaccaggcaggtaacatagacgagtgactctgggtggacagtggtgtcatgacccacttcaaggggcctacctcctgccagttgtgaccctgtgggaatgcagtccacagtggccaggtggccagatttttcaagaaaagctggatggatgtttctgagtcatcttaatttcaaaatgagactcatattttaaaatttctgtgggccaaatgaaacaagtatgcaggcaggtctggtccgagggggctggcttggccatgcctttctgtgcctttaatgaggactaagaagcaagattgggccacactgtctggactcaaagcccagctccaccactgagcacccgtgtgactctttccatatgtataacgtggggataataataatagctgcttcacaggatgaaatgaagtttgaggtgagaagcattcaccatggtgcccatcgtgttactccattgtcagaggaggaaacggggtcaggcaggaaagcaacttaaaggagggcctgcaagcagccagggtcagagacagggcttggttctgcttcctggtgaagcatggcttcggggtgctgcctctccctccctgtttgaatctgcagattgtgttaggcccccagctgagggcctggagtggtgggattggtcccagtgcctggcgcacattggcctgcagagtagattaactgaatgaccaaagagcaacagaagtctagtgattcttgtctttgaggttctgactggtgttttacaactgagtccaaggcttttccctcctttgtccctctgacacccctccccctaattctcatctgtcagatccagtgtattcctaagctgggacaaagcctctgttttcccagtaggagccagggctgagtgtggaaattacagtgactgcttcttctcagcttctctggttgaaagcaagctggcgaagtaagaggaggtagagttgagaaggtgtggaagatagggacagctgcccccagaactcccttcaagggaggacttccccagctatgggaagtgccatcagggtggccgcagctgcagagagccacttcacctgagaccacgcccttcctggggcagcctgtatctggtgtctgagtgaggcatggtataaacacctggtcatttcaatccaacatgggacggacactgacagacagtactcccagcaggcccaggccagccagggcttcgtcaggcctgcagcacaatttgacttcctatgcccaggcctgcttcctcttcttcctcttcttttcacaggtgcttattcctaataaacatcttgcaaccc

SEQ ID NO: 27687 - protein, 315 aa, Homo sapiens; identical to SEQ ID NO: 3797

SEQ ID NO: 27688 - DNA, 1784 bp, Homo sapiens
cccgcgggggcccggagggtgcgattcctcggcccccgcaaaacaatgtgtgttgtgagccaggacgcaacttgccggaggcggcgggggcgcgccgagcccgcctgagaccgcgctgaccttctccccccgccgtccgttgggcccgagcgcccagctcctcgctccccagttcgcgggggccgggccgagccgcggggcggggccgcccctccgtcgccgctgcccctccccccttttgcacacgcccctcctcgtggccggaggacccgccccctcctttgctccggaatctctcctccctcgcccggcccgccttctctgggttaggggggcgatgcggccgggtggcaacgcacgcgcctcctgcgcccctcccttccctggggggaggggcgcaccccttttatccccggagcgctagggcccgcccctccgctggggcccacccccttcgtgcgcatgcttaatgcttctggggaggagggggctggtcccagcggagccgcactcttcgcccgctccgggcaaaagcgggggcgagtgtagagcgatcctgggaaatcctttgatccgggagccctaggtttcctctccagccaacggggcgtcgctgccttaatgggaggagcactcggaagggttggtttgggcctgaaactctcccaagtggcatagccccttttccggtatggggtctcctacacccacgcgcaccacctctccggtcgcgtggctgcctctacagcctacctatacgtccctttttccccccaactgggaattgagaggtaaggtctttctctggaaatccagcagtagaggaagggaccacccaagaaaactaaaaaccaaggcaccttaccagtctgtctggggacaggatccctgctgcaccttccccaccccctcctgggaagtgccccctcacctcagggcacccgcaacctgggctcctccctgagcgcaccggcccttcctgtcacccaggtccaccctcagtactcaagctgcagtatacagcgggaaaaactgaggcactttggtgctaggggtttgggactgaggcgtggagagcagatgtgatggcaggaagactctcgcttttaaacatctggtttgggagagaccatcgacttggccagtgagactgagaatggattccgagtagtgatgggccgtttgcacctcggtttttccacgtgagaaatggggagaacgctgctgttaggaggaagttgtgtccagttcagggtgccctcgggagccctgtccctgttgctgtggcccctctcacgccgccatctctctgccccgccccgcccctccggcctccccacaccccccttgccctcactacctgtatctcaccggcgtgtgttcaccctcccgggtggctcacacactctcattcacacacacaaatctcaggaacaaacggtcccagagtcctccggacccctgcccagggtctctgcaggtctctgccccacgcgttcccgtcgctgacaaagccaccagctgcctcctttaagcttggtgctccggctctgggcctttcttgcgctctattttttttttttttttttttaagaaaaacaacaacaacaaaaaaagacaatgaaaaaaaaaacgtcatgtgagtgaagagatgtcactgtctgtggtcttggagaactagtctcgtagctgaggggtggggtccctctgtctggggcactggcacccacagcaggactccgccagtctgatgccaggactgaataaagtgtatttgccccgac

SEQ ID NO: 27689 - protein, 99 aa, Homo sapiens
MGRTLLLGGSCVQFRVPSGALSLLLWPLSRRHLSAPPRPSGLPTPPLPSLPVSHRRVFTLPGGSHTLIHTHKSQEQTVPESSGPLPRVSAGLCPTRSRR

SEQ ID NO: 27690 - DNA, 1760 bp, Homo sapiens
agggccaagcgggacggcgggccgccgcccccgggacccgggccggccgaggagggggcgcgcgagcccggctggtgcaagaccccgagcggccacatcaagaggccgatgaacgcattcatggtgtggtcgcagcacgaacggagccaccagcagccagccccctccgatacacctcccgtcctctcctacagacctgcacccctccccccttttgcacacgcccctcctcgtggccggaggacccgccccctcctttgctccggaatctctcctccctcgcccggcccgccttctctgggttaggggggcgatgcggccgggtggcaacgcacgcgcctcctgcgcccctcccttccctggggggaggggcgcaccccttttatccccggagcgctagggcccgcccctccgctggggcccacccccttcgtgcgcatgcttaatgcttctggggaggagggggctggtcccagcggagccgcactcttcgcccgctccgggcaaaagcgggggcgagtgtagagcgatcctgggaaatcctttgatccgggagccctaggtttcctctccagccaacggggcgtcgctgccttaatgggaggagcactcggaagggttggtttgggcctgaaactctcccaagtggcatagccccttttccggtatggggtctcctacacccacgcgcaccacctctccggtcgcgtggctgcctctacagcctacctatacgtccctttttccccccaactgggaattgagaggtaaggtctttctctggaaatccagcagtagaggaagggaccacccaagaaaactaaaaaccaaggcaccttaccagtctgtctggggacaggatccctgctgcaccttccccaccccctcctgggaagtgccccctcacctcagggcacccgcaacctgggctcctccctgagcgcaccggcccttcctgtcacccaggtccaccctcagtactcaagctgcagtatacagcgggaaaaactgaggcactttggtgctaggggtttgggactgaggcgtggagagcagatgtgatggcaggaagactctcgcttttaaacatctggtttgggagagaccatcgacttggccagtgagactgagaatggattccgagtagtgatgggccgtttgcacctcggtttttccacgtgagaaatggggagaacgctgctgttaggaggaagttgtgtccagttcagggtgccctcgggagccctgtccctgttgctgtggcccctctcacgccgccatctctctgccccgccccgcccctccggcctccccacaccccccttgccctcactacctgtatctcaccggcgtgtgttcaccctcccgggtggctcacacactctcattcacacacacaaatctcaggaacaaacggtcccagagtcctccggacccctgcccagggtctctgcaggtctctgccccacgcgttcccgtcgctgacaaagccaccagctgcctcctttaagcttggtgctccggctctgggcctttcttgcgctctattttttttttttttttttttaagaaaaacaacaacaacaaaaaaagacaatgaaaaaaaaaacgtcatgtgagtgaagagatgtcactgtctgtggtcttggagaactagtctcgtagctgaggggtggggtccctctgtctggggcactggcacccacagcaggactccgccagtctgatgccaggactgaataaagtgtatttgccccgac

SEQ ID NO: 27691 - protein, 65 aa, Homo sapiens
MNAFMVWSQHERSHQQPAPSDTPPVLSYRPAPLPPFAHAPPRGRRTRPLLCSGISPPSPGPPSLG

SEQ ID NO: 27692 - DNA, 3257 bp, Homo sapiens
agggccaagcgggacggcgggccgccgcccccgggacccgggccggccgaggagggggcgcgcgagcccggctggtgcaagaccccgagcggccacatcaagaggccgatgaacgcattcatggtgtggtcgcagcacgaacggagccaccagcagccagccccctccgatacacctcccgtcctctcctacagacctgcacccctccccccttttgcacacgcccctcctcgtggccggaggacccgccccctcctttgctccggaatctctcctccctcgcccggcccgccttctctgggttaggggggcgatgcggccgggtggcaacgcacgcgcctcctgcgcccctcccttccctggggggaggggcgcaccccttttatccccggagcgctagggcccgcccctccgctggggcccacccccttcgtgcgcatgcttaatgcttctggggaggagggggctggtcccagcggagccgcactcttcgcccgctccgggcaaaagcgggggcgagtgtagagcgatcctgggaaatcctttgatccgggagccctaggtttcctctccagccaacggggcgtcgctgccttaatgggaggagcactcggaagggttggtttgggcctgaaactctcccaagtggcatagccccttttccggtatggggtctcctacacccacgcgcaccacctctccggtcgcgtggctgcctctacagcctacctatacgtccctttttccccccaactgggaattgagaggtaaggtctttctctggaaatccagcagtagaggaagggaccacccaagaaaactaaaaaccaaggcaccttaccagtctgtctggggacaggatccctgctgcaccttccccaccccctcctgggaagtgccccctcacctcagggcacccgcaacctgggctcctccctgagcgcaccggcccttcctgtcacccaggtccaccctcagtactcaagctgcagtatacagcgggaaaaactgaggcactttggtgctaggggtttgggactgaggcgtggagagcagatgtgatggcaggaagactctcgcttttaaacatctggtttgggagagaccatcgacttggccagtgagactgagaatggattccgagtagtgatgggccgtttgcacctcggtttttccacgtgagaaatggggagaacgctgctgttaggaggaagttgtgtccagttcagggtgccctcgggagccctgtccctgttgctgtggcccctctcacgccgccatctctctgccccgccccgcccctccggcctccccacaccccccttgccctcactacctgtatctcaccggcgtgtgttcaccctcccgggtggctcacacactctcattcacacacacaaatctcaggaacaaacggtcccagagtcctccggacccctgcccagggtctctgcaggtctctgccccacgcgttcccgtcgctgacaaagccaccagctgcctcctttaagcttggtgctccggctctgggcctttcttgcgctctattttttttttttttttttttaagaaaaacaacaacaacaaaaaaagacaatgaaaaaaaaaacgtcatgtgagtgaagagatgtcactgtctgtggtcttggagaactagtctcgtagctgaggggtggggtccctctgtctggggcactggcacccacagcaggactccgccagtctgatgccaggactgaataaagtgtatttgccccgaccttgccctgtggttctgcatgtctgtgctcttcctcaaccctccctaaacagtttgccagattcaagtccgtgtgatttgggcccgagctgggtgtcccagggcaagccaccttgcctgtctaggcctctatgtcaggactccctggccttcatgaagaatagcaaactcatccctgtagggaccaggcaggtaacatagacgagtgactctgggtggacagtggtgtcatgacccacttcaaggggcctacctcctgccagttgtgaccctgtgggaatgcagtccacagtggccaggtggccagatttttcaagaaaagctggatggatgtttctgagtcatcttaatttcaaaatgagactcatattttaaaatttctgtgggccaaatgaaacaagtatgcaggcaggtctggtccgagggggctggcttggccatgcctttctgtgcctttaatgaggactaagaagcaagattgggccacactgtctggactcaaagcccagctccaccactgagcacccgtgtgactctttccatatgtataacgtggggataataataatagctgcttcacaggatgaaatgaagtttgaggtgagaagcattcaccatggtgcccatcgtgttactccattgtcagaggaggaaacggggtcaggcaggaaagcaacttaaaggagggcctgcaagcagccagggtcagagacagggcttggttctgcttcctggtgaagcatggcttcggggtgctgcctctccctccctgtttgaatctgcagattgtgttaggcccccagctgagggcctggagtggtgggattggtcccagtgcctggcgcacattggcctgcagagtagattaactgaatgaccaaagagcaacagaagtctagtgattcttgtctttgaggttctgactggtgttttacaactgagtccaaggcttttccctcctttgtccctctgacacccctccccctaattctcatctgtcagatccagtgtattcctaagctgggacaaagcctctgttttcccagtaggagccagggctgagtgtggaaattacagtgactgcttcttctcagcttctctggttgaaagcaagctggcgaagtaagaggaggtagagttgagaaggtgtggaagatagggacagctgcccccagaactcccttcaagggaggacttccccagctatgggaagtgccatcagggtggccgcagctgcagagagccacttcacctgagaccacgcccttcctggggcagcctgtatctggtgtctgagtgaggcatggtataaacacctggtcatttcaatccaacatgggacggacactgacagacagtactcccagcaggcccaggccagccagggcttcgtcaggcctgcagcacaatttgacttcctatgcccaggcctgcttcctcttcttcctcttcttttcacaggtgcttattcctaataaacatcttgcaacccaaactc

SEQ ID NO: 27693 - protein, 65 aa, Homo sapiens; identical to SEQ ID NO: 27691

SEQ ID NO: 27694 - DNA, 683 bp, Homo sapiens
gcggccgccgccgccgccgcctccccgacaccgtcggaggacgaggagccggaggaagaggaggaggaggcggcagcggctgaggaaggtgaagaggagacggtggcgtcgggggaggagtcgctgggctttctgtccaggctgccccctggcccggccggcctggactgcagcgccctggatcgcgacccggacctgcagcctccctcgggcacgtcgcacttcgagttcccggactaaccccccttgccctcactacctgtatctcaccggcgtgtgttcaccctcccgggtggctcacacactctcattcacacacacaaatctcaggaacaaacggtcccagagtcctccggacccctgcccagggtctctgcaggtctctgccccacgcgttcccgtcgctgacaaagccaccagctgcctcctttaagcttggtgctccggctctgggcctttcttgcgctctattttttttttttttttttttaagaaaaacaacaacaacaaaaaaagacaatgaaaaaaaaaacgtcatgtgagtgaagagatgtcactgtctgtggtcttggagaactagtctcgtagctgaggggtggggtccctctgtctggggcactggcacccacagcaggactccgccagtctgatgccaggactgaataaagtgtatttgccccgac

SEQ ID NO: 27695 - protein, 143 aa, Homo sapiens [sequence omitted]

SEQ ID NO: 27696 - DNA, 896 bp, Homo sapiens
cacaactggcaggaggtaggccccttgaagtgggtcatgacaccactgtccacccagagtcactcgtctatgttacctgcctggtccctacagggatgagtttgctattcttcatgaaggccagggagtcctgacatagaggcctagacaggcaaggtggcttgccctgggacacccagctcgggcccaaatcacacggacttgaatctggcaaactgtttagggagggttgaggaagagcacagacatgcagaaccacagggcaaggtcggggcaaatacactttattcagtcctggcatcagactggcggagtcctgctgtgggtgccagtgccccagacagagggaccccacccctcagctacgagactagttctccaagaccacagacagtgacatctcttcactcacatgacgttttttttttcattgtctttttttgttgttgttgtttttcttaaaaaaaaaaaaaaaaaaaatagagcgcaagaaaggcccagagccggagcaccaagcttaaaggaggcagctggtggctttgtcagcgacgggaacgcgtggggcagagacctgcagagaccctgggcaggggtccggaggactctgggaccgtttgttcctgagatttgtgtgtgtgaatgagagtgtgtgagccaccctccgggaactcgaagtgcgacgtgcccgagggaggctgcaggtccgggtcgcgatccagggcgctgcagtccaggccggccgggccagggggcagcctggacagaaagcccagcgactcctcccccgacgccaccgtctcctcttcaccttcctcagccgctgccgcctcctcctcctcttcctccggctcctcgtcctccgacggtgtcggggaggcggcggcggcggcggccgc

SEQ ID NO: 27697 - protein, 84 aa, Homo sapiens
MRVCEPPSGNSKCDVPEGGCRSGSRSRALQSRPAGPGGSLDRKPSDSSPDATVSSSPSSAAAASSSSSSGSSSSDGVGEAAAAA

SEQ ID NO: 27698 - DNA, 2180 bp, Homo sapiens
gcggccgccgccgccgccgcctccccgacaccgtcggaggacgaggagccggaggaagaggaggaggaggcggcagcggctgaggaaggtgaagaggagacggtggcgtcgggggaggagtcgctgggctttctgtccaggctgccccctggcccggccggcctggactgcagcgccctggatcgcgacccggacctgcagcctccctcgggcacgtcgcacttcgagttcccggactaaccccccttgccctcactacctgtatctcaccggcgtgtgttcaccctcccgggtggctcacacactctcattcacacacacaaatctcaggaacaaacggtcccagagtcctccggacccctgcccagggtctctgcaggtctctgccccacgcgttcccgtcgctgacaaagccaccagctgcctcctttaagcttggtgctccggctctgggcctttcttgcgctctattttttttttttttttttttaagaaaaacaacaacaacaaaaaaagacaatgaaaaaaaaaacgtcatgtgagtgaagagatgtcactgtctgtggtcttggagaactagtctcgtagctgaggggtggggtccctctgtctggggcactggcacccacagcaggactccgccagtctgatgccaggactgaataaagtgtatttgccccgaccttgccctgtggttctgcatgtctgtgctcttcctcaaccctccctaaacagtttgccagattcaagtccgtgtgatttgggcccgagctgggtgtcccagggcaagccaccttgcctgtctaggcctctatgtcaggactccctggccttcatgaagaatagcaaactcatccctgtagggaccaggcaggtaacatagacgagtgactctgggtggacagtggtgtcatgacccacttcaaggggcctacctcctgccagttgtgaccctgtgggaatgcagtccacagtggccaggtggccagatttttcaagaaaagctggatggatgtttctgagtcatcttaatttcaaaatgagactcatattttaaaatttctgtgggccaaatgaaacaagtatgcaggcaggtctggtccgagggggctggcttggccatgcctttctgtgcctttaatgaggactaagaagcaagattgggccacactgtctggactcaaagcccagctccaccactgagcacccgtgtgactctttccatatgtataacgtggggataataataatagctgcttcacaggatgaaatgaagtttgaggtgagaagcattcaccatggtgcccatcgtgttactccattgtcagaggaggaaacggggtcaggcaggaaagcaacttaaaggagggcctgcaagcagccagggtcagagacagggcttggttctgcttcctggtgaagcatggcttcggggtgctgcctctccctccctgtttgaatctgcagattgtgttaggcccccagctgagggcctggagtggtgggattggtcccagtgcctggcgcacattggcctgcagagtagattaactgaatgaccaaagagcaacagaagtctagtgattcttgtctttgaggttctgactggtgttttacaactgagtccaaggcttttccctcctttgtccctctgacacccctccccctaattctcatctgtcagatccagtgtattcctaagctgggacaaagcctctgttttcccagtaggagccagggctgagtgtggaaattacagtgactgcttcttctcagcttctctggttgaaagcaagctggcgaagtaagaggaggtagagttgagaaggtgtggaagatagggacagctgcccccagaactcccttcaagggaggacttccccagctatgggaagtgccatcagggtggccgcagctgcagagagccacttcacctgagaccacgcccttcctggggcagcctgtatctggtgtctgagtgaggcatggtataaacacctggtcatttcaatccaacatgggacggacactgacagacagtactcccagcaggcccaggccagccagggcttcgtcaggcctgcagcacaatttgacttcctatgcccaggcctgcttcctcttcttcctcttcttttcacaggtgcttattcctaataaacatcttgcaacccaaactc

SEQ ID NO: 27699 - protein, 86 aa, Homo sapiens [sequence omitted]

SEQ ID NO: 27700 - DNA, 1923 bp, Homo sapiens
gagacggtggcgtcgggggaggagtcgctgggctttctgtccaggctgccccctggcccggccggcctggacgtcagcggggcgcgcacgcccccaaaccagctgtttacatacaggaatcaggtattggggcccctcggaggccgaggctggcaccccatctcccgcgcagcctgccccctcctggacgtgcccatcccccctcagatccagacatgcccctcccccgcagacacaccccaaggcagcccaacccccaccccttccccgacacccaagcccctccccacgtcgccccctcctgcacagccaccagcagccagccccctccgatacacctcccgtcctctcctacagacctgcacccctccccccttttgcacacgcccctcctcgtggccggaggacccgccccctcctttgctccggaatctctcctccctcgcccggcccgccttctctgggttaggggggcgatgcggccgggtggcaacgcacgcgcctcctgcgcccctcccttccctggggggaggggcgcaccccttttatccccggagcgctagggcccgcccctccgctggggcccacccccttcgtgcgcatgcttaatgcttctggggaggagggggctggtcccagcggagccgcactcttcgcccgctccgggcaaaagcgggggcgagtgtagagcgatcctgggaaatcctttgatccgggagccctaggtttcctctccagccaacggggcgtcgctgccttaatgggaggagcactcggaagggttggtttgggcctgaaactctcccaagtggcatagccccttttccggtatggggtctcctacacccacgcgcaccacctctccggtcgcgtggctgcctctacagcctacctatacgtccctttttccccccaactgggaattgagaggtaaggtctttctctggaaatccagcagtagaggaagggaccacccaagaaaactaaaaaccaaggcaccttaccagtctgtctggggacaggatccctgctgcaccttccccaccccctcctgggaagtgccccctcacctcagggcacccgcaacctgggctcctccctgagcgcaccggcccttcctgtcacccaggtccaccctcagtactcaagctgcagtatacagcgggaaaaactgaggcactttggtgctaggggtttgggactgaggcgtggagagcagatgtgatggcaggaagactctcgcttttaaacatctggtttgggagagaccatcgacttggccagtgagactgagaatggattccgagtagtgatgggccgtttgcacctcggtttttccacgtgagaaatggggagaacgctgctgttaggaggaagttgtgtccagttcagggtgccctcgggagccctgtccctgttgctgtggcccctctcacgccgccatctctctgccccgccccgcccctccggcctccccacaccccccttgccctcactacctgtatctcaccggcgtgtgttcaccctcccgggtggctcacacactctcattcacacacacaaatctcaggaacaaacggtcccagagtcctccggacccctgcccagggtctctgcaggtctctgccccacgcgttcccgtcgctgacaaagccaccagctgcctcctttaagcttggtgctccggctctgggcctttcttgcgctctattttttttttttttttttttaagaaaaacaacaacaacaaaaaaagacaatgaaaaaaaaaacgtcatgtgagtgaagagatgtcactgtctgtggtcttggagaactagtctcgtagctgaggggtggggtccctctgtctggggcactggcacccacagcaggactccgccagtctgatgccaggactgaataaagtgtatttgccccgac

SEQ ID NO: 27701 - protein, 115 aa, Homo sapiens
MPLPRRHTPRQPNPHPFPDTQAPPHVAPSCTATSSQPPPIHLPSSPTDLHPSPLLHTPLLVAGGPAPSFAPESLLPRPARLLWVRGAMRPGGNARASCAPPFPGGRGAPLLSPER

SEQ ID NO: 27702 - DNA, 3420 bp, Homo sapiens
gagacggtggcgtcgggggaggagtcgctgggctttctgtccaggctgccccctggcccggccggcctggacgtcagcggggcgcgcacgcccccaaaccagctgtttacatacaggaatcaggtattggggcccctcggaggccgaggctggcaccccatctcccgcgcagcctgccccctcctggacgtgcccatcccccctcagatccagacatgcccctcccccgcagacacaccccaaggcagcccaacccccaccccttccccgacacccaagcccctccccacgtcgccccctcctgcacagccaccagcagccagccccctccgatacacctcccgtcctctcctacagacctgcacccctccccccttttgcacacgcccctcctcgtggccggaggacccgccccctcctttgctccggaatctctcctccctcgcccggcccgccttctctgggttaggggggcgatgcggccgggtggcaacgcacgcgcctcctgcgcccctcccttccctggggggaggggcgcaccccttttatccccggagcgctagggcccgcccctccgctggggcccacccccttcgtgcgcatgcttaatgcttctggggaggagggggctggtcccagcggagccgcactcttcgcccgctccgggcaaaagcgggggcgagtgtagagcgatcctgggaaatcctttgatccgggagccctaggtttcctctccagccaacggggcgtcgctgccttaatgggaggagcactcggaagggttggtttgggcctgaaactctcccaagtggcatagccccttttccggtatggggtctcctacacccacgcgcaccacctctccggtcgcgtggctgcctctacagcctacctatacgtccctttttccccccaactgggaattgagaggtaaggtctttctctggaaatccagcagtagaggaagggaccacccaagaaaactaaaaaccaaggcaccttaccagtctgtctggggacaggatccctgctgcaccttccccaccccctcctgggaagtgccccctcacctcagggcacccgcaacctgggctcctccctgagcgcaccggcccttcctgtcacccaggtccaccctcagtactcaagctgcagtatacagcgggaaaaactgaggcactttggtgctaggggtttgggactgaggcgtggagagcagatgtgatggcaggaagactctcgcttttaaacatctggtttgggagagaccatcgacttggccagtgagactgagaatggattccgagtagtgatgggccgtttgcacctcggtttttccacgtgagaaatggggagaacgctgctgttaggaggaagttgtgtccagttcagggtgccctcgggagccctgtccctgttgctgtggcccctctcacgccgccatctctctgccccgccccgcccctccggcctccccacaccccccttgccctcactacctgtatctcaccggcgtgtgttcaccctcccgggtggctcacacactctcattcacacacacaaatctcaggaacaaacggtcccagagtcctccggacccctgcccagggtctctgcaggtctctgccccacgcgttcccgtcgctgacaaagccaccagctgcctcctttaagcttggtgctccggctctgggcctttcttgcgctctattttttttttttttttttttaagaaaaacaacaacaacaaaaaaagacaatgaaaaaaaaaacgtcatgtgagtgaagagatgtcactgtctgtggtcttggagaactagtctcgtagctgaggggtggggtccctctgtctggggcactggcacccacagcaggactccgccagtctgatgccaggactgaataaagtgtatttgccccgaccttgccctgtggttctgcatgtctgtgctcttcctcaaccctccctaaacagtttgccagattcaagtccgtgtgatttgggcccgagctgggtgtcccagggcaagccaccttgcctgtctaggcctctatgtcaggactccctggccttcatgaagaatagcaaactcatccctgtagggaccaggcaggtaacatagacgagtgactctgggtggacagtggtgtcatgacccacttcaaggggcctacctcctgccagttgtgaccctgtgggaatgcagtccacagtggccaggtggccagatttttcaagaaaagctggatggatgtttctgagtcatcttaatttcaaaatgagactcatattttaaaatttctgtgggccaaatgaaacaagtatgcaggcaggtctggtccgagggggctggcttggccatgcctttctgtgcctttaatgaggactaagaagcaagattgggccacactgtctggactcaaagcccagctccaccactgagcacccgtgtgactctttccatatgtataacgtggggataataataatagctgcttcacaggatgaaatgaagtttgaggtgagaagcattcaccatggtgcccatcgtgttactccattgtcagaggaggaaacggggtcaggcaggaaagcaacttaaaggagggcctgcaagcagccagggtcagagacagggcttggttctgcttcctggtgaagcatggcttcggggtgctgcctctccctccctgtttgaatctgcagattgtgttaggcccccagctgagggcctggagtggtgggattggtcccagtgcctggcgcacattggcctgcagagtagattaactgaatgaccaaagagcaacagaagtctagtgattcttgtctttgaggttctgactggtgttttacaactgagtccaaggcttttccctcctttgtccctctgacacccctccccctaattctcatctgtcagatccagtgtattcctaagctgggacaaagcctctgttttcccagtaggagccagggctgagtgtggaaattacagtgactgcttcttctcagcttctctggttgaaagcaagctggcgaagtaagaggaggtagagttgagaaggtgtggaagatagggacagctgcccccagaactcccttcaagggaggacttccccagctatgggaagtgccatcagggtggccgcagctgcagagagccacttcacctgagaccacgcccttcctggggcagcctgtatctggtgtctgagtgaggcatggtataaacacctggtcatttcaatccaacatgggacggacactgacagacagtactcccagcaggcccaggccagccagggcttcgtcaggcctgcagcacaatttgacttcctatgcccaggcctgcttcctcttcttcctcttcttttcacaggtgcttattcctaataaacatcttgcaacccaaactc

SEQ ID NO: 27703 - protein, 115 aa, Homo sapiens; identical to SEQ ID NO: 27701

SEQ ID NO: 27704 - DNA, 509 bp, Homo sapiens
cgggggaggagtcgctgggctttctgtccaggctgccccctggcccggccggcctggactgcagcgccctggatcgcgacccggacctgcagcctccctcgggcacgtcgcacttcgagttcccggactactgcacccccgaggttaccgagatgatcgcgggggactggcgcccgtctagcatcgcagacctggttttcacctactgagcccaccgtcagcggggcgcgcacgcccccaaaccagctctgcctcctttaagcttggtgctccggctctgggcctttcttgcgctctattttttttttttttttttttaagaaaaacaacaacaacaaaaaaagacaatgaaaaaaaaaacgtcatgtgagtgaagagatgtcactgtctgtggtcttggagaactagtctcgtagctgaggggtggggtccctctgtctggggcactggcacccacagcaggactccgccagtctgatgccaggactgaataaagtgtatttgccccg

SEQ ID NO: 27705 - protein, 36 aa, Homo sapiens
AHRQRGAHAPKPALPPLSLVLRLWAFLALYFFFFFF

SEQ ID NO: 27706 - DNA, 1015 bp, Homo sapiens
cgcactcttcgcccgctccgggcaaaagcgggggcgagtgtagagcgatcctgggaaatcctttgatccgggagccctaggtttcctctccagccaacggggcgtcgctgccttaatgggaggagcactcggaagggttggtttgggcctgaaactctcccaagtggcatagccccttttccggtatggggtctcctacacccacgcgcaccacctctccggtcgcgtggctgcctctacagcctacctatacgtccctttttccccccaactgggaattgagaggtaaggtctttctctggaaatccagcagtagaggaagggaccacccaagaaaactaaaaaccaaggcaccttaccagtctgtctggggacaggatccctgctgcaccttccccaccccctcctgggaagtgccccctcacctcagggcacccgcaacctgggctcctccctgagcgcaccggcccttcctgtcacccaggtccaccctcagtactcaagctgcagtatacagcgggaaaaactgaggcactttggtgctaggggtttgggactgaggcgtggagagcagatgtgatggcaggaagactctcgcttttaaacatctggtttgggagagaccatcgacttggccagtgagactgagaatggattccgagtagtgatgggccgtttgcacctcggtttttccacgtgagaaatggggagaacgctgctgttaggaggaagttgtgtccagttcagggtgccctcgggagccctgtccctgttgctgtggcccctctcacgccgccatctctctgccccgccccgcccctccggcctccccacaccccccttgccctcactacctgtatctcaccggcgtgtgttcaccctcccgggtggctcacacactctcattcacacacacaaatctcaggaacaaacggtccctctgtctggggcactggcacccacagcaggactccgccagtctgatgccaggactgaataaagtgtatttgccccg

SEQ ID NO: 27707 - protein, 98 aa, Homo sapiens
MGRTLLLGGSCVQFRVPSGALSLLLWPLSRRHLSAPPRPSGLPTPPLPSLPVSHRRVFTLPGGSHTLIHTHKSQEQTVPLSGALAPTAGLRQSDARTE

SEQ ID NO: 27708 - DNA, 1073 bp, Homo sapiens
ccgggagccctaggtttcctctccagccaacggggcgtcgctgccttaatgggaggagcactcggaagggttggtttgggcctgaaactctcccaagtggcatagccccttttccggtatggggtctcctacacccacgcgcaccacctctccggtcgcgtggctgcctctacagcctacctatacgtccctttttccccccaactgggaattgagaggtaaggtctttctctggaaatccagcagtagaggaagggaccacccaagaaaactaaaaaccaaggcaccttaccagtctgtctggggacaggatccctgctgcaccttccccaccccctcctgggaagtgccccctcacctcagggcacccgcaacctgggctcctccctgagcgcaccggcccttcctgtcacccaggtccaccctcagtactcaagctgcagtatacagcgggaaaaactgaggcactttggtgctaggggtttgggactgaggcgtggagagcagatgtgatggcaggaagactctcgcttttaaacatctggtttgggagagaccatcgacttggccagtgagactgagaatggattccgagtagtgatgggccgtttgcacctcggtttttccacaccccccttgccctcactacctgtatctcaccggcgtgtgttcaccctcccgggtggctcacacactctcattcacacacacaaatctcaggaacaaacggtcccagagtcctccggacccctgcccagggtctctgcaggtctctgccccacgcgttcccgtcgctgacaaagccaccagctgcctcctttaagcttggtgctccggctctgggcctttcttgcgctctattttttttttttttttttttaagaaaaacaacaacaacaaaaaaagacaatgaaaaaaaaaacgtcatgtgagtgaagagatgtcactgtctgtggtcttggagaactagtctcgtagctgaggggtggggtccctctgtctggggcactggcacccacagcaggactccgccagtctgatgccaggactgaataaagtgtatttgccccgac

SEQ ID NO: 27709 - protein, 65 aa, Homo sapiens
MGRLHLGFSTPPLPSLPVSHRRVFTLPGGSHTLIHTHKSQEQTVPESSGPLPRVSAGLCPTRSRR

SEQ ID NO: 27710 - DNA, 2570 bp, Homo sapiens
ccgggagccctaggtttcctctccagccaacggggcgtcgctgccttaatgggaggagcactcggaagggttggtttgggcctgaaactctcccaagtggcatagccccttttccggtatggggtctcctacacccacgcgcaccacctctccggtcgcgtggctgcctctacagcctacctatacgtccctttttccccccaactgggaattgagaggtaaggtctttctctggaaatccagcagtagaggaagggaccacccaagaaaactaaaaaccaaggcaccttaccagtctgtctggggacaggatccctgctgcaccttccccaccccctcctgggaagtgccccctcacctcagggcacccgcaacctgggctcctccctgagcgcaccggcccttcctgtcacccaggtccaccctcagtactcaagctgcagtatacagcgggaaaaactgaggcactttggtgctaggggtttgggactgaggcgtggagagcagatgtgatggcaggaagactctcgcttttaaacatctggtttgggagagaccatcgacttggccagtgagactgagaatggattccgagtagtgatgggccgtttgcacctcggtttttccacaccccccttgccctcactacctgtatctcaccggcgtgtgttcaccctcccgggtggctcacacactctcattcacacacacaaatctcaggaacaaacggtcccagagtcctccggacccctgcccagggtctctgcaggtctctgccccacgcgttcccgtcgctgacaaagccaccagctgcctcctttaagcttggtgctccggctctgggcctttcttgcgctctattttttttttttttttttttaagaaaaacaacaacaacaaaaaaagacaatgaaaaaaaaaacgtcatgtgagtgaagagatgtcactgtctgtggtcttggagaactagtctcgtagctgaggggtggggtccctctgtctggggcactggcacccacagcaggactccgccagtctgatgccaggactgaataaagtgtatttgccccgaccttgccctgtggttctgcatgtctgtgctcttcctcaaccctccctaaacagtttgccagattcaagtccgtgtgatttgggcccgagctgggtgtcccagggcaagccaccttgcctgtctaggcctctatgtcaggactccctggccttcatgaagaatagcaaactcatccctgtagggaccaggcaggtaacatagacgagtgactctgggtggacagtggtgtcatgacccacttcaaggggcctacctcctgccagttgtgaccctgtgggaatgcagtccacagtggccaggtggccagatttttcaagaaaagctggatggatgtttctgagtcatcttaatttcaaaatgagactcatattttaaaatttctgtgggccaaatgaaacaagtatgcaggcaggtctggtccgagggggctggcttggccatgcctttctgtgcctttaatgaggactaagaagcaagattgggccacactgtctggactcaaagcccagctccaccactgagcacccgtgtgactctttccatatgtataacgtggggataataataatagctgcttcacaggatgaaatgaagtttgaggtgagaagcattcaccatggtgcccatcgtgttactccattgtcagaggaggaaacggggtcaggcaggaaagcaacttaaaggagggcctgcaagcagccagggtcagagacagggcttggttctgcttcctggtgaagcatggcttcggggtgctgcctctccctccctgtttgaatctgcagattgtgttaggcccccagctgagggcctggagtggtgggattggtcccagtgcctggcgcacattggcctgcagagtagattaactgaatgaccaaagagcaacagaagtctagtgattcttgtctttgaggttctgactggtgttttacaactgagtccaaggcttttccctcctttgtccctctgacacccctccccctaattctcatctgtcagatccagtgtattcctaagctgggacaaagcctctgttttcccagtaggagccagggctgagtgtggaaattacagtgactgcttcttctcagcttctctggttgaaagcaagctggcgaagtaagaggaggtagagttgagaaggtgtggaagatagggacagctgcccccagaactcccttcaagggaggacttccccagctatgggaagtgccatcagggtggccgcagctgcagagagccacttcacctgagaccacgcccttcctggggcagcctgtatctggtgtctgagtgaggcatggtataaacacctggtcatttcaatccaacatgggacggacactgacagacagtactcccagcaggcccaggccagccagggcttcgtcaggcctgcagcacaatttgacttcctatgcccaggcctgcttcctcttcttcctcttcttttcacaggtgcttattcctaataaacatcttgcaacccaaactc

SEQ ID NO: 27711 - protein, 65 aa, Homo sapiens; identical to SEQ ID NO: 27709

SEQ ID NO: 27712 - DNA, 421 bp, Homo sapiens
caggcagctgcatctgcctcccaccctgtcatgagctgtcagccttgattttgtcccacatttgctgtgtgatcttgggaaagtcattgtgcccctccaaccgtcatcaagcacccttgcacagacatgcctttgtgtcttgagcatctattctgtttctccttgtgctaggggctggggacacacagaagaatgagctcggcaagatagggccacatcttcctttttagtttttctttttctttttttttaatttttatttttttgagacagcgtctcactctgttcctgggtgacagagagagactctgagaagaaaagaaagaaagaaaaagaaaagaaaagaaaagaaagagaaagaaagaaagaaagaaaagaaagaaagaaagaaagaaaatatggtgaaaccccagctctactg

SEQ ID NO: 27713 - protein, 50 aa, Homo sapiens
DSVSLCSWVTERDSEKKRKKEKEKKRKERERKKERKERKKERKYGETPAL

SEQ ID NO: 27714 - DNA, 2743 bp, Homo sapiens
gatgttagcctgtaaaatgaactacaggaatagctacagattggaaacaacctgtggtggttttaaaatatagctacaaattctttagcactcctctgtagagaggtgggatccttgtaccctctctgaatcttgggtgagctgatgactgcttcaaccaatggagtacggtggaagtaacactctgacttctaaggtccagacataaaagtacaggcaacttctgctagaactctagctcttggagcctgaggcaccatgcctacctagggctccatgtctgcttagaggctgccatgctgtcaggatgccaagaccatcaggagaggacacatgaaggcaccacagtcccagctaagcttagctttgagtcatcccagttcaagcataaaagaagtgagtgaagaagaaccagatgaggccaggcacggtggctcacacctgtaatcccagcactttgggaggccaaggcgggtggataccctgagttcaggagttcgagaccagcctggccacatggcaaaaccccgtctctactaaaaatacaaaaatagccgggcatggtggcgtgcacctgtaatcccagctactagggaggatgaggcaggagaattgcttgaacccgggaggcagaggttgcagtgagccgacatcatgccattgcactgtagaaggcgaaggggaaggggaagaacaagatgattccagtggccagccatttgaatcagcttcagccttcaaatcttcaaatcttcctagctgaagactcaaacattgcagagtagaaacaagctggcctcactgtgtcctgcctgaattcctgacacacagaacccacaagcatattcaagtggttattgtgttataccactaggtttggggggttttgttctgtgctaacagataactgggacaccacttaaatatccatcaatggaagacgagttatgtacattatatgtctttgtggaatactatgcatccattagaaagaagaaattagtctataattatttatattaatcacacttcaagtgaagaaggatgcagtgttctgaaaagtcttgatagtatgcctccatttgaaattctcaaaaagatggcacatatagagaacttctgggaaaatagacaagaaagaggtaacagtagatgccttgggggagggtaactgatggcaagggtgggaatgaaattcactttttttttttttttttgagatggagtctcgctctgtcaccaggctggagggcagtggtgcgatctcagctcactgcaacctccgcctcccgggttcaagcgattctcctgcctcagcctccccagtagctgggactacaagcacatgccaccatgcccagctaatttttttttgtatttttacactttgggaggctgaggcaggtggatcacaaggtcaggagtttgagaccagcctgaccaacatggtgaaaccctgtctctactaaaaatacaaaaatcagccgggtgtggtggcatgcacctgtagtcccagctactccggaggctgaggcaggagaatcacttgaagctgggaggcggaggttgcagtgagccaagatcgtgccactgcaccgtagcctgggtgataagagtgagactctgtctcaaaaaaaaaaaaaaaaaaaaaaaaaaaaaaaaagggcagtggatgtagagctggcaaaaacaatgacattgagatgaagcgtgctcaggtcagagctctaacgaagccctctgctgcagactgaatgtttgtatctccctcatattcatatgttgaagtcctaaggtgatgttatttggaagtgggcctttgggagggattacagcctgataagaggagacttgagagcttgcttcttctctgtgccatttggggctacaataggatggtcgtctgtacaccagaagtcaggcccttggttgccagcagaatggaatttgccagcaccttgatcttagactcttcaccctgcagacctgaggaataaatgtgtgttgtcaagccacctgctccatgctaaattgttatagtagcccaagcagattaagatgcctctgtttggctgtctatggctgcataacagaccactccaaatccaatgatttttatcatctttcacaatttctgtgggtcaggaatttgggaagggctcatctgggtggttctgccttggtgtctcttttgtggttacagtggaagccggagcactggggagctggagcagctgggagctggccaagcatctctcttcatatagcctcaaggcctctccatgttgtctctctgcatgagccagttgggcttcctcacagcatggcagctgagagtgttgacacctcttacactgtagctcaggactcccatgagtcaggccacattgcctttatgacccagcctcacaagtcaccatagaatcatttctactgtagtctgagtcactaagtttggctcagattcaaggggaagaaacagactctgttactcagtgggaggagtcttaaagaatttatagacatggttgggcacgatggctgaagtctgtaatcctagcactttgggaggccaagatgggaggatcgcttgagcccaggagctcgagaccagcttggtcaacacagggagcccctatctctccaaaaaacttaaaagttaaaaaaaattagctgagcatggtggcacgcacctgatcgcaccactgtatccagctcgggcaacaaagtgagactctatctc

SEQ ID NO: 27715 - protein, 82 aa, Homo sapiens [sequence omitted]

SEQ ID NO: 27716 - DNA, 2314 bp, Homo sapiens
cttgatgacggttggaggggcacaatgactttcccaagatcacacagcaaatgtgggacaaaatcaaggctgacagctcatgacagggtgggaggcagatgcagctgcctggcacaggctggctctccagggagatgggcagtgggcacgcattgcccagggcagaactggggctaggggaggaaacaacaagggaggctgtcattagctccttccaaagtggaggtcacttctctcccaaccccgagtcctccacccaaactcccttctcaaggtacaagggctgatcccgtaccagggatgggtagggactcaaagaggaaaagaggatgaaaagaggatggggactgagtgagatgtgaggactccagagggattagcggctctcaaggcaagtgggaggggacttcccggtaggagcccggagacagatgggagcctgtgaagagggcgggggcccggcgaggagaagcggtttctacgctggggtggggctccatgagggggatggagacctggaaaagggactgacggtgcagcgaggagaggaaggctcggttaagggatgggtcttccacgggaggggtggggaactgcgggagtgacggcagcttcggtgaggagtctgaggggctggccctcactgtgttggaagatcagcctgtcctcggggaccctgcttctgctgctgggtgtggcggctctgaccactggctatgcagtgccccccaagctggagggcatcggtgagggtgagttcctggtgttggatcagcgggcagccgactacaaccaggccctgggcacctgtcgcctggcaggcacagcgctctgtgtggcagctggagttctgctcgccatctgcctcttctgggccatgataggctggctgagccaggacaccaaggcagagcccttggaccccgaagccgacagccacgtggaggtcttcggggatgagccagagcagcagttgtcacccattttccgcaatgccagtggccagtcatggttctcgccacccgccagcccctttgggcaatcttctgtgcagactatccagcccaagagggactcctgagctgcccacatggcctaagatgtgggtcctggatccttccccccttctcaccataaccccctctcagtgtttccccaacttctcccttttagcagggtccctttagagcccaactccaggtcaaatctggagctcaaatcccagtgctccctccccaggagtggggccccaactcttccaagataccagcattcctcaagtcctcccaaaacttcctacccacaccctcttcccaaggccctcaggggcagaaaacatctccttcaacccgtccccactccttcctctgcatgaccttgggcaaacccttgccctttcaagccatcagctcctgcctctctgccatgagggctttggatcagattcctcttctcgccaggatgaggacacgcactgccctccatagacacagatgaaggggtgggggtcattcagctcgaatgggtcccagatgctcacttggcctttccctgcaggatgagtgaagacgtttgcctctcacagtgtgtcttctacctgcattttggcatcagagccccccagcccacccaccacaggcaattactagccctagttgataggtgaggtgggtgaagaaggctggaggtgacatgtccgaggtcacacaacaaagcagcatgcaggaactagaaacacatcttcagcctcctcctgggccagctcttgtgctacaggtggggcggagccagcccctcaccttcctggttccctgagggtcctcagggtggaggacaggtttggcccagaaagactagccagaggcctgatggtcccaggtggctctggatatactttggatatggatttaaatggtctctaagagccgggggtagggggcaggaaaagtgggttgtctttgcccctcaaagtccacctacctagaaaccaagcccacggtcttggccgtgaccctgataataaatgggctctctcagaggcgccagcccctccctccccagccggaggcgtcatctctcttctgtaccactagagggagctctgatgcagctggagagcagcgctcaaggctctcgcccctcccctccctaacccttaccttcagtctccaccagcctgaagggcctcctaggggatcctcaggcggcccccaccagggcacaccctactgtccttgtgcctcacgccccctcctcatcctgcaccccttccatcccaccttccctttcaataaacagctgggatggatactga

SEQ ID NO: 27717 - protein, 171 aa, Homo sapiens
MGLPREGWGTAGVTAASVRSLRGWPSLCWKISLSSGTLLLLLGVAALTTGYAVPPKLEGIGEGEFLVLDQRAADYNQALGTCRLAGTALCVAAGVLLAICLFWAMIGWLSQDTKAEPLDPEADSHVEVFGDEPEQQLSPIFRNASGQSWFSPPASPFGQSSVQTIQPKRDS

SEQ ID NO: 27718 - DNA, 2034 bp, Homo sapiens
gtgacggcagcttcggtgaggagtctgaggggctgcgtgaggggctggggcccagggagtccgaggggtctctgtgagggcgctggggtgtccgagcgagcagggaactctggaaggggacaggagccgggggagctgcaggcggccgccgtctgcagagccaggccctgaggcgggccggcgccccctcccccgccccgaactgcggcgcaggcgcgaaccggacccgcctttgctcggcggagacagcaggcagagagatgaggaaactgagacccagaaaggtggaagcacttgtctaaggtcacgcctccaggaagcagtgtgtccacgactccagtccaagtggtcaggctccagagcccacagtcccagatcagcctgtcctcggggaccctgcttctgctgctgggtgtggcggctctgaccactggctatgcagtgccccccaagctggagggcatcggtgagggtgagttcctggtgttggatcagcgggcagccgactacaaccaggccctgggcacctgtcgcctggcaggcacagcgctctgtgtggcagctggagttctgctcgccatctgcctcttctgggccatgataggctggctgagccaggacaccaaggcagagcccttggaccccgaagccgacagccacgtggaggtcttcggggatgagccagagcagcagttgtcacccattttccgcaatgccagtggccagtcatggttctcgccacccgccagcccctttgggcaatcttctgtgcagactatccagcccaagagggactcctgagctgcccacatggcctaagatgtgggtcctggatccttccccccttctcaccataaccccctctcagtgtttccccaacttctcccttttagcagggtccctttagagcccaactccaggtcaaatctggagctcaaatcccagtgctccctccccaggagtggggccccaactcttccaagataccagcattcctcaagtcctcccaaaacttcctacccacaccctcttcccaaggccctcaggggcagaaaacatctccttcaacccgtccccactccttcctctgcatgaccttgggcaaacccttgccctttcaagccatcagctcctgcctctctgccatgagggctttggatcagattcctcttctcgccaggatgaggacacgcactgccctccatagacacagatgaaggggtgggggtcattcagctcgaatgggtcccagatgctcacttggcctttccctgcaggatgagtgaagacgtttgcctctcacagtgtgtcttctacctgcattttggcatcagagccccccagcccacccaccacaggcaattactagccctagttgataggtgaggtgggtgaagaaggctggaggtgacatgtccgaggtcacacaacaaagcagcatgcaggaactagaaacacatcttcagcctcctcctgggccagctcttgtgctacaggtggggcggagccagcccctcaccttcctggttccctgagggtcctcagggtggaggacaggtttggcccagaaagactagccagaggcctgatggtcccaggtggctctggatatactttggatatggatttaaatggtctctaagagccgggggtagggggcaggaaaagtgggttgtctttgcccctcaaagtccacctacctagaaaccaagcccacggtcttggccgtgaccctgataataaatgggctctctcagaggcgccagcccctccctccccagccggaggcgtcatctctcttctgtaccactagagggagctctgatgcagctggagagcagcgctcaaggctctcgcccctcccctccctaacccttaccttcagtctccaccagcctgaagggcctcctaggggatcctcaggcggcccccaccagggcacaccctactgtccttgtgcctcacgccccctcctcatcctgcaccccttccatcccaccttccctttcaataaacagctgggatggatactga

SEQ ID NO: 27719 - protein, 76 aa, Homo sapiens
MSQSSSCHPFSAMPVASHGSRHPPAPLGNLLCRLSSPRGTPELPTWPKMWVLDPSPLLTITPSQCFPNFSLLAGSL

SEQ ID NO: 27720 - DNA, 2088 bp, Homo sapiens
gcggccgccgtctgcagagccaggccctgaggcgggccggcgccccctcccccgccccgaactgcggcgcaggcgcgaaccggacccgcctttgctcggcggagacagcaggcagagagatgaggaaactgagacccagaaaggtggaagcacttgtctaaggtcacgcctccaggaagcagtgtgtccacgactccagtccaagtggtcaggctccagagcccacagtcccaggggtccatgatgccgagctgcaatcgttcctgcagctgcagccgcggccccagcgtggaggatggcaagtggtatggggtccgctcctacctgcacctcttctatgaggactgtgcaggcactgctctcagcgacgaccctgagggacctccggtcctgtgcccccgccggccctggccctcactgtgttggaagatcagcctgtcctcggggaccctgcttctgctgctgggtgtggcggctctgaccactggctatgcagtgccccccaagctggagggcatcggtgagggtgagttcctggtgttggatcagcgggcagccgactacaaccaggccctgggcacctgtcgcctggcaggcacagcgctctgtgtggcagctggagttctgctcgccatctgcctcttctgggccatgataggctggctgagccaggacaccaaggcagagcccttggaccccgaagccgacagccacgtggaggtcttcggggatgagccagagcagcagttgtcacccattttccgcaatgccagtggccagtcatggttctcgccacccgccagcccctttgggcaatcttctgtgcagactatccagcccaagagggactcctgagctgcccacatggcctaagatgtgggtcctggatccttccccccttctcaccataaccccctctcagtgtttccccaacttctcccttttagcagggtccctttagagcccaactccaggtcaaatctggagctcaaatcccagtgctccctccccaggagtggggccccaactcttccaagataccagcattcctcaagtcctcccaaaacttcctacccacaccctcttcccaaggccctcaggggcagaaaacatctccttcaacccgtccccactccttcctctgcatgaccttgggcaaacccttgccctttcaagccatcagctcctgcctctctgccatgagggctttggatcagattcctcttctcgccaggatgaggacacgcactgccctccatagacacagatgaaggggtgggggtcattcagctcgaatgggtcccagatgctcacttggcctttccctgcaggatgagtgaagacgtttgcctctcacagtgtgtcttctacctgcattttggcatcagagccccccagcccacccaccacaggcaattactagccctagttgataggtgaggtgggtgaagaaggctggaggtgacatgtccgaggtcacacaacaaagcagcatgcaggaactagaaacacatcttcagcctcctcctgggccagctcttgtgctacaggtggggcggagccagcccctcaccttcctggttccctgagggtcctcagggtggaggacaggtttggcccagaaagactagccagaggcctgatggtcccaggtggctctggatatactttggatatggatttaaatggtctctaagagccgggggtagggggcaggaaaagtgggttgtctttgcccctcaaagtccacctacctagaaaccaagcccacggtcttggccgtgaccctgataataaatgggctctctcagaggcgccagcccctccctccccagccggaggcgtcatctctcttctgtaccactagagggagctctgatgcagctggagagcagcgctcaaggctctcgcccctcccctccctaacccttaccttcagtctccaccagcctgaagggcctcctaggggatcctcaggcggcccccaccagggcacaccctactgtccttgtgcctcacgccccctcctcatcctgcaccccttccatcccaccttccctttcaataaacagctgggatggatactga

SEQ ID NO: 27721 - protein, 204 aa, Homo sapiens; identical to SEQ ID NO: 3799

SEQ ID NO: 27722 - DNA, 2083 bp, Homo sapiens
cccgcctttgctcggcggagacagcaggcagagagtttctctctagggaaaaggacgcagttggtgtggagcagggcatcggtggtcctgtcaggaagagtggcgcgggtgccgatgaggaaactgagacccagaaaggtggaagcacttgtctaaggtcacgcctccaggaagcagtgtgtccacgactccagtccaagtggtcaggctccagagcccacagtcccaggggtccatgatgccgagctgcaatcgttcctgcagctgcagccgcggccccagcgtggaggatggcaagtggtatggggtccgctcctacctgcacctcttctatgaggactgtgcaggcactgctctcagcgacgaccctgagggacctccggtcctgtgcccccgccggccctggccctcactgtgttggaagatcagcctgtcctcggggaccctgcttctgctgctgggtgtggcggctctgaccactggctatgcagtgccccccaagctggagggcatcggtgagggtgagttcctggtgttggatcagcgggcagccgactacaaccaggccctgggcacctgtcgcctggcaggcacagcgctctgtgtggcagctggagttctgctcgccatctgcctcttctgggccatgataggctggctgagccaggacaccaaggcagagcccttggaccccgaagccgacagccacgtggaggtcttcggggatgagccagagcagcagttgtcacccattttccgcaatgccagtggccagtcatggttctcgccacccgccagcccctttgggcaatcttctgtgcagactatccagcccaagagggactcctgagctgcccacatggcctaagatgtgggtcctggatccttccccccttctcaccataaccccctctcagtgtttccccaacttctcccttttagcagggtccctttagagcccaactccaggtcaaatctggagctcaaatcccagtgctccctccccaggagtggggccccaactcttccaagataccagcattcctcaagtcctcccaaaacttcctacccacaccctcttcccaaggccctcaggggcagaaaacatctccttcaacccgtccccactccttcctctgcatgaccttgggcaaacccttgccctttcaagccatcagctcctgcctctctgccatgagggctttggatcagattcctcttctcgccaggatgaggacacgcactgccctccatagacacagatgaaggggtgggggtcattcagctcgaatgggtcccagatgctcacttggcctttccctgcaggatgagtgaagacgtttgcctctcacagtgtgtcttctacctgcattttggcatcagagccccccagcccacccaccacaggcaattactagccctagttgataggtgaggtgggtgaagaaggctggaggtgacatgtccgaggtcacacaacaaagcagcatgcaggaactagaaacacatcttcagcctcctcctgggccagctcttgtgctacaggtggggcggagccagcccctcaccttcctggttccctgagggtcctcagggtggaggacaggtttggcccagaaagactagccagaggcctgatggtcccaggtggctctggatatactttggatatggatttaaatggtctctaagagccgggggtagggggcaggaaaagtgggttgtctttgcccctcaaagtccacctacctagaaaccaagcccacggtcttggccgtgaccctgataataaatgggctctctcagaggcgccagcccctccctccccagccggaggcgtcatctctcttctgtaccactagagggagctctgatgcagctggagagcagcgctcaaggctctcgcccctcccctccctaacccttaccttcagtctccaccagcctgaagggcctcctaggggatcctcaggcggcccccaccagggcacaccctactgtccttgtgcctcacgccccctcctcatcctgcaccccttccatcccaccttccctttcaataaacagctgggatggatactga

SEQ ID NO: 27723 - protein, 204 aa, Homo sapiens; identical to SEQ ID NO: 3799

SEQ ID NO: 27724 - DNA, 2059 bp, Homo sapiens
ttcagtctctgccttttcccgttctctgtcgtggcttttgttgttgttgtttttcctcctttccttccccgctcttcttttccctgaattatgaggaaactgagacccagaaaggtggaagcacttgtctaaggtcacgcctccaggaagcagtgtgtccacgactccagtccaagtggtcaggctccagagcccacagtcccaggggtccatgatgccgagctgcaatcgttcctgcagctgcagccgcggccccagcgtggaggatggcaagtggtatggggtccgctcctacctgcacctcttctatgaggactgtgcaggcactgctctcagcgacgaccctgagggacctccggtcctgtgcccccgccggccctggccctcactgtgttggaagatcagcctgtcctcggggaccctgcttctgctgctgggtgtggcggctctgaccactggctatgcagtgccccccaagctggagggcatcggtgagggtgagttcctggtgttggatcagcgggcagccgactacaaccaggccctgggcacctgtcgcctggcaggcacagcgctctgtgtggcagctggagttctgctcgccatctgcctcttctgggccatgataggctggctgagccaggacaccaaggcagagcccttggaccccgaagccgacagccacgtggaggtcttcggggatgagccagagcagcagttgtcacccattttccgcaatgccagtggccagtcatggttctcgccacccgccagcccctttgggcaatcttctgtgcagactatccagcccaagagggactcctgagctgcccacatggcctaagatgtgggtcctggatccttccccccttctcaccataaccccctctcagtgtttccccaacttctcccttttagcagggtccctttagagcccaactccaggtcaaatctggagctcaaatcccagtgctccctccccaggagtggggccccaactcttccaagataccagcattcctcaagtcctcccaaaacttcctacccacaccctcttcccaaggccctcaggggcagaaaacatctccttcaacccgtccccactccttcctctgcatgaccttgggcaaacccttgccctttcaagccatcagctcctgcctctctgccatgagggctttggatcagattcctcttctcgccaggatgaggacacgcactgccctccatagacacagatgaaggggtgggggtcattcagctcgaatgggtcccagatgctcacttggcctttccctgcaggatgagtgaagacgtttgcctctcacagtgtgtcttctacctgcattttggcatcagagccccccagcccacccaccacaggcaattactagccctagttgataggtgaggtgggtgaagaaggctggaggtgacatgtccgaggtcacacaacaaagcagcatgcaggaactagaaacacatcttcagcctcctcctgggccagctcttgtgctacaggtggggcggagccagcccctcaccttcctggttccctgagggtcctcagggtggaggacaggtttggcccagaaagactagccagaggcctgatggtcccaggtggctctggatatactttggatatggatttaaatggtctctaagagccgggggtagggggcaggaaaagtgggttgtctttgcccctcaaagtccacctacctagaaaccaagcccacggtcttggccgtgaccctgataataaatgggctctctcagaggcgccagcccctccctccccagccggaggcgtcatctctcttctgtaccactagagggagctctgatgcagctggagagcagcgctcaaggctctcgcccctcccctccctaacccttaccttcagtctccaccagcctgaagggcctcctaggggatcctcaggcggcccccaccagggcacaccctactgtccttgtgcctcacgccccctcctcatcctgcaccccttccatcccaccttccctttcaataaacagctgggatggatactga

SEQ ID NO: 27725 - protein, 204 aa, Homo sapiens; identical to SEQ ID NO: 3799

SEQ ID NO: 27726 - DNA, 2690 bp, Homo sapiens
tcgtacctatctgggtatgtctctgtatgctttgtgagtatgtctgtgtgtttctctgtgctgtttcggtgagtttctctatgcagggatttgaggaccacatctgattggaagtgaggggcagctgtcaggacctttatcttaccctttggaacaagcacattgtttcattttgcaggaggctgctaattaaggctgagggccatcatggagactggggtagaagcccagtcctcccccaacacctcctggctttggttcgggccaaacctgtatatggatatacaagtaccttccattcccaagatccgtgtccacttttgtggaaaaaaaaaaaaaggttatttgataggtttctctggaaatctaacagcccttaagcctaagagtctttaatcctgagggaccctgactttcacttccaatggagtcaaaattcattggaatctggaggctttcaggggcagtcctggggaggacctttttatagccttgcagcttgggaactccagcccaagtgtcagccatgacaattacccccaggagggggtctgaaggggagcggagggtgaggctctctcattccagatatggagactaaaaagttcaagatggaagtaatagcaaaaaaattacagtactaatcacaacagctaccatttctcagcattagacacagtaactgtatgaaagaagtatgattattaggtctgttttacagatgaggaaactgagacccagaaaggtggaagcacttgtctaaggtcacgcctccaggaagcagtgtgtccacgactccagtccaagtggtcaggctccagagcccacagtcccaggggtccatgatgccgagctgcaatcgttcctgcagctgcagccgcggccccagcgtggaggatggcaagtggtatggggtccgctcctacctgcacctcttctatgaggactgtgcaggcactgctctcagcgacgaccctgagggacctccggtcctgtgcccccgccggccctggccctcactgtgttggaagatcagcctgtcctcggggaccctgcttctgctgctgggtgtggcggctctgaccactggctatgcagtgccccccaagctggagggcatcggtgagggtgagttcctggtgttggatcagcgggcagccgactacaaccaggccctgggcacctgtcgcctggcaggcacagcgctctgtgtggcagctggagttctgctcgccatctgcctcttctgggccatgataggctggctgagccaggacaccaaggcagagcccttggaccccgaagccgacagccacgtggaggtcttcggggatgagccagagcagcagttgtcacccattttccgcaatgccagtggccagtcatggttctcgccacccgccagcccctttgggcaatcttctgtgcagactatccagcccaagagggactcctgagctgcccacatggcctaagatgtgggtcctggatccttccccccttctcaccataaccccctctcagtgtttccccaacttctcccttttagcagggtccctttagagcccaactccaggtcaaatctggagctcaaatcccagtgctccctccccaggagtggggccccaactcttccaagataccagcattcctcaagtcctcccaaaacttcctacccacaccctcttcccaaggccctcaggggcagaaaacatctccttcaacccgtccccactccttcctctgcatgaccttgggcaaacccttgccctttcaagccatcagctcctgcctctctgccatgagggctttggatcagattcctcttctcgccaggatgaggacacgcactgccctccatagacacagatgaaggggtgggggtcattcagctcgaatgggtcccagatgctcacttggcctttccctgcaggatgagtgaagacgtttgcctctcacagtgtgtcttctacctgcattttggcatcagagccccccagcccacccaccacaggcaattactagccctagttgataggtgaggtgggtgaagaaggctggaggtgacatgtccgaggtcacacaacaaagcagcatgcaggaactagaaacacatcttcagcctcctcctgggccagctcttgtgctacaggtggggcggagccagcccctcaccttcctggttccctgagggtcctcagggtggaggacaggtttggcccagaaagactagccagaggcctgatggtcccaggtggctctggatatactttggatatggatttaaatggtctctaagagccgggggtagggggcaggaaaagtgggttgtctttgcccctcaaagtccacctacctagaaaccaagcccacggtcttggccgtgaccctgataataaatgggctctctcagaggcgccagcccctccctccccagccggaggcgtcatctctcttctgtaccactagagggagctctgatgcagctggagagcagcgctcaaggctctcgcccctcccctccctaacccttaccttcagtctccaccagcctgaagggcctcctaggggatcctcaggcggcccccaccagggcacaccctactgtccttgtgcctcacgccccctcctcatcctgcaccccttccatcccaccttccctttcaataaacagctgggatggatactga

SEQ ID NO: 27727 - protein, 204 aa, Homo sapiens; identical to SEQ ID NO: 3799

SEQ ID NO: 27728 - DNA, 1329 bp, Homo sapiens
gccaggacaccaaggcagagcccttggaccccgaagccgacagccacgtggaggtcttcggggatgagccagagcagcagttgtcacccattttccgcaatgccagtggccagtcatggttctcgccacccgccagcccctttgggcaatcttctgtgcagactatccagcccaagagggactcctgagctgcccacatggcctaagatgtgggtcctggatccttccccccttctcaccataaccccctctcagtgtttccccaacttctcccttttagcagggtccctttagagcccaactccaggtcaaatctggagctcaaatcccagtgctccctccccaggagtggggccccaactcttccaagataccagcattcctcaagtcctcccaaaacttcctacccacaccctcttcccaaggccctcaggggcagaaaacatctccttcaacccgtccccactccttcctctgcatgaccttgggcaaacccttgccctttcaagccatcagctcctgcctctctgccatgagggctttggatcagattcctcttctcgccaggatgaggacacgcactgccctccatagacacagatgaaggggtgggggtcattcagctcgaatgggtcccagatgctcacttggcctttccctgcaggatgagtgaagacgtttgcctctcacagtgtgtcttctacctgcattttggcatcagagccccccagcccacccaccacaggcaattactagccctagttgataggtgaggtgggtgaagaaggctggaggtgacatgtccgaggtcacacaacaaagcagcatgcaggaactagaaacacatcttcagcctcctcctgggccagctcttgtgctacaggtggggcggagccagcccctcaccttcctggttccctgagggtcctcagggtggaggacaggtttggcccagaaagactagccagaggcctgatggtcccaggtggctctggatatactttggatatggatttaaatggtctctaagagccgggggtagggggcaggaaaagtgggttgtctttgcccctcaaagtccacctacctagaaaccaagcccacggtcttggccgtgaccctgataataaatgggctctctcagaggcgccagcccctccctccctaacccttaccttcagtctccaccagcctgaagggcctcctaggggatcctcaggcggcccccaccagggcacaccctactgtccttgtgcctcacgccccctcctcatcctgcaccccttccatcccaccttccctttcaataaacagctgggatggatactg

SEQ ID NO: 27729 - protein, 76 aa, Homo sapiens; identical to SEQ ID NO: 27719

SEQ ID NO: 27730 - DNA, 2497 bp, Homo sapiens
ggagcttgcagtgagccgagatcgcgccaccgccctccagcctgggcgacagagcaagactctgtctcaaaaaaaaaaaaaaaaagagcaaattttttttccaaggtgatagggagagtccgtggctgatgtctgcactgaccagacgcccctagggggccagcgagggcgggtcccaggtgcagcggatgcagaggagagaggcccgggcgcggcgcgggggatggtgcgatcccgggcccgagggcatcagacggcggctgattagctccggtttgcatcacccggaccgggggattagctccggtttgcatcacccggaccgggggattagctccggtttgcatcacccggaccgggggccgggcgcgcacgagactcgcagcggaagtggaggcggctccgcgcgcgtccgctgctaggacccgggcagggctggagctgggctgggatcccgagctcggcagcagcgcagcgggccggcccacctgctggtgccctggaggctctgagccccggcggcgcccgggcccacgcggaacgacggggcgagatgcgagccacccctctggctgctcctgcgggttccctgtccaggaagaagcggttggagttggatgacaacttagataccgagcgtcccgtccagaaacgagctcgaagtgggccccagcccagactgcccccctgcctgttgcccctgagcccacctactgctccagatcgtgcaactgctgtggccactgcctcccgtcttgggccctatgtcctcctggagcccgaggagggcgggcgggcctaccaggccctgcactgccctacaggcactgagtatacctgcaaggtgtaccccgtccaggaagccctggccgtgctggagccctatgcgcggctgcccccgcacaagcatgtggctcggcccactgaggtcctggctggtacccagctcctctacgcctttttcactcggacccatggggacatgcacagcctggtgcgaagccgccaccgtatccctgagcctgaggctgccgtgctcttccgccagatggccaccgccctggcgcactgtcaccagcacggtctggtcctgcgtgatctcaagctgtgtcgctttgtcttcgctgaccgtgagaggaagaagctggtgctggagaacctggaggactcctgcgtgctgactgggccagatgattccctgtgggacaagcacgcgtgcccagcctacgtgggacctgagatactcagctcacgggcctcatactcgggcaaggcagccgatgtctggagcctgggcgtggcgctcttcaccatgctggccggccactaccccttccaggactcggagcctgtcctgctcttcggcaagatccgccgcggggcctacgccttgcctgcaggcctctcggcccctgcccgctgtctggttcgctgcctccttcgtcgggagccagctgaacggctcacagccacaggcatcctcctgcacccctggctgcgacaggacccgatgcccttagccccaacccgatcccatctctgggaggctgcccaggtggtccctgatggactggggctggacgaagccagggaagaggagggagacagagaagtggttctgtatggctaggaccaccctactacacgctcagctgccaacagtggattgagtttgggggtagctccaagccttctcctgcctctgaactgagccaaaccttcagtgccttccagaagggagaaaggcagaagcctgtgtggagtgtgctgtgtacacatctgctttgttccacacacatgcagttcctgcttgggtgcttatcaggtgccaagccctgttctcggtgctgggagtacagcagtgagcaaaggagacaatattccctgctcacagagatgacaaactggcatccttgagctgacaacacttttccatgaccataggtcactgtctacactgggtacactttgtaccagtgtcggcctccactgatgctggtgctcaggcacctctgtccaaggacaatccctttcacaaacaaaccagctgcctttgtatcttgtaccttttcagagaaagggaggtatccctgtgccaaaggctccaggcctctcccctgcaactcaggacccaagcccagctcactctgggaactgtgttcccagcatctctgtcctcttgattaagagattctccttccaggcctaagcctgggatttgggccagagataagaatccaaactatgaggctagttcttgtctaactcaagactgttctggaatgagggtccaggcctgtcaaccatggggcttctgacctgagcaccaaggttgagggacaggattaggcagggtctgtcctgtggccacctggaaagtcccaggtgggactcttctggggacacttggggtccacaatcccaggtccatactctaggttttggataccatgagtatgtatgtttacctgtgcctaataaaggagaattatgaaat

SEQ ID NO: 27731 - protein, 358 aa, Homo sapiens; identical to SEQ ID NO: 3801

SEQ ID NO: 27732 - DNA, 2204 bp, Homo sapiens
ggagcttgcagtgagccgagatcgcgccaccgccctccagcctgggcgacagagcaagactctgtctcaaaaaaaaaaaaaaaaagagcaaattttttttccaaggtgatagggagagtccgtggctgatgtctgcactgaccagacgcccctagggggccagcgagggcgggtcccaggtgcagcggatgcagaggagagaggcccgggcgcggcgcgggggatggtgcgatcccgggcccgagggcatcagacggcggctgattagctccggtttgcatcacccggaccgggggattagctccggtttgcatcacccggaccgggggattagctccggtttgcatcacccggaccgggggccgggcgcgcacgagactcgcagcggaagtggaggcggctccgcgcgcgtccgctgctaggacccgggcagggctggagctgggctgggatcccgagctcggcagcagcgcagcgggccggcccacctgctggtgccctggaggctctgagccccggcggcgcccgggcccacgcggaacgacggggcgagatgcgagccacccctctggctgctcctgcgggttccctgtccaggaagaagcggttggagttggatgacaacttagataccgagcgtcccgtccagaaacgagctcgaagtgggccccagcccagactgcccccctgcctgttgcccctgagcccacctactgctccagatcgtgcaactgctgtggccactgcctcccgtcttgggccctatgtcctcctggagcccgaggagggcgggcgggcctaccaggccctgcactgccctacaggcactgagtatacctgcaaggaagaagctggtgctggagaacctggaggactcctgcgtgctgactgggccagatgattccctgtgggacaagcacgcgtgcccagcctacgtgggacctgagatactcagctcacgggcctcatactcgggcaaggcagccgatgtctggagcctgggcgtggcgctcttcaccatgctggccggccactaccccttccaggactcggagcctgtcctgctcttcggcaagatccgccgcggggcctacgccttgcctgcaggcctctcggcccctgcccgctgtctggttcgctgcctccttcgtcgggagccagctgaacggctcacagccacaggcatcctcctgcacccctggctgcgacaggacccgatgcccttagccccaacccgatcccatctctgggaggctgcccaggtggtccctgatggactggggctggacgaagccagggaagaggagggagacagagaagtggttctgtatggctaggaccaccctactacacgctcagctgccaacagtggattgagtttgggggtagctccaagccttctcctgcctctgaactgagccaaaccttcagtgccttccagaagggagaaaggcagaagcctgtgtggagtgtgctgtgtacacatctgctttgttccacacacatgcagttcctgcttgggtgcttatcaggtgccaagccctgttctcggtgctgggagtacagcagtgagcaaaggagacaatattccctgctcacagagatgacaaactggcatccttgagctgacaacacttttccatgaccataggtcactgtctacactgggtacactttgtaccagtgtcggcctccactgatgctggtgctcaggcacctctgtccaaggacaatccctttcacaaacaaaccagctgcctttgtatcttgtaccttttcagagaaagggaggtatccctgtgccaaaggctccaggcctctcccctgcaactcaggacccaagcccagctcactctgggaactgtgttcccagcatctctgtcctcttgattaagagattctccttccaggcctaagcctgggatttgggccagagataagaatccaaactatgaggctagttcttgtctaactcaagactgttctggaatgagggtccaggcctgtcaaccatggggcttctgacctgagcaccaaggttgagggacaggattaggcagggtctgtcctgtggccacctggaaagtcccaggtgggactcttctggggacacttggggtccacaatcccaggtccatactctaggttttggataccatgagtatgtatgtttacctgtgcctaataaaggagaattatgaaat

SEQ ID NO: 27733 - protein, 190 aa, Homo sapiens
MSSWSPRRAGGPTRPCTALQALSIPARKKLVLENLEDSCVLTGPDDSLWDKHACPAYVGPEILSSRASYSGKAADVWSLGVALFTMLAGHYPFQDSEPVLLFGKIRRGAYALPAGLSAPARCLVRCLLRREPAERLTATGILLHPWLRQDPMPLAPTRSHLWEAAQVVPDGLGLDEAREEEGDREVVLYG

SEQ ID NO: 27734 - DNA, 2683 bp, Homo sapiens
ggagcttgcagtgagccgagatcgcgccaccgccctccagcctgggcgacagagcaagactctgtctcaaaaaaaaaaaaaaaaagagcaaattttttttccaaggtgatagggagagtccgtggctgatgtctgcactgaccagacgcccctagggggccagcgagggcgggtcccaggtgcagcggatgcagaggagagaggcccgggcgcggcgcgggggatggtgcgatcccgggcccgagggcatcagacggcggctgattagctccggtttgcatcacccggaccgggggattagctccggtttgcatcacccggaccgggggattagctccggtttgcatcacccggaccgggggccgggcgcgcacgagactcgcagcggaagtggaggcggctccgcgcgcgtccgctgctaggacccgggcagggctggagctgggctgggatcccgagctcggcagcagcgcagcgggccggcccacctgctggtgccctggaggctctgagccccggcggcgcccgggcccacgcggaacgacggggcgagatgcgagccacccctctggctgctcctgcgggttccctgtccaggaagaagcggttggagttggatgacaacttagataccgagcgtcccgtccagaaacgagctcgaagtgggccccagcccagactgcccccctgcctgttgcccctgagcccacctactgctccagatcgtgcaactgctgtggccactgcctcccgtcttgggccctatgtcctcctggagcccgaggagggcgggcgggcctaccaggccctgcactgccctacaggcactgagtatacctgcaaggtgtaccccgtccaggaagccctggccgtgctggagccctatgcgcggctgcccccgcacaagcatgtggctcggcccactgaggtcctggctggtacccagctcctctacgcctttttcactcggacccatggggacatgcacagcctggtgcgaagccgccaccgtatccctgagcctgaggctgccgtgctcttccgccagatggccaccgccctggcgcactgtcaccagcacggtctggtcctgcgtgatctcaagctgtgtcgctttgtcttcgctgaccgtgagaggaagaagctggtgctggagaacctggaggactcctgcgtgctgactgggccagatgattccctgtgggacaagcacgcgtgcccagcctacgtgggacctgagatactcagctcacgggcctcatactcgggcaaggcagccgatgtctggagcctgggcgtggcgctcttcaccatgctggccggccactaccccttccaggactcggagcctgtcctgctcttcggcaagatccgccgcggggcctacgccttgcctgcaggcctctcggcccctgcccgctgtctggttcgctgcctccttcgtcgggagccagctgaacggctcacagccacaggcatcctcctgcacccctggctgcgacaggacccgatgcccttagccccaacccgatcccatctctgggaggctgcccaggtggtccctgatggactggggctggacgaagccagggaagaggagggagacagagaagtggttctgtatggctaggaccaccctactacacgctcagctgccaacagtggattgagtttgggggtagctccaagccttctcctgcctctgaactgagccaaaccttcagtgccttccagaagggagaaaggcagaagcctgtgtggagtgtgctgtgtacacatctgctttgttccacacacatgcagttcctgcttgggtgcttatcaggtgccaagccctgttctcggtgctgggagtacagcagtgagcaaaggagacaatattccctgctcacagagatgacaaactggcatccttgagctgacaacacttttccatgaccataggtcactgtctacactgggtacactttgtaccagtgtcggcctccactgatgctggtgctcaggcacctctgtccaaggacaatccctttcacaaacaaaccagctgcctttgtatcttgtaccttttcagagaaagggaggtatccctgtgccaaaggctccaggcctctcccctgcaactcaggacccaagcccagctcactctgggaactgtgttcccagcatctctgtcctcttgattaagagattctccttccaggcctaagcctgggatttgggccagagataagaatccaaactatgaggctagttcttgtctaactcaagactgttctggaatgagggtccaggcctgtcaaccatggggcttctgacctgagcaccaaggttgagggacaggattaggcagggtctgtcctgtggccacctggaaagtcccaggtgggactcttctggggacacttggggtccacaatcccaggtccatactctaggttttggataccatgagtatgtatgtttacctgtgcctaataaaggagaattatgaaataattttatttttctctgcaatttcttccatcctttccaacgatctcttaccagtttttcctgccttcaaaactggcccccatggtgaaaggccgtagagttgtgtcttaacctgggctgagtggtttgtgagaacagattacctggagcccagtgggtcttcctgcactccttctgtttcttctgg

SEQ ID NO: 27735 - protein, 358 aa, Homo sapiens; identical to SEQ ID NO: 3801

SEQ ID NO: 27736 - DNA, 2390 bp, Homo sapiens
ggagcttgcagtgagccgagatcgcgccaccgccctccagcctgggcgacagagcaagactctgtctcaaaaaaaaaaaaaaaaagagcaaattttttttccaaggtgatagggagagtccgtggctgatgtctgcactgaccagacgcccctagggggccagcgagggcgggtcccaggtgcagcggatgcagaggagagaggcccgggcgcggcgcgggggatggtgcgatcccgggcccgagggcatcagacggcggctgattagctccggtttgcatcacccggaccgggggattagctccggtttgcatcacccggaccgggggattagctccggtttgcatcacccggaccgggggccgggcgcgcacgagactcgcagcggaagtggaggcggctccgcgcgcgtccgctgctaggacccgggcagggctggagctgggctgggatcccgagctcggcagcagcgcagcgggccggcccacctgctggtgccctggaggctctgagccccggcggcgcccgggcccacgcggaacgacggggcgagatgcgagccacccctctggctgctcctgcgggttccctgtccaggaagaagcggttggagttggatgacaacttagataccgagcgtcccgtccagaaacgagctcgaagtgggccccagcccagactgcccccctgcctgttgcccctgagcccacctactgctccagatcgtgcaactgctgtggccactgcctcccgtcttgggccctatgtcctcctggagcccgaggagggcgggcgggcctaccaggccctgcactgccctacaggcactgagtatacctgcaaggaagaagctggtgctggagaacctggaggactcctgcgtgctgactgggccagatgattccctgtgggacaagcacgcgtgcccagcctacgtgggacctgagatactcagctcacgggcctcatactcgggcaaggcagccgatgtctggagcctgggcgtggcgctcttcaccatgctggccggccactaccccttccaggactcggagcctgtcctgctcttcggcaagatccgccgcggggcctacgccttgcctgcaggcctctcggcccctgcccgctgtctggttcgctgcctccttcgtcgggagccagctgaacggctcacagccacaggcatcctcctgcacccctggctgcgacaggacccgatgcccttagccccaacccgatcccatctctgggaggctgcccaggtggtccctgatggactggggctggacgaagccagggaagaggagggagacagagaagtggttctgtatggctaggaccaccctactacacgctcagctgccaacagtggattgagtttgggggtagctccaagccttctcctgcctctgaactgagccaaaccttcagtgccttccagaagggagaaaggcagaagcctgtgtggagtgtgctgtgtacacatctgctttgttccacacacatgcagttcctgcttgggtgcttatcaggtgccaagccctgttctcggtgctgggagtacagcagtgagcaaaggagacaatattccctgctcacagagatgacaaactggcatccttgagctgacaacacttttccatgaccataggtcactgtctacactgggtacactttgtaccagtgtcggcctccactgatgctggtgctcaggcacctctgtccaaggacaatccctttcacaaacaaaccagctgcctttgtatcttgtaccttttcagagaaagggaggtatccctgtgccaaaggctccaggcctctcccctgcaactcaggacccaagcccagctcactctgggaactgtgttcccagcatctctgtcctcttgattaagagattctccttccaggcctaagcctgggatttgggccagagataagaatccaaactatgaggctagttcttgtctaactcaagactgttctggaatgagggtccaggcctgtcaaccatggggcttctgacctgagcaccaaggttgagggacaggattaggcagggtctgtcctgtggccacctggaaagtcccaggtgggactcttctggggacacttggggtccacaatcccaggtccatactctaggttttggataccatgagtatgtatgtttacctgtgcctaataaaggagaattatgaaataattttatttttctctgcaatttcttccatcctttccaacgatctcttaccagtttttcctgccttcaaaactggcccccatggtgaaaggccgtagagttgtgtcttaacctgggctgagtggtttgtgagaacagattacctggagcccagtgggtcttcctgcactccttctgtttcttctgg

SEQ ID NO: 27737 - protein, 190 aa, Homo sapiens; identical to SEQ ID NO: 27733

SEQ ID NO: 27738 - DNA, 1981 bp, Homo sapiens
ctgctaggacccgggcagggctggagctgggctgggatcccgagctcggcagcagcgcagcgggccggcccacctgctggtgccctggaggctctgagccccggcggcgcccgggcccacgcggaacgacggggcgagatgcgagccacccctctggctgctcctgcgggttccctgtccaggaagaagcggttggagttggatgacaacttagataccgagcgtcccgtccagaaacgagctcgaagtgggccccagcccagactgcccccctgcctgttgcccctgagccctgcactgccctacaggcactgagtatacctgcaaggtgtaccccgtccaggaagccctggccgtgctggagccctatgcgcggctgcccccgcacaagcatgtggctcggcccactgaggtcctggctggtacccagctcctctacgcctttttcactcggacccatggggacatgcacagcctggtgcgaagccgccaccgtatccctgagcctgaggctgccgtgctcttccgccagatggccaccgccctggcgcactgtcaccagcacggtctggtcctgcgtgatctcaagctgtgtcgctttgtcttcgctgaccgtgagaggaagaagctggtgctggagaacctggaggactcctgcgtgctgactgggccagatgattccctgtgggacaagcacgcgtgcccagcctacgtgggacctgagatactcagctcacgggcctcatactcgggcaaggcagccgatgtctggagcctgggcgtggcgctcttcaccatgctggccggccactaccccttccaggactcggagcctgtcctgctcttcggcaagatccgccgcggggcctacgccttgcctgcaggcctctcggcccctgcccgctgtctggttcgctgcctccttcgtcgggagccagctgaacggctcacagccacaggcatcctcctgcacccctggctgcgacaggacccgatgcccttagccccaacccgatcccatctctgggaggctgcccaggtggtccctgatggactggggctggacgaagccagggaagaggagggagacagagaagtggttctgtatggctaggaccaccctactacacgctcagctgccaacagtggattgagtttgggggtagctccaagccttctcctgcctctgaactgagccaaaccttcagtgccttccagaagggagaaaggcagaagcctgtgtggagtgtgctgtgtacacatctgctttgttccacacacatgcagttcctgcttgggtgcttatcaggtgccaagccctgttctcggtgctgggagtacagcagtgagcaaaggagacaatattccctgctcacagagatgacaaactggcatccttgagctgacaacacttttccatgaccataggtcactgtctacactgggtacactttgtaccagtgtcggcctccactgatgctggtgctcaggcacctctgtccaaggacaatccctttcacaaacaaaccagctgcctttgtatcttgtaccttttcagagaaagggaggtatccctgtgccaaaggctccaggcctctcccctgcaactcaggacccaagcccagctcactctgggaactgtgttcccagcatctctgtcctcttgattaagagattctccttccaggcctaagcctgggatttgggccagagataagaatccaaactatgaggctagttcttgtctaactcaagactgttctggaatgagggtccaggcctgtcaaccatggggcttctgacctgagcaccaaggttgagggacaggattaggcagggtctgtcctgtggccacctggaaagtcccaggtgggactcttctggggacacttggggtccacaatcccaggtccatactctaggttttggataccatgagtatgtatgtttacctgtgcctaataaaggagaattatgaaat

SEQ ID NO: 27739 - protein, 215 aa, Homo sapiens [sequence omitted]

SEQ ID NO: 27740 - DNA, 2167 bp, Homo sapiens
ctgctaggacccgggcagggctggagctgggctgggatcccgagctcggcagcagcgcagcgggccggcccacctgctggtgccctggaggctctgagccccggcggcgcccgggcccacgcggaacgacggggcgagatgcgagccacccctctggctgctcctgcgggttccctgtccaggaagaagcggttggagttggatgacaacttagataccgagcgtcccgtccagaaacgagctcgaagtgggccccagcccagactgcccccctgcctgttgcccctgagccctgcactgccctacaggcactgagtatacctgcaaggtgtaccccgtccaggaagccctggccgtgctggagccctatgcgcggctgcccccgcacaagcatgtggctcggcccactgaggtcctggctggtacccagctcctctacgcctttttcactcggacccatggggacatgcacagcctggtgcgaagccgccaccgtatccctgagcctgaggctgccgtgctcttccgccagatggccaccgccctggcgcactgtcaccagcacggtctggtcctgcgtgatctcaagctgtgtcgctttgtcttcgctgaccgtgagaggaagaagctggtgctggagaacctggaggactcctgcgtgctgactgggccagatgattccctgtgggacaagcacgcgtgcccagcctacgtgggacctgagatactcagctcacgggcctcatactcgggcaaggcagccgatgtctggagcctgggcgtggcgctcttcaccatgctggccggccactaccccttccaggactcggagcctgtcctgctcttcggcaagatccgccgcggggcctacgccttgcctgcaggcctctcggcccctgcccgctgtctggttcgctgcctccttcgtcgggagccagctgaacggctcacagccacaggcatcctcctgcacccctggctgcgacaggacccgatgcccttagccccaacccgatcccatctctgggaggctgcccaggtggtccctgatggactggggctggacgaagccagggaagaggagggagacagagaagtggttctgtatggctaggaccaccctactacacgctcagctgccaacagtggattgagtttgggggtagctccaagccttctcctgcctctgaactgagccaaaccttcagtgccttccagaagggagaaaggcagaagcctgtgtggagtgtgctgtgtacacatctgctttgttccacacacatgcagttcctgcttgggtgcttatcaggtgccaagccctgttctcggtgctgggagtacagcagtgagcaaaggagacaatattccctgctcacagagatgacaaactggcatccttgagctgacaacacttttccatgaccataggtcactgtctacactgggtacactttgtaccagtgtcggcctccactgatgctggtgctcaggcacctctgtccaaggacaatccctttcacaaacaaaccagctgcctttgtatcttgtaccttttcagagaaagggaggtatccctgtgccaaaggctccaggcctctcccctgcaactcaggacccaagcccagctcactctgggaactgtgttcccagcatctctgtcctcttgattaagagattctccttccaggcctaagcctgggatttgggccagagataagaatccaaactatgaggctagttcttgtctaactcaagactgttctggaatgagggtccaggcctgtcaaccatggggcttctgacctgagcaccaaggttgagggacaggattaggcagggtctgtcctgtggccacctggaaagtcccaggtgggactcttctggggacacttggggtccacaatcccaggtccatactctaggttttggataccatgagtatgtatgtttacctgtgcctaataaaggagaattatgaaataattttatttttctctgcaatttcttccatcctttccaacgatctcttaccagtttttcctgccttcaaaactggcccccatggtgaaaggccgtagagttgtgtcttaacctgggctgagtggtttgtgagaacagattacctggagcccagtgggtcttcctgcactccttctgtttcttctgg

SEQ ID NO: 27741 - protein, 215 aa, Homo sapiens [sequence omitted]

SEQ ID NO: 27742 - DNA, 2153 bp, Homo sapiens
cgccccttacacaccttttcacagaccccgccgtcggggcgcggccaggtcagatcccttttgatccgggcctgggctgagtgctccccccgggcttcaggtgacgcggccccgcggagcgtggggtcgcccgagttgggctggggaagccagggacggaggtgtccggccgtcacccctagaggagggcgtgcgggggtctgttttgcatgcgagccacccctctggctgctcctgcgggttccctgtccaggaagaagcggttggagttggatgacaacttagataccgagcgtcccgtccagaaacgagctcgaagtgggccccagcccagactgcccccctgcctgttgcccctgagcccacctactgctccagatcgtgcaactgctgtggccactgcctcccgtcttgggccctatgtcctcctggagcccgaggagggcgggcgggcctaccaggccctgcactgccctacaggcactgagtatacctgcaaggtgtaccccgtccaggaagccctggccgtgctggagccctatgcgcggctgcccccgcacaagcatgtggctcggcccactgaggtcctggctggtacccagctcctctacgcctttttcactcggacccatggggacatgcacagcctggtgcgaagccgccaccgtatccctgagcctgaggctgccgtgctcttccgccagatggccaccgccctggcgcactgtcaccagcacggtctggtcctgcgtgatctcaagctgtgtcgctttgtcttcgctgaccgtgagaggaagaagctggtgctggagaacctggaggactcctgcgtgctgactgggccagatgattccctgtgggacaagcacgcgtgcccagcctacgtgggacctgagatactcagctcacgggcctcatactcgggcaaggcagccgatgtctggagcctgggcgtggcgctcttcaccatgctggccggccactaccccttccaggactcggagcctgtcctgctcttcggcaagatccgccgcggggcctacgccttgcctgcaggcctctcggcccctgcccgctgtctggttcgctgcctccttcgtcgggagccagctgaacggctcacagccacaggcatcctcctgcacccctggctgcgacaggacccgatgcccttagccccaacccgatcccatctctgggaggctgcccaggtggtccctgatggactggggctggacgaagccagggaagaggagggagacagagaagtggttctgtatggctaggaccaccctactacacgctcagctgccaacagtggattgagtttgggggtagctccaagccttctcctgcctctgaactgagccaaaccttcagtgccttccagaagggagaaaggcagaagcctgtgtggagtgtgctgtgtacacatctgctttgttccacacacatgcagttcctgcttgggtgcttatcaggtgccaagccctgttctcggtgctgggagtacagcagtgagcaaaggagacaatattccctgctcacagagatgacaaactggcatccttgagctgacaacacttttccatgaccataggtcactgtctacactgggtacactttgtaccagtgtcggcctccactgatgctggtgctcaggcacctctgtccaaggacaatccctttcacaaacaaaccagctgcctttgtatcttgtaccttttcagagaaagggaggtatccctgtgccaaaggctccaggcctctcccctgcaactcaggacccaagcccagctcactctgggaactgtgttcccagcatctctgtcctcttgattaagagattctccttccaggcctaagcctgggatttgggccagagataagaatccaaactatgaggctagttcttgtctaactcaagactgttctggaatgagggtccaggcctgtcaaccatggggcttctgacctgagcaccaaggttgagggacaggattaggcagggtctgtcctgtggccacctggaaagtcccaggtgggactcttctggggacacttggggtccacaatcccaggtccatactctaggttttggataccatgagtatgtatgtttacctgtgcctaataaaggagaattatgaaat

SEQ ID NO: 27743 - protein, 358 aa, Homo sapiens; identical to SEQ ID NO: 3801

SEQ ID NO: 27744 - DNA, 2339 bp, Homo sapiens
cgccccttacacaccttttcacagaccccgccgtcggggcgcggccaggtcagatcccttttgatccgggcctgggctgagtgctccccccgggcttcaggtgacgcggccccgcggagcgtggggtcgcccgagttgggctggggaagccagggacggaggtgtccggccgtcacccctagaggagggcgtgcgggggtctgttttgcatgcgagccacccctctggctgctcctgcgggttccctgtccaggaagaagcggttggagttggatgacaacttagataccgagcgtcccgtccagaaacgagctcgaagtgggccccagcccagactgcccccctgcctgttgcccctgagcccacctactgctccagatcgtgcaactgctgtggccactgcctcccgtcttgggccctatgtcctcctggagcccgaggagggcgggcgggcctaccaggccctgcactgccctacaggcactgagtatacctgcaaggtgtaccccgtccaggaagccctggccgtgctggagccctatgcgcggctgcccccgcacaagcatgtggctcggcccactgaggtcctggctggtacccagctcctctacgcctttttcactcggacccatggggacatgcacagcctggtgcgaagccgccaccgtatccctgagcctgaggctgccgtgctcttccgccagatggccaccgccctggcgcactgtcaccagcacggtctggtcctgcgtgatctcaagctgtgtcgctttgtcttcgctgaccgtgagaggaagaagctggtgctggagaacctggaggactcctgcgtgctgactgggccagatgattccctgtgggacaagcacgcgtgcccagcctacgtgggacctgagatactcagctcacgggcctcatactcgggcaaggcagccgatgtctggagcctgggcgtggcgctcttcaccatgctggccggccactaccccttccaggactcggagcctgtcctgctcttcggcaagatccgccgcggggcctacgccttgcctgcaggcctctcggcccctgcccgctgtctggttcgctgcctccttcgtcgggagccagctgaacggctcacagccacaggcatcctcctgcacccctggctgcgacaggacccgatgcccttagccccaacccgatcccatctctgggaggctgcccaggtggtccctgatggactggggctggacgaagccagggaagaggagggagacagagaagtggttctgtatggctaggaccaccctactacacgctcagctgccaacagtggattgagtttgggggtagctccaagccttctcctgcctctgaactgagccaaaccttcagtgccttccagaagggagaaaggcagaagcctgtgtggagtgtgctgtgtacacatctgctttgttccacacacatgcagttcctgcttgggtgcttatcaggtgccaagccctgttctcggtgctgggagtacagcagtgagcaaaggagacaatattccctgctcacagagatgacaaactggcatccttgagctgacaacacttttccatgaccataggtcactgtctacactgggtacactttgtaccagtgtcggcctccactgatgctggtgctcaggcacctctgtccaaggacaatccctttcacaaacaaaccagctgcctttgtatcttgtaccttttcagagaaagggaggtatccctgtgccaaaggctccaggcctctcccctgcaactcaggacccaagcccagctcactctgggaactgtgttcccagcatctctgtcctcttgattaagagattctccttccaggcctaagcctgggatttgggccagagataagaatccaaactatgaggctagttcttgtctaactcaagactgttctggaatgagggtccaggcctgtcaaccatggggcttctgacctgagcaccaaggttgagggacaggattaggcagggtctgtcctgtggccacctggaaagtcccaggtgggactcttctggggacacttggggtccacaatcccaggtccatactctaggttttggataccatgagtatgtatgtttacctgtgcctaataaaggagaattatgaaataattttatttttctctgcaatttcttccatcctttccaacgatctcttaccagtttttcctgccttcaaaactggcccccatggtgaaaggccgtagagttgtgtcttaacctgggctgagtggtttgtgagaacagattacctggagcccagtgggtcttcctgcactccttctgtttcttctgg

SEQ ID NO: 27745 - protein, 358 aa, Homo sapiens; identical to SEQ ID NO: 3801

SEQ ID NO: 27746 - DNA, 2025 bp, Homo sapiens
cacagaccccgccgtcggggcgcggccaggtcagatcccttttgatccgggcctgggctgagtgctccccccgggcttcagatgcgagccacccctctggctgctcctgcgggttccctgtccaggaagaagcggttggagttggatgacaacttagataccgagcgtcccgtccagaaacgagctcgaagtgggccccagcccagactgcccccctgcctgttgcccctgagcccacctactgctccagatcgtgcaactgctgtggccactgcctcccgtcttgggccctatgtcctcctggagcccgaggagggcgggcgggcctaccaggccctgcactgccctacaggcactgagtatacctgcaaggtgtaccccgtccaggaagccctggccgtgctggagccctatgcgcggctgcccccgcacaagcatgtggctcggcccactgaggtcctggctggtacccagctcctctacgcctttttcactcggacccatggggacatgcacagcctggtgcgaagccgccaccgtatccctgagcctgaggctgccgtgctcttccgccagatggccaccgccctggcgcactgtcaccagcacggtctggtcctgcgtgatctcaagctgtgtcgctttgtcttcgctgaccgtgagaggaagaagctggtgctggagaacctggaggactcctgcgtgctgactgggccagatgattccctgtgggacaagcacgcgtgcccagcctacgtgggacctgagatactcagctcacgggcctcatactcgggcaaggcagccgatgtctggagcctgggcgtggcgctcttcaccatgctggccggccactaccccttccaggactcggagcctgtcctgctcttcggcaagatccgccgcggggcctacgccttgcctgcaggcctctcggcccctgcccgctgtctggttcgctgcctccttcgtcgggagccagctgaacggctcacagccacaggcatcctcctgcacccctggctgcgacaggacccgatgcccttagccccaacccgatcccatctctgggaggctgcccaggtggtccctgatggactggggctggacgaagccagggaagaggagggagacagagaagtggttctgtatggctaggaccaccctactacacgctcagctgccaacagtggattgagtttgggggtagctccaagccttctcctgcctctgaactgagccaaaccttcagtgccttccagaagggagaaaggcagaagcctgtgtggagtgtgctgtgtacacatctgctttgttccacacacatgcagttcctgcttgggtgcttatcaggtgccaagccctgttctcggtgctgggagtacagcagtgagcaaaggagacaatattccctgctcacagagatgacaaactggcatccttgagctgacaacacttttccatgaccataggtcactgtctacactgggtacactttgtaccagtgtcggcctccactgatgctggtgctcaggcacctctgtccaaggacaatccctttcacaaacaaaccagctgcctttgtatcttgtaccttttcagagaaagggaggtatccctgtgccaaaggctccaggcctctcccctgcaactcaggacccaagcccagctcactctgggaactgtgttcccagcatctctgtcctcttgattaagagattctccttccaggcctaagcctgggatttgggccagagataagaatccaaactatgaggctagttcttgtctaactcaagactgttctggaatgagggtccaggcctgtcaaccatggggcttctgacctgagcaccaaggttgagggacaggattaggcagggtctgtcctgtggccacctggaaagtcccaggtgggactcttctggggacacttggggtccacaatcccaggtccatactctaggttttggataccatgagtatgtatgtttacctgtgcctaataaaggagaattatgaaat

SEQ ID NO: 27747 - protein, 358 aa, Homo sapiens; identical to SEQ ID NO: 3801

SEQ ID NO: 27748 - DNA, 2211 bp, Homo sapiens
cacagaccccgccgtcggggcgcggccaggtcagatcccttttgatccgggcctgggctgagtgctccccccgggcttcagatgcgagccacccctctggctgctcctgcgggttccctgtccaggaagaagcggttggagttggatgacaacttagataccgagcgtcccgtccagaaacgagctcgaagtgggccccagcccagactgcccccctgcctgttgcccctgagcccacctactgctccagatcgtgcaactgctgtggccactgcctcccgtcttgggccctatgtcctcctggagcccgaggagggcgggcgggcctaccaggccctgcactgccctacaggcactgagtatacctgcaaggtgtaccccgtccaggaagccctggccgtgctggagccctatgcgcggctgcccccgcacaagcatgtggctcggcccactgaggtcctggctggtacccagctcctctacgcctttttcactcggacccatggggacatgcacagcctggtgcgaagccgccaccgtatccctgagcctgaggctgccgtgctcttccgccagatggccaccgccctggcgcactgtcaccagcacggtctggtcctgcgtgatctcaagctgtgtcgctttgtcttcgctgaccgtgagaggaagaagctggtgctggagaacctggaggactcctgcgtgctgactgggccagatgattccctgtgggacaagcacgcgtgcccagcctacgtgggacctgagatactcagctcacgggcctcatactcgggcaaggcagccgatgtctggagcctgggcgtggcgctcttcaccatgctggccggccactaccccttccaggactcggagcctgtcctgctcttcggcaagatccgccgcggggcctacgccttgcctgcaggcctctcggcccctgcccgctgtctggttcgctgcctccttcgtcgggagccagctgaacggctcacagccacaggcatcctcctgcacccctggctgcgacaggacccgatgcccttagccccaacccgatcccatctctgggaggctgcccaggtggtccctgatggactggggctggacgaagccagggaagaggagggagacagagaagtggttctgtatggctaggaccaccctactacacgctcagctgccaacagtggattgagtttgggggtagctccaagccttctcctgcctctgaactgagccaaaccttcagtgccttccagaagggagaaaggcagaagcctgtgtggagtgtgctgtgtacacatctgctttgttccacacacatgcagttcctgcttgggtgcttatcaggtgccaagccctgttctcggtgctgggagtacagcagtgagcaaaggagacaatattccctgctcacagagatgacaaactggcatccttgagctgacaacacttttccatgaccataggtcactgtctacactgggtacactttgtaccagtgtcggcctccactgatgctggtgctcaggcacctctgtccaaggacaatccctttcacaaacaaaccagctgcctttgtatcttgtaccttttcagagaaagggaggtatccctgtgccaaaggctccaggcctctcccctgcaactcaggacccaagcccagctcactctgggaactgtgttcccagcatctctgtcctcttgattaagagattctccttccaggcctaagcctgggatttgggccagagataagaatccaaactatgaggctagttcttgtctaactcaagactgttctggaatgagggtccaggcctgtcaaccatggggcttctgacctgagcaccaaggttgagggacaggattaggcagggtctgtcctgtggccacctggaaagtcccaggtgggactcttctggggacacttggggtccacaatcccaggtccatactctaggttttggataccatgagtatgtatgtttacctgtgcctaataaaggagaattatgaaataattttatttttctctgcaatttcttccatcctttccaacgatctcttaccagtttttcctgccttcaaaactggcccccatggtgaaaggccgtagagttgtgtcttaacctgggctgagtggtttgtgagaacagattacctggagcccagtgggtcttcctgcactccttctgtttcttctgg

SEQ ID NO: 27749 - protein, 358 aa, Homo sapiens; identical to SEQ ID NO: 3801

SEQ ID NO: 27750 - DNA, 1403 bp, Homo sapiens
gatgattccctgtgggacaagcacgcgtgcccagcctacgtgggacctgagatactcagctcacgggcctcatactcgggcaaggcagccgatgtctggagcctgggcgtggcgctcttcaccatgctggccggccactaccccttccaggactcggagcctgtcctgctcttcggcaagatccgccgcggggcctacgccttgcctgcaggcctctcggcccctgcccgctgtctggttcgctgcctccttcgtcgggagccagctgaacggctcacagccacaggcatcctcctgcacccctggctgcgacaggacccgatgcccttagccccaacccgatcccatctctgggaggctgcccaggtggtccctgatggactggggctggacgaagccagggaagaggagggagacagagaagtggttctgtatggctaggaccaccctactacacgctcagctgccaacagtggattgagtttgggggtagctccaagccttctcctgcctctgaactgagccaaaccttcagtgccttccagaagggagaaaggcagaagcctgtgtggagtgtgctgtgtacacatctgctttgttccacacacatgcagttcctgcttgggtgcttatcaggtgccaagccctgttctcggtgctgggagtacagcagtgagcaaaggagacaatattccctgctcacagagatgacaaactggcatccttgagctgacaacacttttccatgaccataggtcactgtctacactgggtacactttgtaccagtgtcggcctccactgatgctggtgctcaggcacctctgtccaaggacaatccctttcacaaacaaaccagctgcctttgtatcttgtaccttttcagagaaagggaggtatccctgtgccaaaggctccaggcctctcccctgcaactcaggacccaagcccagctcactctgggaactgtgttcccagcatctctgtcctcttgattaagagattctccttccaggcctaagcctgggatttgggccagagataagaatccaaactatgaggctagttcttgtctaactcaagactgttctggaatgaggtcccaggtgggactcttctggggacacttggggtccacaatcccaggtccatactctaggttttggataccatgagtatgtatgtttacctgtgcctaataaaggagaattatgaaataattttatttttctctgcaatttcttccatcctttccaacgatctcttaccagtttttcctgccttcaaaactggcccccatggtgaaaggccgtagagttgtgtcttaacctgggctgagtggtttgtgagaacagattacctggagcccagtgggtcttcctgcactccttctgtttcttctgg

SEQ ID NO: 27751 - protein, 109 aa, Homo sapiens
MIPCGTSTRAQPTWDLRYSAHGPHTRARQPMSGAWAWRSSPCWPATTPSRTRSLSCSSARSAAGPTPCLQASRPLPAVWFAASFVGSQLNGSQPQASSCTPGCDRTRCP

SEQ ID NO: 27752 - DNA, 687 bp, Homo sapiens
ggacaagcacgcgtgcccagcctacgtgggacctgagatactcagctcacgggcctcatactcgggcaaggcagccgatgtctggagcctgggcgtggcgctcttcaccatgctggccggccactaccccttccaggactcggagcctgtcctgctcttcggcaagatccgccgcggggcctacgccttgcctgcaggcctctcggcccctgcccgctgtctggttcgctgcctccttcgtcgggagccagctgaacggctcacagccacaggcatcctcctgcacccctggctgcgacaggacccgatgcccttagccccaacccgatcccatcttctgggaactgtgttcccagcatctctgtcctcttgattaagagattctccttccaggcctaagcctgggatttgggccagagataagaatccaaactatgaggctagttcttgtctaactcaagactgttctggaatgagggtccaggcctgtcaaccatggggcttctgacctgagcaccaaggttgagggacaggattaggcagggtctgtcctgtggccacctggaaagtcccaggtgggactcttctggggacacttggggtccacaatcccaggtccatactctaggttttggataccatgagtatgtatgtttacctgtgcctaataaaggagaattatgaaat

SEQ ID NO: 27753 - protein, 87 aa, Homo sapiens
MLAGHYPFQDSEPVLLFGKIRRGAYALPAGLSAPARCLVRCLLRREPAERLTATGILLHPWLRQDPMPLAPTRSHLLGTVFPASLSS

SEQ ID NO: 27754 - DNA, 873 bp, Homo sapiens
ggacaagcacgcgtgcccagcctacgtgggacctgagatactcagctcacgggcctcatactcgggcaaggcagccgatgtctggagcctgggcgtggcgctcttcaccatgctggccggccactaccccttccaggactcggagcctgtcctgctcttcggcaagatccgccgcggggcctacgccttgcctgcaggcctctcggcccctgcccgctgtctggttcgctgcctccttcgtcgggagccagctgaacggctcacagccacaggcatcctcctgcacccctggctgcgacaggacccgatgcccttagccccaacccgatcccatcttctgggaactgtgttcccagcatctctgtcctcttgattaagagattctccttccaggcctaagcctgggatttgggccagagataagaatccaaactatgaggctagttcttgtctaactcaagactgttctggaatgagggtccaggcctgtcaaccatggggcttctgacctgagcaccaaggttgagggacaggattaggcagggtctgtcctgtggccacctggaaagtcccaggtgggactcttctggggacacttggggtccacaatcccaggtccatactctaggttttggataccatgagtatgtatgtttacctgtgcctaataaaggagaattatgaaataattttatttttctctgcaatttcttccatcctttccaacgatctcttaccagtttttcctgccttcaaaactggcccccatggtgaaaggccgtagagttgtgtcttaacctgggctgagtggtttgtgagaacagattacctggagcccagtgggtcttcctgcactccttctgtttcttctgg

SEQ ID NO: 27755 - protein, 87 aa, Homo sapiens; identical to SEQ ID NO: 27753

SEQ ID NO: 27756 - DNA, 372 bp, Homo sapiens
aggatctgctgatcgatgggacgaggaacgggagaaaaattaaagcggcgcatgaggcagacgaatgcaaacttcaccaatagctcaacgaaaagacagacggtgaccgctgagaggcagcgtcggatctggtgcggacctgtctcggcgcccgctgccctctcaccgccccacgcaggatcccggcctggtcaccgggcagtgtgatgcttcccgactgccgcggggacagcgaggcacacacagggcttgggccgcgccggaggccacacggcctggctgagttgctcctggtctcccgcctctcccaggcgacccggaggtagcatttcccaggaggcacggtcccccccagggggatgggcacagcca

SEQ ID NO: 27757 - protein, 63 aa, Homo sapiens
MGRGTGEKLKRRMRQTNANFTNSSTKRQTVTAERQRRIWCGPVSAPAALSPPHAGSRPGHRAV

SEQ ID NO: 27758 - DNA, 2783 bp, Homo sapiens
ccccgcctgcggcccagctccttcccgcggctctgcgatgcggcccgcagggtgacccgggcgggagtccggggacccgcgatcagccccggaggacggggtggggtcgccccaaacaggagcgccgggaccgctgggaccccgcactcggcgtccgccgccgccgggtagccgggcagtggaggtcccggatgaggcgacaatttttccggccccccctcccagtcccgccccacttccggggccgccactttcactttctcttccgccgaagccgctccccttgcgaagaactggggcctcccgggaggagagagggctttgccttgaaacccgggacgccaggggcgctcccgcaagtgggggtcctccgggacttggaacgccccggctgggtggtgtccgggcgtcctttccccgcttcttcccacctcggctggtcccgtttcctcctgcgcccagtgcggacctgtctcggcgcccgctgccctctcaccgccccacgcaggatcccggcctggtcaccgggcagtgtgatgcttcccgactgccgcggggacagcgaggcacacacagggcttgggccgcgccggaggccacacggcctggctgagttgctcctggtctcccgcctctcccaggcgacccggaggtagcatttcccaggaggcacggtcccccccagggggatgggcacagccacgccagatggacgagaagaccaagaaagcagaggaaatggccctgagcctcacccgagcagtggcgggcggggatgaacaggtggcaatgaagtgtgccatctggctggcagagcaacgggtgcccctgagtgtgcaactgaagcctgaggtctccccaacgcaggacatcaggctgtgggtgagcgtggaggatgctcagatgcacaccgtcaccatctggctcacagtgcgccctgatatgacagtggcgtctctcaaggacatggtttttctggactatggcttcccaccagtcttgcagcagtgggtgattgggcagcggctggcacgagaccaggagaccctgcactcccatggggtgcggcagaatggggacagtgcctacctctatctgctgtcagcccgcaacacctccctcaaccctcaggagctgcagcgggagcggcagctgcggatgctggaagatctgggcttcaaggacctcacgctgcagccgcggggccctctggagccaggccccccaaagcccggggtcccccaggaacccggacgggggcagccagatgcagtgcctgagcccccaccggtgggctggcagtgccccgggtgcaccttcatcaacaagcccacgcggcctggctgtgagatgtgctgccgggcgcgccccgaggcctaccaggtccccgcctcataccagcccgacgaggaggagcgagcgcgcctggcgggcgaggaggaggcgctgcgtcagtaccagcagcggaagcagcagcagcaggaggggaactacctgcagcacgtccagctggaccagaggagcctggtgctgaacacggagcccgccgagtgccccgtgtgctactcggtgctggcgcccggcgaggccgtggtgctgcgtgagtgtctgcacaccttctgcagggagtgcctgcagggcaccatccgcaacagccaggaggcggaggtctcctgccccttcattgacaacacctactcgtgctcgggcaagctgctggagagggagatcaaggcgctcctgacccctgaggattaccagcgatttctagacctgggcatctccattgctgaaaaccgcagtgccttcagctaccattgcaagaccccagattgcaagggatggtgcttctttgaggatgatgtcaatgagttcacctgccctgtgtgtttccacgtcaactgcctgctctgcaaggccatccatgagcagatgaactgcaaggagtatcaggaggacctggccctgcgggctcagaacgatgtggctgcccggcagacgacagagatgctgaaggtgatgctgcagcagggcgaggccatgcgctgcccccagtgccagatcgtggtacagaagaaggacggctgcgactggatccgctgcaccgtctgccacaccgagatctgctgggtcaccaagggcccacgctggggccctgggggcccaggagacaccagcgggggctgccgctgcagggtaaatgggattccttgccacccaagctgtcagaactgccactgagctaaagatggtggggccacatgctgacccagccccacatccacattctgttagaatgtagctcagggagcttcgtggacggccttgcttgctgtagcgttgtaggggccctgcctgcactgcggttgtccacggtcacatctgccccagtgcctttgtccttcccttggggcttgccggccagacttctctcccctgcggctcccacctctgcctgaccccagccttaaacatagcccctggccagaggccttgctgggtggagcctctgtgtgactccatactcctcccaccacaacactcatctgtcaaacaccaagcactctcagcctccccgccttcagctgtcagctttctggggctaacttctctgcctttgtggttggaggcctgaggcctcttggaactcttgctaacctgttcagagccaggaaggagactgcacagttttgaaagcacagcccgtcaggtccggctctgcgtctccctctctgcagcctgtgtaagctattataattaaaatggttttccgggaagggatg

SEQ ID NO: 27759 - protein, 510 aa, Homo sapiens
MDEKTKKAEEMALSLTRAVAGGDEQVAMKCAIWLAEQRVPLSVQLKPEVSPTQDIRLWVSVEDAQMHTVTIWLTVRPDMTVASLKDMVFLDYGFPPVLQQWVIGQRLARDQETLHSHGVRQNGDSAYLYLLSARNTSLNPQELQRERQLRMLEDLGFKDLTLQPRGPLEPGPPKPGVPQEPGRGQPDAVPEPPPVGWQCPGCTFINKPTRPGCEMCCRARPEAYQVPASYQPDEEERARLAGEEEALRQYQQRKQQQQEGNYLQHVQLDQRSLVLNTEPAECPVCYSVLAPGEAVVLRECLHTFCRECLQGTIRNSQEAEVSCPFIDNTYSCSGKLLEREIKALLTPEDYQRFLDLGISIAENRSAFSYHCKTPDCKGWCFFEDDVNEFTCPVCFHVNCLLCKAIHEQMNCKEYQEDLALRAQNDVAARQTTEMLKVMLQQGEAMRCPQCQIVVQKKDGCDWIRCTVCHTEICWVTKGPRWGPGGPGDTSGGCRCRVNGIPCHPSCQNCH

SEQ ID NO: 27760 - DNA, 948 bp, Homo sapiens
cccgcctgcggcccagctccttcccgcggctctgcgatgcggcccgcagggtgacccgggcgggagtccggggacccgcgatcagccccggaggacggggtggggtcgccccaaacaggagcgccgggaccgctgggaccccgcactcggcgtccgccgccgccgggtagccgggcagtggaggtcccggatgaggcgacaatttttccggccccccctcccagtcccgccccacttccggggccgccactttcactttctcttccgccgaagccgctccccttgcgaagaactggggcctcccgggaggagagagggctttgccttgaaacccgggacgccaggggcgctcccgcaagtgggggtcctccgggacttggaacgccccggctgggtggtgtccgggcgtcctttccccgcttcttcccacctcggctggtcccgtttcctcctgcgcccagtgcggacctgtctcggcgcccgctgccctctcaccgccccacgcaggatcccggcctggtcaccgggcagtgtgatgcttcccgactgccgcggggacagcgaggcacacacagggcttgggccgcgccggaggccacacggcctggctgagttgctcctggtctcccgcctctcccaggcgacccggaggtagcatttcccaggaggcacggtcccccccagggggatgggcacagccacgccagatggacgagaagaccaagaaagcagaggaaatggccctgagcctcacccgagcagtggcgggcggggatgaacaggtggcaatgaagtgtgccatctggctggcagagcaacgggtgcccctgagtgtgcaactgaagcctgaggtctccccaacgcaggacatcaggtgaggagtgcatggctggcctgaacccaagggacagcaggacaggatattcttgcctgtagaacagttcttcc

SEQ ID NO: 27761 - protein, 56 aa, Homo sapiens [sequence omitted]

SEQ ID NO: 27762 - DNA, 1277 bp, Homo sapiens
cccgcctgcggcccagctccttcccgcggctctgcgatgcggcccgcagggtgacccgggcgggagtccggggacccgcgatcagccccggaggacggggtggggtcgccccaaacaggagcgccgggaccgctgggaccccgcactcggcgtccgccgccgccgggtagccgggcagtggaggtcccggatgaggcgacaatttttccggccccccctcccagtcccgccccacttccggggccgccactttcactttctcttccgccgaagccgctccccttgcgaagaactggggcctcccgggaggagagagggctttgccttgaaacccgggacgccaggggcgctcccgcaagtgggggtcctccgggacttggaacgccccggctgggtggtgtccgggcgtcctttccccgcttcttcccacctcggctggtcccgtttcctcctgcgcccagtgcggacctgtctcggcgcccgctgccctctcaccgccccacgcaggatcccggcctggtcaccgggcagtgtgatgcttcccgactgccgcggggacagcgaggcacacacagggcttgggccgcgccggaggccacacggcctggctgagttgctcctggtctcccgcctctcccaggcgacccggaggtagcatttcccaggaggcacggtcccccccagggggatgggcacagccacgccagatggacgagaagaccaagaaagctcctgaaaataaaccctgtgctaactggctcctgctgtactggctttcagcagaggaaatggccctgagcctcacccgagcagtggcgggcggggatgaacaggtggcaatgaagtgtgccatctggctggcagagcaacgggtgcccctgagtgtgcaactgaagcctgaggtctccccaacgcaggacatcagattcctcatggtgcaaaatggccattccagctccatccagccatcacatcacaggaggaagggaagaaagacacccctccacactcttctaaagagcatagctcaaaaattgtacacacttcttccgttaattcctgtggaccagaactgattcccacagctacagttcagcttgaggggagactgtatagccaagatattcagctagaattcaggggttcgcttggtaagggaagggaagagaatggatactgtcggtctgtgctccaggagacttaaactcaatgctgaaacactttgcacaatgcctggcgtgttatgcactcaataataaacattagtgtctatcgtt

SEQ ID NO: 27763 - protein, 122 aa, Homo sapiens
MDEKTKKAPENKPCANWLLLYWLSAEEMALSLTRAVAGGDEQVAMKCAIWLAEQRVPLSVQLKPEVSPTQDIRFLMVQNGHSSSIQPSHHRRKGRKTPLHTLLKSIAQKLYTLLPLIPVDQN

SEQ ID NO: 27764 - DNA, 1081 bp, Homo sapiens
cccgcctgcggcccagctccttcccgcggctctgcgatgcggcccgcagggtgacccgggcgggagtccggggacccgcgatcagccccggaggacggggtggggtcgccccaaacaggagcgccgggaccgctgggaccccgcactcggcgtccgccgccgccgggtagccgggcagtggaggtcccggatgaggcgacaatttttccggccccccctcccagtcccgccccacttccggggccgccactttcactttctcttccgccgaagccgctccccttgcgaagaactggggcctcccgggaggagagagggctttgccttgaaacccgggacgccaggggcgctcccgcaagtgggggtcctccgggacttggaacgccccggctgggtggtgtccgggcgtcctttccccgcttcttcccacctcggctggtcccgtttcctcctgcgcccagtgcggacctgtctcggcgcccgctgccctctcaccgccccacgcaggatcccggcctggtcaccgggcagtgtgatgcttcccgactgccgcggggacagcgaggcacacacagggcttgggccgcgccggaggccacacggcctggctgagttgctcctggtctcccgcctctcccaggcgacccggaggtagcatttcccaggaggcacggtcccccccagggggatgggcacagccacgccagatggacgagaagaccaagaaagattcctcatggtgcaaaatggccattccagctccatccagccatcacatcacaggaggaagggaagaaagacacccctccacactcttctaaagagcatagctcaaaaattgtacacacttcttccgttaattcctgtggaccagaactgattcccacagctacagttcagcttgaggggagactgtatagccaagatattcagctagaattcaggggttcgcttggtaagggaagggaagagaatggatactgtcggtctgtgctccaggagacttaaactcaatgctgaaacactttgcacaatgcctggcgtgttatgcactcaataataaacattagtgtctatcgtt

SEQ ID NO: 27765 - protein, 63 aa, Homo sapiens
MGTATPDGREDQERFLMVQNGHSSSIQPSHHRRKGRKTPLHTLLKSIAQKLYTLLPLIPVDQN

SEQ ID NO: 27766 - DNA, 1227 bp, Homo sapiens
cccgcctgcggcccagctccttcccgcggctctgcgatgcggcccgcagggtgacccgggcgggagtccggggacccgcgatcagccccggaggacggggtggggtcgccccaaacaggagcgccgggaccgctgggaccccgcactcggcgtccgccgccgccgggtagccgggcagtggaggtcccggatgaggcgacaatttttccggccccccctcccagtcccgccccacttccggggccgccactttcactttctcttccgccgaagccgctccccttgcgaagaactggggcctcccgggaggagagagggctttgccttgaaacccgggacgccaggggcgctcccgcaagtgggggtcctccgggacttggaacgccccggctgggtggtgtccgggcgtcctttccccgcttcttcccacctcggctggtcccgtttcctcctgcgcccagtgcggacctgtctcggcgcccgctgccctctcaccgccccacgcaggatcccggcctggtcaccgggcagtgtgatgcttcccgactgccgcggggacagcgaggcacacacagggcttgggccgcgccggaggccacacggcctggctgagttgctcctggtctcccgcctctcccaggcgacccggaggtagcatttcccaggaggcacggtcccccccagggggatgggcacagccacgccagatggacgagaagaccaagaaagcagaggaaatggccctgagcctcacccgagcagtggcgggcggggatgaacaggtggcaatgaagtgtgccatctggctggcagagcaacgggtgcccctgagtgtgcaactgaagcctgaggtctccccaacgcaggacatcagattcctcatggtgcaaaatggccattccagctccatccagccatcacatcacaggaggaagggaagaaagacacccctccacactcttctaaagagcatagctcaaaaattgtacacacttcttccgttaattcctgtggaccagaactgattcccacagctacagttcagcttgaggggagactgtatagccaagatattcagctagaattcaggggttcgcttggtaagggaagggaagagaatggatactgtcggtctgtgctccaggagacttaaactcaatgctgaaacactttgcacaatgcctggcgtgttatgcactcaataataaacattagtgtctatcgtta

SEQ ID NO: 27767 - protein, 105 aa, Homo sapiens
MDEKTKKAEEMALSLTRAVAGGDEQVAMKCAIWLAEQRVPLSVQLKPEVSPTQDIRFLMVQNGHSSSIQPSHHRRKGRKTPLHTLLKSIAQKLYTLLPLIPVDQN

SEQ ID NO: 27768 - DNA, 2637 bp, Homo sapiens
cccgcctgcggcccagctccttcccgcggctctgcgatgcggcccgcagggtgacccgggcgggagtccggggacccgcgatcagccccggaggacggggtggggtcgccccaaacaggagcgccgggaccgctgggaccccgcactcggcgtccgccgccgccgggtagccgggcagtggaggtcccggatgaggcgacaatttttccggccccccctcccagtcccgccccacttccggggccgccactttcactttctcttccgccgaagccgctccccttgcgaagaactggggcctcccgggaggagagagggctttgccttgaaacccgggacgccaggggcgctcccgcaagtgggggtcctccgggacttggaacgccccggctgggtggtgtccgggcgtcctttccccgcttcttcccacctcggctggtcccgtttcctcctgcgcccagtgcggacctgtctcggcgcccgctgccctctcaccgccccacgcaggatcccggcctggtcaccgggcagtgtgatgcttcccgactgccgcggggacagcgaggcacacacagggcttgggccgcgccggaggccacacggcctggctgagttgctcctggtctcccgcctctcccaggcgacccggaggtagcatttcccaggaggcacggtcccccccagggggatgggcacagccacgccagatggacgagaagaccaagaaaggctgtgggtgagcgtggaggatgctcagatgcacaccgtcaccatctggctcacagtgcgccctgatatgacagtggcgtctctcaaggacatggtttttctggactatggcttcccaccagtcttgcagcagtgggtgattgggcagcggctggcacgagaccaggagaccctgcactcccatggggtgcggcagaatggggacagtgcctacctctatctgctgtcagcccgcaacacctccctcaaccctcaggagctgcagcgggagcggcagctgcggatgctggaagatctgggcttcaaggacctcacgctgcagccgcggggccctctggagccaggccccccaaagcccggggtcccccaggaacccggacgggggcagccagatgcagtgcctgagcccccaccggtgggctggcagtgccccgggtgcaccttcatcaacaagcccacgcggcctggctgtgagatgtgctgccgggcgcgccccgaggcctaccaggtccccgcctcataccagcccgacgaggaggagcgagcgcgcctggcgggcgaggaggaggcgctgcgtcagtaccagcagcggaagcagcagcagcaggaggggaactacctgcagcacgtccagctggaccagaggagcctggtgctgaacacggagcccgccgagtgccccgtgtgctactcggtgctggcgcccggcgaggccgtggtgctgcgtgagtgtctgcacaccttctgcagggagtgcctgcagggcaccatccgcaacagccaggaggcggaggtctcctgccccttcattgacaacacctactcgtgctcgggcaagctgctggagagggagatcaaggcgctcctgacccctgaggattaccagcgatttctagacctgggcatctccattgctgaaaaccgcagtgccttcagctaccattgcaagaccccagattgcaagggatggtgcttctttgaggatgatgtcaatgagttcacctgccctgtgtgtttccacgtcaactgcctgctctgcaaggccatccatgagcagatgaactgcaaggagtatcaggaggacctggccctgcgggctcagaacgatgtggctgcccggcagacgacagagatgctgaaggtgatgctgcagcagggcgaggccatgcgctgcccccagtgccagatcgtggtacagaagaaggacggctgcgactggatccgctgcaccgtctgccacaccgagatctgctgggtcaccaagggcccacgctggggccctgggggcccaggagacaccagcgggggctgccgctgcagggtaaatgggattccttgccacccaagctgtcagaactgccactgagctaaagatggtggggccacatgctgacccagccccacatccacattctgttagaatgtagctcagggagcttcgtggacggccttgcttgctgtagcgttgtaggggccctgcctgcactgcggttgtccacggtcacatctgccccagtgcctttgtccttcccttggggcttgccggccagacttctctcccctgcggctcccacctctgcctgaccccagccttaaacatagcccctggccagaggccttgctgggtggagcctctgtgtgactccatactcctcccaccacaacactcatctgtcaaacaccaagcactctcagcctccccgccttcagctgtcagctttctggggctaacttctctgcctttgtggttggaggcctgaggcctcttggaactcttgctaacctgttcagagccaggaaggagactgcacagttttgaaagcacagcccgtcaggtccggctctgcgtctccctctctgcagcctgtgtaagctattataattaaaatggttttccgggaagggatg

SEQ ID NO: 27769 - protein, 468 aa, Homo sapiens; identical to SEQ ID NO: 3803

SEQ ID NO: 27770 - DNA, 2476 bp, Homo sapiens
cccgcctgcggcccagctccttcccgcggctctgcgatgcggcccgcagggtgacccgggcgggagtccggggacccgcgatcagccccggaggacggggtggggtcgccccaaacaggagcgccgggaccgctgggaccccgcactcggcgtccgccgccgccgggtagccgggcagtggaggtcccggatgaggcgacaatttttccggccccccctcccagtcccgccccacttccggggccgccactttcactttctcttccgccgaagccgctccccttgcgaagaactggggcctcccgggaggagagagggctttgccttgaaacccgggacgccaggggcgctcccgcaagtgggggtcctccgggacttggaacgccccggctgggtggtgtccgggcgtcctttccccgcttcttcccacctcggctggtcccgtttcctcctgcgcccagtgcggacctgtctcggcgcccgctgccctctcaccgccccacgcaggatcccggcctggtcaccgggcagtgtgatgcttcccgactgccgcggggacagcgaggcacacacagggcttgggccgcgccggaggccacacggcctggctgagttgctcctggtctcccgcctctcccaggcgacccggaggtagcatttcccaggaggcacggtcccccccagggggatgggcacagccacgccagatggacgagaagaccaagaaaggctgtgggtgagcgtggaggatgctcagatgcacaccgtcaccatctggctcacagtgcgccctgatatgacagtggcgtctctcaaggacatggtttttctggactatggcttcccaccagtcttgcagcagtgggtgattgggcagcggctggcacgagaccaggagaccctgcactcccatggggtgcggcagaatggggacagtgcctacctctatctgctgtcagcccgcaacacctccctcaaccctcaggagctgcagcgggagcggcagctgcggatgctggaagatctgggcttcaaggacctcacgctgcagccgcggggccctctggagccaggccccccaaagcccggggtcccccaggaacccggacgggggcagccagatgcagtgcctgagcccccaccggtgggctggcagtgccccgggtgcaccttcatcaacaagcccacgcggcctggctgtgagatgtgctgccgggcgcgccccgaggcctaccaggtccccgcctcataccagcccgacgaggaggagcgagcgcgcctggcgggcgaggaggaggcgctgcgtcagtaccagcagggagtgcctgcagggcaccatccgcaacagccaggaggcggaggtctcctgccccttcattgacaacacctactcgtgctcgggcaagctgctggagagggagatcaaggcgctcctgacccctgaggattaccagcgatttctagacctgggcatctccattgctgaaaaccgcagtgccttcagctaccattgcaagaccccagattgcaagggatggtgcttctttgaggatgatgtcaatgagttcacctgccctgtgtgtttccacgtcaactgcctgctctgcaaggccatccatgagcagatgaactgcaaggagtatcaggaggacctggccctgcgggctcagaacgatgtggctgcccggcagacgacagagatgctgaaggtgatgctgcagcagggcgaggccatgcgctgcccccagtgccagatcgtggtacagaagaaggacggctgcgactggatccgctgcaccgtctgccacaccgagatctgctgggtcaccaagggcccacgctggggccctgggggcccaggagacaccagcgggggctgccgctgcagggtaaatgggattccttgccacccaagctgtcagaactgccactgagctaaagatggtggggccacatgctgacccagccccacatccacattctgttagaatgtagctcagggagcttcgtggacggccttgcttgctgtagcgttgtaggggccctgcctgcactgcggttgtccacggtcacatctgccccagtgcctttgtccttcccttggggcttgccggccagacttctctcccctgcggctcccacctctgcctgaccccagccttaaacatagcccctggccagaggccttgctgggtggagcctctgtgtgactccatactcctcccaccacaacactcatctgtcaaacaccaagcactctcagcctccccgccttcagctgtcagctttctggggctaacttctctgcctttgtggttggaggcctgaggcctcttggaactcttgctaacctgttcagagccaggaaggagactgcacagttttgaaagcacagcccgtcaggtccggctctgcgtctccctctctgcagcctgtgtaagctattataattaaaatggttttccgggaagggatg

SEQ ID NO: 27771 - protein, 340 aa, Homo sapiens
MGCGRMGTVPTSICCQPATPPSTLRSCSGSGSCGCWKIWASRTSRCSRGALWSQAPQSPGSPRNPDGGSQMQCLSPHRWAGSAPGAPSSTSPRGLAVRCAAGRAPRPTRSPPHTSPTRRSERAWRARRRRCVSTSRECLQGTIRNSQEAEVSCPFIDNTYSCSGKLLEREIKALLTPEDYQRFLDLGISIAENRSAFSYHCKTPDCKGWCFFEDDVNEFTCPVCFHVNCLLCKAIHEQMNCKEYQEDLALRAQNDVAARQTTEMLKVMLQQGEAMRCPQCQIVVQKKDGCDWIRCTVCHTEICWVTKGPRWGPGGPGDTSGGCRCRVNGIPCHPSCQNCH

SEQ ID NO: 27772 - DNA, 2621 bp, Homo sapiens
cccgcctgcggcccagctccttcccgcggctctgcgatgcggcccgcagggtgacccgggcgggagtccggggacccgcgatcagccccggaggacggggtggggtcgccccaaacaggagcgccgggaccgctgggaccccgcactcggcgtccgccgccgccgggtagccgggcagtggaggtcccggatgaggcgacaatttttccggccccccctcccagtcccgccccacttccggggccgccactttcactttctcttccgccgaagccgctccccttgcgaagaactggggcctcccgggaggagagagggctttgccttgaaacccgggacgccaggggcgctcccgcaagtgggggtcctccgggacttggaacgccccggctgggtggtgtccgggcgtcctttccccgcttcttcccacctcggctggtcccgtttcctcctgcgcccagtgcggacctgtctcggcgcccgctgccctctcaccgccccacgcaggatcccggcctggtcaccgggcagtgtgatgcttcccgactgccgcggggacagcgaggcacacacagggcttgggccgcgccggaggccacacggcctggctgagttgctcctggtctcccgcctctcccaggcgacccggaggtagcatttcccaggaggcacggtcccccccagggggatgggcacagccacgccagatggacgagaagaccaagaaagcagaggaaatggccctgagcctcacccgagcagtggcgggcggggatgaacaggtggcaatgaagtgtgccatctggctggcagagcaacgggtgcccctgagtgtgcaactgaagcctgaggtctccccaacgcaggacatcaggctgtgggtgagcgtggaggatgctcagatgcacaccgtcaccatctggctcacagtgcgccctgatatgacagtggcgtctctcaaggacatggtttttctggactatggcttcccaccagtcttgcagcagtgggtgattgggcagcggctggcacgagaccaggagaccctgcactcccatggggtgcggcagaatggggacagtgcctacctctatctgctgtcagcccgcaacacctccctcaaccctcaggagctgcagcgggagcggcagctgcggatgctggaagatctgggcttcaaggacctcacgctgcagccgcggggccctctggagccaggccccccaaagcccggggtcccccaggaacccggacgggggcagccagatgcagtgcctgagcccccaccggtgggctggcagtgccccgggtgcaccttcatcaacaagcccacgcggcctggctgtgagatgtgctgccgggcgcgccccgaggcctaccaggtccccgcctcataccagcccgacgaggaggagcgagcgcgcctggcgggcgaggaggaggcgctgcgtcagtaccagcagggagtgcctgcagggcaccatccgcaacagccaggaggcggaggtctcctgccccttcattgacaacacctactcgtgctcgggcaagctgctggagagggagatcaaggcgctcctgacccctgaggattaccagcgatttctagacctgggcatctccattgctgaaaaccgcagtgccttcagctaccattgcaagaccccagattgcaagggatggtgcttctttgaggatgatgtcaatgagttcacctgccctgtgtgtttccacgtcaactgcctgctctgcaaggccatccatgagcagatgaactgcaaggagtatcaggaggacctggccctgcgggctcagaacgatgtggctgcccggcagacgacagagatgctgaaggtgatgctgcagcagggcgaggccatgcgctgcccccagtgccagatcgtggtacagaagaaggacggctgcgactggatccgctgcaccgtctgccacaccgagatctgctgggtcaccaagggcccacgctggggccctgggggcccaggagacaccagcgggggctgccgctgcagggtaaatgggattccttgccacccaagctgtcagaactgccactgagctaaagatggtggggccacatgctgacccagccccacatccacattctgttagaatgtagctcagggagcttcgtggacggccttgcttgctgtagcgttgtaggggccctgcctgcactgcggttgtccacggtcacatctgccccagtgcctttgtccttcccttggggcttgccggccagacttctctcccctgcggctcccacctctgcctgaccccagccttaaacatagcccctggccagaggccttgctgggtggagcctctgtgtgactccatactcctcccaccacaacactcatctgtcaaacaccaagcactctcagcctccccgccttcagctgtcagctttctggggctaacttctctgcctttgtggttggaggcctgaggcctcttggaactcttgctaacctgttcagagccaggaaggagactgcacagttttgaaagcacagcccgtcaggtccggctctgcgtctccctctctgcagcctgtgtaagctattataattaaaatggttttccgggaagggatg

SEQ ID NO: 27773 - protein, 340 aa, Homo sapiens; identical to SEQ ID NO: 27771

SEQ ID NO: 27774 - DNA, 508 bp, Homo sapiens
cccgcggctctgcgatgcggcccgcagggtgacccgggcgggagtccggggacccgcgatcagccccggaggacggggtggggtcgccccaaacaggagcgccgggaccgctgggaccccgcactcggcgtccgccgccgccgggtagccgggcagtggaggtcccggatgaggcgacaatttttccggccccccctcccagtcccgccccacttccggggccgccactttcactttcttcttctaaagagcatagctcaaaaattgtacacacttcttccgttaattcctgtggaccagaactgattcccacagctacagttcagcttgaggggagactgtatagccaagatattcagctagaattcaggggttcgcttggtaagggaagggaagagaatggatactgtcggtctgtgctccaggagacttaaactcaatgctgaaacactttgcacaatgcctggcgtgttatgcactcaataataaacattagtgtctatcgtta

SEQ ID NO: 27775 - protein, 45 aa, Homo sapiens
MRRQFFRPPLPVPPHFRGRHFHFLLLKSIAQKLYTLLPLIPVDQN

SEQ ID NO: 27776 - DNA, 383 bp, Homo sapiens
cagcagaggaaatggccctgagcctcacccgagcagtggcgggcggggatgaacaggtggcaatgaagtgtgccatctggctggcagagcaacgggtgcccctgagtgtgcaactgaagcctgaggtctccccaacgcaggacatcaggtgaggagtgcatggctggcctgaacccaagggacagcaggacaggatattcttgcctgtagaacagttcttcctaatggcacgttctggttcacctctcagtgtgtcctcattttaaaaatcagaccgtaacagtagctatctcatagggttgttaggaggtgtactgtattaggatgttaggccttatacaacagaagaaaacggaacagtgacgtaaacaaatttgatggca

SEQ ID NO: 27777 - protein, 46 aa, Homo sapiens [sequence omitted]

SEQ ID NO: 27778 - DNA, 417 bp, Homo sapiens
ctgagatagactctaggggccagatggatgcagggagcccagcgaggaggctcctggagtcacccaggtgggggatgtggggcctggaccagagaatcagagcggcagtatggaggcagggtggaggccttggtgatgggttggtgagagggatgggaaggaaggagatattgaggagaagtccacctggggtgactgagtgaggcccctggggtcaggccttgccatgtgagggatggagtccccagtgaagggggttcctatgatcctaactcttttcccctcccctcccctagggagtgcctgcagggcaccatccgcaacagccaggaggcggaggtctcctgccccttcattgacaacacctactctctgcagcctgtgtaagctattataattaaaatggttttccgggaa

SEQ ID NO: 27779 - protein, 53 aa, Homo sapiens
MESPVKGVPMILTLFPSPPLGSACRAPSATARRRRSPAPSLTTPTLCSLCKLL

SEQ ID NO: 27780 - DNA, 540 bp, Homo sapiens
agcccagcgaggaggctcctggagtcacccaggtgggggatgtggggcctggaccagagaatcagagcggcagtatggaggcagggtggaggccttggtgatgggttggtgagagggatgggaaggaaggagatattgaggagaagtccacctggggtgactgagtgaggcccctggggtcaggccttgccatgtgagggatggagtccccagtgaagggggttcctatgatcctaactcttttcccctcccctcccctagggagtgcctgcagggcaccatccgcaacagccaggaggcggaggtctcctgccccttcattgacaacacctactcgtgctcgggcaagctgctggagagggagatcaaggcgctcctgacccctgaggattaccagcgatttctagacctgggcatctccattgctgaaaaccgcagtgccttcagctaccattgcaagaccccagattgcaagggatggtgcttctttgaggatgatgtcaatgagttcacctgccctgtgtgtttccacgtcaactg

SEQ ID NO: 27781 - protein, 59 aa, Homo sapiens
MESPVKGVPMILTLFPSPPLGSACRAPSATARRRRSPAPSLTTPTRARASCWRGRSRRS

SEQ ID NO: 27782 - DNA, 576 bp, Homo sapiens
ctcggctcagtggttctgcctgggcctttctgcctccagggccggggaggctgcctgagtgtgcccctcatcctctgcgacggttgactgccctgagccaatgcaggcagtgccgaaggacccagtccactcacacattctcagacagctctgcgcacagtgactggggccagctcttgagtcctggcatccaacggcaggtggcagtgcctttccagttgctagaacaggcccttccccacaaaatcacaggccttcagcagcagaggcgccctctgcctgctatgatgatggtcacgtcacagcgtggacaatgtgttgggcatcaaataccagatctcaaaaggggaaggagggtgggtcacagagcggaggaaagacttagagaatgaacatcccaggaccctgtcttagtaacctccgaccagcacagagtgggttctagtaaatactgctgaatcgatactgtgccatcttgcttgagacgagaaaataggatggacaaccccacccctcaactgcagcagcttcgttccttcttgaactatctacctgccaaccctagatgcctgctga

SEQ ID NO: 27783 - protein, 35 aa, Homo sapiens
MMMVTSQRGQCVGHQIPDLKRGRRVGHRAEERLRE

SEQ ID NO: 27784 - DNA, 5193 bp, Homo sapiens
atccctggtagaaaaattatctacccaccacctcaggtaccagtagagaggaacacaagacgacgggcatcactcctcagccgtcctggggataactcactggcctgttttctggtcagcttttttaggagtttgagccctcgccaccctgagccctgatctaagtgtttggtaaccaggcttattgaattgtctccctccagggattttatggatccaacaatggacaacaccaagcatatattaaactatctgatgcccatcattgaccaggtgaatccagagctccatgacttcatgcagaggtacatatgtgtctgcatttctgtgtgcatgcatacacacgcccacacccccccacacctgaaacactcctcacaagccgagcgcagtttcctcattgtcttgggtggatttgttaagttctccccagttgttccagtcaccagcaatctgggtaattcagttcttggagcatttttggggactgtgctctttgggggacatagcccatcccttgagtttacatctagtggggagaggtggataaggtatgtatgccaaggtaagatgttgaggttattgccacaagagaaacacaaagtcctgtgggatccagtggcgagaaggggaaggccaacaatgggttgttttatttcccaagtaccaaagagaagaaatatttttttgcaaatcccatgtgatgttttgtttcttctctgtttagttggaaatgtgttcttggccaatgcctctttttttaaaattttttaaaaggtaatggctatgccttctttttttttgagatggagtattttctcttgttgcccaggctggagtgcaatggcatgatcttggctcactgcaacctctatcttccgggttcaagcgattcttctgcctcagcctcaagtagctgggattacaggcatgcgccaccacgctcggctaattttgtatttttagtagagacagggtttctccatgttggtcaggctggtctcgagctcccgatgtcaggtgatccgcccgctttggcctcccaaagtgctgagattataggcgtgactcaccgtgtctggcagctacatcttaagatatttcagttgtctcatgttaacagaaaaattaatgcagtcatgttttcaggcttgggaatatgtacctgtgccccccagaagggtaagacttagtcagaaggagaatcatggcgtagttctctgaaaacaactgcttctcgttcctgtagttgacatttgttggccagtaggcgagcacccagtgagataaagcagccaggaccctgttgtggtgttagtgttgtggtacaccttaaagactttgtattaaatattttgtaaggagaagatgctgaattcctaggtaactgaattttccagaaatcttattcctaaatgcttccttctcaccagcgctataaggcccagagagagggaagggatggcccacaggacctgacacctgcctttcctttgtttctagtgctgaggtagggaccatctttgccctcagctggctcatcacctggtttgggcatgtcctgtctgacttcaggcacgtcgtgcggttatatgacttcttcctggcctgccacccactgatgccgatttactttgcagccgtgattgtgttgtatcgcgagcaggaagtcctggactgtgactgtgacatggcctcggtccaccacctgttgtcccagatccctcaggacttgccctatgagacactgatcagcagagcaggagacctttttgttcagtttcccccatccgaacttgctcgggaggccgctgcccaacagcaagctgagaggacggcagcctctactttcaaagactttgagctggcatcagcccagcagaggcctgatatggtgctgcggcagcggtttcggggacttctgcggcctgaagatcgaacaaaagatgtcctgaccaagccaaggaccaaccgctttgtgaaattggcagtgatggggctgacagtggcacttggagcggctgcactggctgtggtgaaaagtgccctggaatgggcccctaagtttcagctgcagctgtttccctgaaagccagagaagaccttcctcttacatcacattaaggtctcacccttccatggaaggattgggaggggtggaatttcctttattaaaagggtttctgtccagagttttttattcctgccaccctgccctgcccgtttgtgtttgcctttacttcagaggccagtagcagagcctacctgacacagaggggacctgggggcctggcacagaatcttatgcctctcccagtgggcttttggatgggctctctgccacctccctggtgttggaggaagtgggtttctgaagcttgcagctgcttttgcaacctgctgggcctgggctgccctagttaccgggaacctcctagtcaccccatagaaggtgaactggaacatgggatgccctcttactgctcctgcttgcctgcatcagatggacacagaaggagggggctgctgctgaaggagtcaggcttgggatggagagcaagaggccaaaggactcgtctgggagcatgatcggcccctcttactagcagctccatcagctgatcagaaatcagagacagaagggaactaggttactcgttaaatcctacctattttcagcctagaaatcacatgggcgtttccagtcaagtgggaaggaagctcatttttagggcctagacctagactagttttgcctgcctttttttcctccctgctttcttctacaagccacacaacattgcttataaaaggtacttttattactatttttagaatatatacaccccatatgtaaattaccctcacttttaaagtaataatagttccttcacggaaaaaaaaatagttctcatcagaaggatgagcttctaagatcctgaattttactttctacttgattaacattttcgctttagccagagttgctatttgcaaacagctttccacttccaaagtgccactttctgaccggtttttcttcctgttttcctcaaatcatcctactcccaaataggcacccactcactaccttggcgtcgttttttgggtctgacttgactcgtcaactgctggtctctcccacctggttggaaatgtcgttggaaacttgcaaagactctccagaccttagggaacaagaggcatcactcagtccttctgggacagcttccctgtaagcaaagccaggtttgttttagattcactctggcctgaaaaaaaaagtgccttttgctgctttaaagaattggggtatatggtatgaagcagccatgtacttgtattttcctggtctttcctgggcactcttctctcttggcagatgttttcttaaagtgaacacaccagaagcactctaccccaccatatccagtcctctttgcatgcctgttgtgtgcagggtggagggtgtcccacgtgccagagcagctgggagccctgtccgctgagttacactaagcactttatttttatttattttattattattttcttttttctgagatggagtctcactctgttgcccaggctggagtgcagtggtgcagtctcagctcactgcaacctccgcctcccaagttcaggcaattctcgctgcctcagcctcccgagtagctgggactacaggcacctgctaccacgcctgactaatttttgtatttttagtagagatggggtttcgccacgttggccaggctggtctcgaactcctgacctcaggtgatctgcccgtctcgtcctcccaaagtgctgggattacaggtgtgagccaccacgcccagccaccactacgcactttaaaaccaaaaaaagctcaaagggatggatcattgtccatggctcaggagccccactgtggggtaagtgtgatgtcgatggattaatttagacagtggtgtattcatcagggcaaaggaaattcttccagaggtgatgatgcggcagatattcccagtgctctcccaaagcaagctggccctcttgtcatcctctcagtgggcggcaccagctgcccctccttccacaagtactcaagcctgtttgtaaatactgaaggaattgatggggttgaggaaaggaggtgcatgtgaccagggtcccaaggccacagcttttcagatcctaggaagcaagtggcatttgcttgagttgtggcctcggaaggagaatgtttatctgttttctaactttgctgacaccaggattctccctgtcattgagaagaaagcattatctaattaccttcaggtggtttacttattctgtaaagaatatgtgtaaatattttgtacagagccctgtatcaaataaacagccatatgtggttactaatcacctcttctgtcattccgtccttggccaccgctcagtgggaatggtctctgatctggatgctcccaccttccatgtcaggcccagaactgtgccatggtctgtggactcctggtcagccttgactggctaggagaccttgggcagtacctacagtcttgctgtttctgtttcatctgcaagaattatgacccacacactccagctgcagcccagggcactgtgatattttatacgtgtgtagatgtttttgtccacagttcctggttcatcactcccataaccctttgttataatgttgggacactgcaggcctcagaaaacggaatctctgtctgtgaccttctcctgccccatttcacttgctcaacaccagactttaatctgactgtagctcataagaccctcattccagagagggtgctgccccatacccggaaggaggaacgctgcacagagaggccaagaagcatctggacagacaggccttgctgggtttagaccttatgctttttgtccagtttcatctcaacacagctgccatgcttcagccatgcctatccaatgacgtctccataaaaggcccaggaacacgggagcttctgaagagctgaacatgtggagggaggggaacgagaacttgtccatgtgccaagagggtggcgcacccccactccatggggacagaagctccagcatttgcccaggacccgtccagacctcaccctgtgtgtatcttcatctggctgtttacttatttgtatccttttctaataatgtttgtaataaactggtaaacat

SEQ ID NO: 27785 - protein, 155 aa, Homo sapiens
MPIYFAAVIVLYREQEVLDCDCDMASVHHLLSQIPQDLPYETLISRAGDLFVQFPPSELAREAAAQQQAERTAASTFKDFELASAQQRPDMVLRQRFRGLLRPEDRTKDVLTKPRTNRFVKLAVMGLTVALGAAALAVVKSALEWAPKFQLQLFP

SEQ ID NO: 27786 - DNA, 2022 bp, Homo sapiens
gcgccgctggccgacggaggggagcctgccgatgccgagcgggtgctacgtcccgcggtcggagccgcgtcttctcccggctccgccaccagccggggctcgggtgggggcccggggccccggggcatggccctccggagtgcgcagggcgacggccccacctccggccactgggacggcggcgcggagaaggcagactttaacgccaaaaggaaaaagaaagtggcagagatacaccaggctctgaacagtgatcccactgatgtggctgcccttagacgcatggctatcagtgaaggagggctcctgactgatgagatcagacgaaaagtgtggcccaagctcctcaatgtcaatgccaatgacccacctcctatatcagggaagaacctacggcagatgagcaaggactaccaacaagtgttgctggacgtccggcggtcattgcggcggttccctcctggcatgccagaggaacagagagaagggctccaggaagaactgattgacatcatcctcctcatcttggagcgcaaccctcagctgcactactaccagggctaccatgacattgtggtcacatttctgctggtggtaggcgagaggctggcaacatccctggtagaaaaattatctacccaccacctcagggattttatggatccaacaatggacaacaccaagcatatattaaactatctgatgcccatcattgaccaggtgaatccagagctccatgacttcatgcagagtgctgaggtagggaccatctttgccctcagctggctcatcacctggtttgggcatgtcctgtctgacttcaggcacgtcgtgcggttatatgacttcttcctggcctgccacccactgatgccgatttactttgcagccgtgattgtgttgtatcgcgagcaggaagtcctggactgtgactgtgacatggcctcggtccaccacctgttgtcccagatccctcaggacttgccctatgagacactgatcagcagagcaggagacctttttgttcagtttcccccatccgaacttgctcgggaggccgctgcccaacagcaagctgagaggacggcagcctctactttcaaagactttgagctggcatcagcccagcagaggcctgatatggtgctgcggcagcggtttcggggacttctgcggcctgaagatcgaacaaaagatgtcctgaccaagccaaggaccaaccgctttgtgaaattggcagtgatggggctgacagtggcacttggagcggctgcactggctgtggtgaaaagtgccctggaatgggcccctaagtttcagctgcagctgtttccctgaaagccagagaagaccttcctcttacatcacattaaggcacccactcactaccttggcgtcgttttttgggtctgacttgactcgtcaactgctggtctctcccacctggttggaaatgtcgttggaaacttgcaaagactctccagaccttagggaacaagaggcatcactcagtccttctgggacagcttccctgcctcagaaaacggaatctctgtctgtgaccttctcctgccccatttcacttgctcaacaccagactttaatctgactgtagctcataagaccctcattccagagagggtgctgccccatacccggaaggaggaacgctgcacagagaggccaagaagcatctggacagacaggccttgctgggtttagaccttatgctttttgtccagtttcatctcaacacagctgccatgcttcagccatgcctatccaatgacgtctccataaaaggcccaggaacacgggagcttctgaagagctgaacatgtggagggaggggaacgagaacttgtccatgtgccaagagggtggcgcacccccactccatggggacagaagctccagcatttgcccaggacccgtccagacctcaccctgtgtgtatcttcatctggctgtttacttatttgtatccttttctaataatgtttgtaataaactggtaaacat

SEQ ID NO: 27787 - protein, 403 aa, Homo sapiens; identical to SEQ ID NO: 3807

SEQ ID NO: 27788 - DNA, 4020 bp, Homo sapiens
gtttccttatttatcttttagggtatgctttttatttgagaaggggtggggtaaatatgggcaagaggtgagttttgctcttacctgcaatcctttgtccggtttagtttgggcccttacattagctgctttctctctctgagtatgtgtttgtaactgaaagctaatggtgtggagaagctgtgcatgtgccattcttctaacctggctcataaggccaaggcatttttactgctggcagcactagctccagcagtaaaagaactccctgaaagaactcctgagacaggcttccctatttccagctataatacatctttggatcaagaggatcagtttttcctgtaacgtttgctttggtttaaaggggaccgtgtaactttaaaatttttttatttttatataatttcatacttactgaaaggttgtaaaaataggacaaagaattccccagataccttttacccagatttccttttgttttcacattttactacatttgctttttttttcttggagacggagtcttgctctctcgcccgggctgcagtgcagtggcacgatctcagctcactgcaagctctggttcctgggttcatgccattctcctgcctcagcctcccaagtagctgggactacaggcgcctgccaccacgcccagctaattttttgtattttttattagagacggggtttttcaccatattagccaggatggtctcgatctcctgacctcgtgatccacctgcctctgcctcccaaagtgctgggattacaggcgtgagccaccgcgcctggcctacatttgcttttttagctgctttctgtctttccttcgctttacacatagacatacactttttctctgaactatttaagagtaagttgcaaacatgacatctttttaccccaagtgtttcaggacatatttcctaaatataaggctctcatgtaatcacagtacactgagcaacatcagtaacaacactgaaaaatagttaactaattaatccacagattttattcacatttcaccatttcttcgagtaatgtgcttcactggaaaaggaaatatagatttatgcgtttctcatgctgttgtcctatatctttagccatttttaatctggaacagttcctttgtattgtatgagagttaaatttctcttcctttggggatattgggtatttcttcattgtgagattgaggtctgtgcgctgttgatagaaatcctgcagacatgatgctgagctctgtcagtgcatcacctcgggaggcagaggccgtctgtggctcccatagttgaaattctgcagttaaatactgtgtcccagcagtattaactgcagcaacttggttagggtggcatctgcagcttcccctactggaaagctagcagctgccttttcctgtatgccaggtggtatcaacagtggatcttgatatgcgttgccaaattatttgtaattcattttccttttttctctgaaaattcattgctggccttcttcgacctccttgttaactaggctgcttggtatgttcaaaggcatctctgttcctgtccccaggcatgccagaggaacagagagaagggctccaggaagaactgattgacatcatcctcctcatcttggagcgcaaccctcagctgcactactaccagggctaccatgacattgtggtcacatttctgctggtggtaggcgagaggctggcaacatccctggtagaaaaattatctacccaccacctcaggtaccagtagagaggaacacaagacgacgggcatcactcctcagccgtcctggggataactcactggcctgttttctggtcagcttttttaggagtttgagccctcgccaccctgagccctgatctaagtgtttggtaaccaggcttattgaattgtctccctccagggattttatggatccaacaatggacaacaccaagcatatattaaactatctgatgcccatcattgaccaggtgaatccagagctccatgacttcatgcagaggtacatatgtgtctgcatttctgtgtgcatgcatacacacgcccacacccccccacacctgaaacactcctcacaagccgagcgcagtttcctcattgtcttgggtggatttgttaagttctccccagttgttccagtcaccagcaatctgggtaattcagttcttggagcatttttggggactgtgctctttgggggacatagcccatcccttgagtttacatctagtggggagaggtggataaggtatgtatgccaaggtaagatgttgaggttattgccacaagagaaacacaaagtcctgtgggatccagtggcgagaaggggaaggccaacaatgggttgttttatttcccaagtaccaaagagaagaaatatttttttgcaaatcccatgtgatgttttgtttcttctctgtttagttggaaatgtgttcttggccaatgcctctttttttaaaattttttaaaaggtaatggctatgccttctttttttttgagatggagtattttctcttgttgcccaggctggagtgcaatggcatgatcttggctcactgcaacctctatcttccgggttcaagcgattcttctgcctcagcctcaagtagctgggattacaggtgtgagccaccacgcccagccaccactacgcactttaaaaccaaaaaaagctcaaagggatggatcattgtccatggctcaggagccccactgtggggtaagtgtgatgtcgatggattaatttagacagtggtgtattcatcagggcaaaggaaattcttccagaggtgatgatgcggcagatattcccagtgctctcccaaagcaagctggccctcttgtcatcctctcagtgggcggcaccagctgcccctccttccacaagtactcaagcctgtttgtaaatactgaaggaattgatggggttgaggaaaggaggtgcatgtgaccagggtcccaaggccacagcttttcagatcctaggaagcaagtggcatttgcttgagttgtggcctcggaaggagaatgtttatctgttttctaactttgctgacaccaggattctccctgtcattgagaagaaagcattatctaattaccttcaggtggtttacttattctgtaaagaatatgtgtaaatattttgtacagagccctgtatcaaataaacagccatatgtggttactaatcacctcttctgtcattccgtccttggccaccgctcagtgggaatggtctctgatctggatgctcccaccttccatgtcaggcccagaactgtgccatggtctgtggactcctggtcagccttgactggctaggagaccttgggcagtacctacagtcttgctgtttctgtttcatctgcaagaattatgacccacacactccagctgcagcccagggcactgtgatattttatacgtgtgtagatgtttttgtccacagttcctggttcatcactcccataaccctttgttataatgttgggacactgcaggcctcagaaaacggaatctctgtctgtgaccttctcctgccccatttcacttgctcaacaccagactttaatctgactgtagctcataagaccctcattccagagagggtgctgccccatacccggaaggaggaacgctgcacagagaggccaagaagcatctggacagacaggccttgctgggtttagaccttatgctttttgtccagtttcatctcaacacagctgccatgcttcagccatgcctatccaatgacgtctccataaaaggcccaggaacacgggagcttctgaagagctgaacatgtggagggaggggaacgagaacttgtccatgtgccaagagggtggcgcacccccactccatggggacagaagctccagcatttgcccaggacccgtccagacctcaccctgtgtgtatcttcatctggctgtttacttatttgtatccttttctaataatgtttgtaataaactggtaaac

SEQ ID NO: 27789 - protein, 82 aa, Homo sapiens
MEYFLLLPRLECNGMILAHCNLYLPGSSDSSASASSSWDYRCEPPRPATTTHFKTKKSSKGWIIVHGSGAPLWGKCDVDGLI

SEQ ID NO: 27790 - DNA, 4621 bp, Homo sapiens
gcctgcgcgcctgcgcgccgctggccgacggaggggagcctgccgatgccgagcgggtgctacgtcccgcggtcggagccgcgtcttctcccggctccgccaccagccggggctcgggtgggggcccggggccccggggcatggccctccggagtgcgcagggcgacggccccacctccggccactgggacggcggcgcggagaaggcagactttaacgccaaaaggaaaaagaaagtggcagagatacaccaggctctgaacagtgatcccactgatgtggctgcccttagacgcatggctatcagtgaaggagggctcctgactgatgagatcagacgaaaagtgtggcccaagctcctcaatgtcaatgccaatgacccacctcctatatcagggaagaacctacggcagatgagcaaggactaccaacaagtgttgctggacgtccggcggtcattgcggcggttccctcctggcatgccagaggaacagagagaagggctccaggaagaactgattgacatcatcctcctcatcttggagcgcaaccctcagctgcactactaccagggctaccatgacattgtggtcacatttctgctggtggtaggcgagaggctggcaacatccctggtagaaaaattatctacccaccacctcaggtaccagtagagaggaacacaagacgacgggcatcactcctcagccgtcctggggataactcactggcctgttttctggtcagcttttttaggagtttgagccctcgccaccctgagccctgatctaagtgtttggtaaccaggcttattgaattgtctccctccagggattttatggatccaacaatggacaacaccaagcatatattaaactatctgatgcccatcattgaccaggtgaatccagagctccatgacttcatgcagagtgctgaggtagggaccatctttgccctcagctggctcatcacctggtttgggcatgtcctgtctgacttcaggcacgtcgtgcggttatatgacttcttcctggcctgccacccactgatgccgatttactttgcagccgtgattgtgttgtatcgcgagcaggaagtcctggactgtgactgtgacatggcctcggtccaccacctgttgtcccagatccctcaggacttgccctatgagacactgatcagcagagcaggagacctttttgttcagtttcccccatccgaacttgctcgggaggccgctgcccaacagcaagctgagaggacggcagcctctactttcaaagactttgagctggcatcagcccagcagaggcctgatatggtgctgcggcagcggtttcggggacttctgcggcctgaagatcgaacaaaagatgtcctgaccaagccaaggaccaaccgctttgtgaaattggcagtgatggggctgacagtggcacttggagcggctgcactggctgtggtgaaaagtgccctggaatgggcccctaagtttcagctgcagctgtttccctgaaagccagagaagaccttcctcttacatcacattaaggtctcacccttccatggaaggattgggaggggtggaatttcctttattaaaagggtttctgtccagagttttttattcctgccaccctgccctgcccgtttgtgtttgcctttacttcagaggccagtagcagagcctacctgacacagaggggacctgggggcctggcacagaatcttatgcctctcccagtgggcttttggatgggctctctgccacctccctggtgttggaggaagtgggtttctgaagcttgcagctgcttttgcaacctgctgggcctgggctgccctagttaccgggaacctcctagtcaccccatagaaggtgaactggaacatgggatgccctcttactgctcctgcttgcctgcatcagatggacacagaaggagggggctgctgctgaaggagtcaggcttgggatggagagcaagaggccaaaggactcgtctgggagcatgatcggcccctcttactagcagctccatcagctgatcagaaatcagagacagaagggaactaggttactcgttaaatcctacctattttcagcctagaaatcacatgggcgtttccagtcaagtgggaaggaagctcatttttagggcctagacctagactagttttgcctgcctttttttcctccctgctttcttctacaagccacacaacattgcttataaaaggtacttttattactatttttagaatatatacaccccatatgtaaattaccctcacttttaaagtaataatagttccttcacggaaaaaaaaatagttctcatcagaaggatgagcttctaagatcctgaattttactttctacttgattaacattttcgctttagccagagttgctatttgcaaacagctttccacttccaaagtgccactttctgaccggtttttcttcctgttttcctcaaatcatcctactcccaaataggcacccactcactaccttggcgtcgttttttgggtctgacttgactcgtcaactgctggtctctcccacctggttggaaatgtcgttggaaacttgcaaagactctccagaccttagggaacaagaggcatcactcagtccttctgggacagcttccctgtaagcaaagccaggtttgttttagattcactctggcctgaaaaaaaaagtgccttttgctgctttaaagaattggggtatatggtatgaagcagccatgtacttgtattttcctggtctttcctgggcactcttctctcttggcagatgttttcttaaagtgaacacaccagaagcactctaccccaccatatccagtcctctttgcatgcctgttgtgtgcagggtggagggtgtcccacgtgccagagcagctgggagccctgtccgctgagttacactaagcactttatttttatttattttattattattttcttttttctgagatggagtctcactctgttgcccaggctggagtgcagtggtgcagtctcagctcactgcaacctccgcctcccaagttcaggcaattctcgctgcctcagcctcccgagtagctgggactacaggcacctgctaccacgcctgactaatttttgtatttttagtagagatggggtttcgccacgttggccaggctggtctcgaactcctgacctcaggtgatctgcccgtctcgtcctcccaaagtgctgggattacaggtgtgagccaccacgcccagccaccactacgcactttaaaaccaaaaaaagctcaaagggatggatcattgtccatggctcaggagccccactgtggggtaagtgtgatgtcgatggattaatttagacagtggtgtattcatcagggcaaaggaaattcttccagaggtgatgatgcggcagatattcccagtgctctcccaaagcaagctggccctcttgtcatcctctcagtgggcggcaccagctgcccctccttccacaagtactcaagcctgtttgtaaatactgaaggaattgatggggttgaggaaaggaggtgcatgtgaccagggtcccaaggccacagcttttcagatcctaggaagcaagtggcatttgcttgagttgtggcctcggaaggagaatgtttatctgttttctaactttgctgacaccaggattctccctgtcattgagaagaaagcattatctaattaccttcaggtggtttacttattctgtaaagaatatgtgtaaatattttgtacagagccctgtatcaaataaacagccatatgtggttactaatcacctcttctgtcattccgtccttggccaccgctcagtgggaatggtctctgatctggatgctcccaccttccatgtcaggcccagaactgtgccatggtctgtggactcctggtcagccttgactggctaggagaccttgggcagtacctacagtcttgctgtttctgtttcatctgcaagaattatgacccacacactccagctgcagcccagggcactgtgatattttatacgtgtgtagatgtttttgtccacagttcctggttcatcactcccataaccctttgttataatgttgggacactgcaggcctcagaaaacggaatctctgtctgtgaccttctcctgccccatttcacttgctcaacaccagactttaatctgactgtagctcataagaccctcattccagagagggtgctgccccatacccggaaggaggaacgctgcacagagaggccaagaagcatctggacagacaggccttgctgggtttagaccttatgctttttgtccagtttcatctcaacacagctgccatgcttcagccatgcctatccaatgacgtctccataaaaggcccaggaacacgggagcttctgaagagctgaacatgtggagggaggggaacgagaacttgtccatgtgccaagagggtggcgcacccccactccatggggacagaagctccagcatttgcccaggacccgtccagacctcaccctgtgtgtatcttcatctggctgtttacttatttgtatccttttctaataatgtttgtaataaactggtaaac

SEQ ID NO: 27791 - protein, 226 aa, Homo sapiens
MDPTMDNTKHILNYLMPIIDQVNPELHDFMQSAEVGTIFALSWLITWFGHVLSDFRHVVRLYDFFLACHPLMPIYFAAVIVLYREQEVLDCDCDMASVHHLLSQIPQDLPYETLISRAGDLFVQFPPSELAREAAAQQQAERTAASTFKDFELASAQQRPDMVLRQRFRGLLRPEDRTKDVLTKPRTNRFVKLAVMGLTVALGAAALAVVKSALEWAPKFQLQLFP

SEQ ID NO: 27792 - DNA, 4462 bp, Homo sapiens
agcggggcgcctgcgcgcctgcgcgccgctggccgacggaggggagcctgccgatgccgagcgggtgctacgtcccgcggtcggagccgcgtcttctcccggctccgccaccagccggggctcgggtgggggcccggggccccggggcatggccctccggagtgcgcagggcgacggccccacctccggccactgggacggcggcgcggagaaggcagactttaacgccaaaaggaaaaagaaagtggcagagatacaccaggctctgaacagtgatcccactgatgtggctgcccttagacgcatggctatcagtgaaggagggctcctgactgatgagatcagacgaaaagtgtggcccaagctcctcaatgtcaatgccaatgacccacctcctatatcagggaagaacctacggcagatgagcaaggactaccaacaagtgttgctggacgtccggcggtcattgcggcggttccctcctggcatgccagaggaacagagagaagggctccaggaagaactgattgacatcatcctcctcatcttggagcgcaaccctcagctgcactactaccagggctaccatgacattgtggtcacatttctgctggtggtaggcgagaggctggcaacatccctggtagaaaaattatctacccaccacctcagggattttatggatccaacaatggacaacaccaagcatatattaaactatctgatgcccatcattgaccaggtgaatccagagctccatgacttcatgcagagtgctgaggtagggaccatctttgccctcagctggctcatcacctggtttgggcatgtcctgtctgacttcaggcacgtcgtgcggttatatgacttcttcctggcctgccacccactgatgccgatttactttgcagccgtgattgtgttgtatcgcgagcaggaagtcctggactgtgactgtgacatggcctcggtccaccacctgttgtcccagatccctcaggacttgccctatgagacactgatcagcagagcaggagacctttttgttcagtttcccccatccgaacttgctcgggaggccgctgcccaacagcaagctgagaggacggcagcctctactttcaaagactttgagctggcatcagcccagcagaggcctgatatggtgctgcggcagcggtttcggggacttctgcggcctgaagatcgaacaaaagatgtcctgaccaagccaaggaccaaccgctttgtgaaattggcagtgatggggctgacagtggcacttggagcggctgcactggctgtggtgaaaagtgccctggaatgggcccctaagtttcagctgcagctgtttccctgaaagccagagaagaccttcctcttacatcacattaaggtctcacccttccatggaaggattgggaggggtggaatttcctttattaaaagggtttctgtccagagttttttattcctgccaccctgccctgcccgtttgtgtttgcctttacttcagaggccagtagcagagcctacctgacacagaggggacctgggggcctggcacagaatcttatgcctctcccagtgggcttttggatgggctctctgccacctccctggtgttggaggaagtgggtttctgaagcttgcagctgcttttgcaacctgctgggcctgggctgccctagttaccgggaacctcctagtcaccccatagaaggtgaactggaacatgggatgccctcttactgctcctgcttgcctgcatcagatggacacagaaggagggggctgctgctgaaggagtcaggcttgggatggagagcaagaggccaaaggactcgtctgggagcatgatcggcccctcttactagcagctccatcagctgatcagaaatcagagacagaagggaactaggttactcgttaaatcctacctattttcagcctagaaatcacatgggcgtttccagtcaagtgggaaggaagctcatttttagggcctagacctagactagttttgcctgcctttttttcctccctgctttcttctacaagccacacaacattgcttataaaaggtacttttattactatttttagaatatatacaccccatatgtaaattaccctcacttttaaagtaataatagttccttcacggaaaaaaaaatagttctcatcagaaggatgagcttctaagatcctgaattttactttctacttgattaacattttcgctttagccagagttgctatttgcaaacagctttccacttccaaagtgccactttctgaccggtttttcttcctgttttcctcaaatcatcctactcccaaataggcacccactcactaccttggcgtcgttttttgggtctgacttgactcgtcaactgctggtctctcccacctggttggaaatgtcgttggaaacttgcaaagactctccagaccttagggaacaagaggcatcactcagtccttctgggacagcttccctgtaagcaaagccaggtttgttttagattcactctggcctgaaaaaaaaagtgccttttgctgctttaaagaattggggtatatggtatgaagcagccatgtacttgtattttcctggtctttcctgggcactcttctctcttggcagatgttttcttaaagtgaacacaccagaagcactctaccccaccatatccagtcctctttgcatgcctgttgtgtgcagggtggagggtgtcccacgtgccagagcagctgggagccctgtccgctgagttacactaagcactttatttttatttattttattattattttcttttttctgagatggagtctcactctgttgcccaggctggagtgcagtggtgcagtctcagctcactgcaacctccgcctcccaagttcaggcaattctcgctgcctcagcctcccgagtagctgggactacaggcacctgctaccacgcctgactaatttttgtatttttagtagagatggggtttcgccacgttggccaggctggtctcgaactcctgacctcaggtgatctgcccgtctcgtcctcccaaagtgctgggattacaggtgtgagccaccacgcccagccaccactacgcactttaaaaccaaaaaaagctcaaagggatggatcattgtccatggctcaggagccccactgtggggtaagtgtgatgtcgatggattaatttagacagtggtgtattcatcagggcaaaggaaattcttccagaggtgatgatgcggcagatattcccagtgctctcccaaagcaagctggccctcttgtcatcctctcagtgggcggcaccagctgcccctccttccacaagtactcaagcctgtttgtaaatactgaaggaattgatggggttgaggaaaggaggtgcatgtgaccagggtcccaaggccacagcttttcagatcctaggaagcaagtggcatttgcttgagttgtggcctcggaaggagaatgtttatctgttttctaactttgctgacaccaggattctccctgtcattgagaagaaagcattatctaattaccttcaggtggtttacttattctgtaaagaatatgtgtaaatattttgtacagagccctgtatcaaataaacagccatatgtggttactaatcacctcttctgtcattccgtccttggccaccgctcagtgggaatggtctctgatctggatgctcccaccttccatgtcaggcccagaactgtgccatggtctgtggactcctggtcagccttgactggctaggagaccttgggcagtacctacagtcttgctgtttctgtttcatctgcaagaattatgacccacacactccagctgcagcccagggcactgtgatattttatacgtgtgtagatgtttttgtccacagttcctggttcatcactcccataaccctttgttataatgttgggacactgcaggcctcagaaaacggaatctctgtctgtgaccttctcctgccccatttcacttgctcaacaccagactttaatctgactgtagctcataagaccctcattccagagagggtgctgccccatacccggaaggaggaacgctgcacagagaggccaagaagcatctggacagacaggccttgctgggtttagaccttatgctttttgtccagtttcatctcaacacagctgccatgcttcagccatgcctatccaatgacgtctccataaaaggcccaggaacacgggagcttctgaagagctgaacatgtggagggaggggaacgagaacttgtccatgtgccaagagggtggcgcacccccactccatggggacagaagctccagcatttgcccaggacccgtccagacctcaccctgtgtgtatcttcatctggctgtttacttatttgtatccttttctaataatgtttgtaataaactggtaaac

SEQ ID NO: 27793 - protein, 403 aa, Homo sapiens; identical to SEQ ID NO: 3807

SEQ ID NO: 27794 - DNA, 4375 bp, Homo sapiens
acccaccacctcaggtaccagtagagaggaacacaagacgacgggcatcactcctcagccgtcctggggataactcactggcctgttttctggtcagcttttttaggagtttgagccctcgccaccctgagccctgatctaagtgtttggtaaccaggcttattgaattgtctccctccagggattttatggatccaacaatggacaacaccaagcatatattaaactatctgatgcccatcattgaccaggtgaatccagagctccatgacttcatgcagaggtacatatgtgtctgcatttctgtgtgcatgcatacacacgcccacacccccccacacctgaaacactcctcacaagccgagcgcagtttcctcattgtcttgggtggatttgttaagttctccccagttgttccagtcaccagcaatctgggtaattcagttcttggagcatttttggggactgtgctctttgggggacatagcccatcccttgagtttacatctagtggggagaggtggataaggtatgtatgccaaggtaagatgttgaggttattgccacaagagaaacacaaagtcctgtgggatccagtggcgagaaggggaaggccaacaatgggttgttttatttcccaagtaccaaagagaagaaatatttttttgcaaatcccatgtgatgttttgtttcttctctgtttagttggaaatgtgttcttggccaatgcctctttttttaaaattttttaaaaggtaatggctatgccttctttttttttgagatggagtattttctcttgttgcccaggctggagtgcaatggcatgatcttggctcactgcaacctctatcttccgggttcaagcgattcttctgcctcagcctcaagtagctgggattacaggcatgcgccaccacgctcggctaattttgtatttttagtagagacagggtttctccatgttggtcaggctggtctcgagctcccgatgtcaggtgatccgcccgctttggcctcccaaagtgctgagattataggcgtgactcaccgtgtctggcagctacatcttaagatatttcagttgtctcatgttaacagaaaaattaatgcagtcatgttttcaggcttgggaatatgtacctgtgccccccagaagggtaagacttagtcagaaggagaatcatggcgtagttctctgaaaacaactgcttctcgttcctgtagttgacatttgttggccagtaggcgagcacccagtgagataaagcagccaggaccctgttgtggtgttagtgttgtggtacaccttaaagactttgtattaaatattttgtaaggagaagatgctgaattcctaggtaactgaattttccagaaatcttattcctaaatgcttccttctcaccagcgctataaggcccagagagagggaagggatggcccacaggacctgacacctgcctttcctttgtttctagtgctgaggtagggaccatctttgccctcagctggctcatcacctggtttgggcatgtcctgtctgacttcaggcacgtcgtgcggttatatgacttcttcctggcctgccacccactgatgccgatttactttgcagccgtgattgtgttgtatcgcgagcaggaagtcctggactgtgactgtgacatggcctcggtccaccacctgttgtcccagatccctcaggacttgccctatgagacactgatcagcagagcaggagacctttttgttcagtttcccccatccgaacttgctcgggaggccgctgcccaacagcaagctgagaggacggcagcctctactttcaaagactttgagctggcatcagcccagcagaggcctgatatggtgctgcggcagcggtttcggggacttctgcggcctgaagatcgaacaaaagatgtcctgaccaagccaaggaccaaccgctttgtgaaattggcagtgatggggctgacagtggcacttggagcggctgcactggctgtggtgaaaagtgccctggaatgggcccctaagtttcagctgcagctgtttccctgaaagccagagaagaccttcctcttacatcacattaaggtctcacccttccatggaaggattgggaggggtggaatttcctttattaaaagggtttctgtccagagttttttattcctgccaccctgccctgcccgtttgtgtttgcctttacttcagaggccagtagcagagcctacctgacacagaggggacctgggggcctggcacagaatcttatgcctctcccagtgggcttttggatgggctctctgccacctccctggtgttggaggaagtgggtttctgaagcttgcagctgcttttgcaacctgctgggcctgggctgccctagttaccgggaacctcctagtcaccccatagaaggtgaactggaacatgggatgccctcttactgctcctgcttgcctgcatcagatggacacagaaggagggggctgctgctgaaggagtcaggcttgggatggagagcaagaggccaaaggactcgtctgggagcatgatcggcccctcttactagcagctccatcagctgatcagaaatcagagacagaagggaactaggttactcgttaaatcctacctattttcagcctagaaatcacatgggcgtttccagtcaagtgggaaggaagctcatttttagggcctagacctagactagttttgcctgcctttttttcctccctgctttcttctacaagccacacaacattgcttataaaaggtacttttattactatttttagaatatatacaccccatatgtaaattaccctcacttttaaagtaataatagttccttcacggaaaaaaaaatagttctcatcagaaggatgagcttctaagatcctgaattttactttctacttgattaacattttcgctttagccagagttgctatttgcaaacagctttccacttccaaagtgccactttctgaccggtttttcttcctgttttcctcaaatcatcctactcccaaataggcacccactcactaccttggcgtcgttttttgggtctgacttgactcgtcaactgctggtctctcccacctggttggaaatgtcgttggaaacttgcaaagactctccagaccttagggaacaagaggcatcactcagtccttctgggacagcttccctgtaagcaaagccaggtttgttttagattcactctggcctgaaaaaaaaagtgccttttgctgctttaaagaattggggtatatggtatgaagcagccatgtacttgtattttcctggtctttcctgggcactcttctctcttggcagatgttttcttaaagtgaacacaccagaagcactctaccccaccatatccagtcctctttgcatgcctgttgtgtgcagggtggagggtgtcccacgtgccagagcagctgggagccctgtccgctgagttacactaagcactttatttttatttattttattattattttcttttttctgagatggagtctcactctgttgcccaggctggagtgcagtggtgcagtctcagctcactgcaacctccgcctcccaagttcaggcaattctcgctgcctcagcctcccgagtagctgggactacaggcacctgctaccacgcctgactaatttttgtatttttagtagagatggggtttcgccacgttggccaggctggtctcgaactcctgacctcaggtgatctgcccgtctcgtcctcccaaagtgctgggattacaggtgtgagccaccacgcccagccaccactacgcactttaaaaccaaaaaaagctcaaagggatggatcattgtccatggctcaggagccccactgtggggtaagtgtgatgtcgatggattaatttagacagtggtgtattcatcagggcaaaggaaattcttccagaggtgatgatgcggcagatattcccagtgctctcccaaagcaagctggccctcttgtcatcctctcagtgggcggcaccagctgcccctccttccacaagtactcaagcctgtttgtaaatactgaaggaattgatggggttgaggaaaggaggtgcatgtgaccagggtcccaaggccacagcttttcagatcctaggaagcaagtggcatttgcttgagttgtggcctcggaaggagaatgtttatctgttttctaactttgctgacaccaggattctccctgtcattgagaagaaagcattatctaattaccttcaggtggtttacttattctgtaaagaatatgtgtaaatattttgtacagagccctgtatcaaataaacagccatatgtggttactaatcacc

SEQ ID NO: 27795 - protein, 155 aa, Homo sapiens; identical to SEQ ID NO: 27785

SEQ ID NO: 27796 - DNA, 3226 bp, Homo sapiens
gtttccttatttatcttttagggtatgctttttatttgagaaggggtggggtaaatatgggcaagaggtgagttttgctcttacctgcaatcctttgtccggtttagtttgggcccttacattagctgctttctctctctgagtatgtgtttgtaactgaaagctaatggtgtggagaagctgtgcatgtgccattcttctaacctggctcataaggccaaggcatttttactgctggcagcactagctccagcagtaaaagaactccctgaaagaactcctgagacaggcttccctatttccagctataatacatctttggatcaagaggatcagtttttcctgtaacgtttgctttggtttaaaggggaccgtgtaactttaaaatttttttatttttatataatttcatacttactgaaaggttgtaaaaataggacaaagaattccccagataccttttacccagatttccttttgttttcacattttactacatttgctttttttttcttggagacggagtcttgctctctcgcccgggctgcagtgcagtggcacgatctcagctcactgcaagctctggttcctgggttcatgccattctcctgcctcagcctcccaagtagctgggactacaggcgcctgccaccacgcccagctaattttttgtattttttattagagacggggtttttcaccatattagccaggatggtctcgatctcctgacctcgtgatccacctgcctctgcctcccaaagtgctgggattacaggcgtgagccaccgcgcctggcctacatttgcttttttagctgctttctgtctttccttcgctttacacatagacatacactttttctctgaactatttaagagtaagttgcaaacatgacatctttttaccccaagtgtttcaggacatatttcctaaatataaggctctcatgtaatcacagtacactgagcaacatcagtaacaacactgaaaaatagttaactaattaatccacagattttattcacatttcaccatttcttcgagtaatgtgcttcactggaaaaggaaatatagatttatgcgtttctcatgctgttgtcctatatctttagccatttttaatctggaacagttcctttgtattgtatgagagttaaatttctcttcctttggggatattgggtatttcttcattgtgagattgaggtctgtgcgctgttgatagaaatcctgcagacatgatgctgagctctgtcagtgcatcacctcgggaggcagaggccgtctgtggctcccatagttgaaattctgcagttaaatactgtgtcccagcagtattaactgcagcaacttggttagggtggcatctgcagcttcccctactggaaagctagcagctgccttttcctgtatgccaggtggtatcaacagtggatcttgatatgcgttgccaaattatttgtaattcattttccttttttctctgaaaattcattgctggccttcttcgacctccttgttaactaggctgcttggtatgttcaaaggcatctctgttcctgtccccaggcatgccagaggaacagagagaagggctccaggaagaactgattgacatcatcctcctcatcttggagcgcaaccctcagctgcactactaccagggctaccatgacattgtggtcacatttctgctggtggtaggcgagaggctggcaacatccctggtagaaaaattatctacccaccacctcaggtaccagtagagaggaacacaagacgacgggcatcactcctcagccgtcctggggataactcactggcctgttttctggtcagcttttttaggagtttgagccctcgccaccctgagccctgatctaagtgtttggtaaccaggcttattgaattgtctccctccagggattttatggatccaacaatggacaacaccaagcatatattaaactatctgatgcccatcattgaccaggtgaatccagagctccatgacttcatgcagaggtacatatgtgtctgcatttctgtgtgcatgcatacacacgcccacacccccccacacctgaaacactcctcacaagccgagcgcagtttcctcattgtcttgggtggatttgttaagttctccccagttgttccagtcaccagcaatctgggtaattcagttcttggagcatttttggggactgtgctctttgggggacatagcccatcccttgagtttacatctagtggggagaggtggataaggtatgtatgccaaggtaagatgttgaggttattgccacaagagaaacacaaagtcctgtgggatccagtggcgagaaggggaaggccaacaatgggttgttttatttcccaagtaccaaagagaagaaatatttttttgcaaatcccatgtgatgttttgtttcttctctgtttagttggaaatgtgttcttggccaatgcctctttttttaaaattttttaaaaggtaatggctatgccttctttttttttgagatggagtattttctcttgttgcccaggctggagtgcaatggcatgatcttggctcactgcaacctctatcttccgggttcaagcgattcttctgcctcagcctcaagtagctgggattacaggtgtgagccaccacgcccagccaccactacgcactttaaaaccaaaaaaagctcaaagggatggatcattgtccatggctcaggagccccactgtggggtaagtgtgatgtcgatggattaatttagacagtggtgtattcatcagggcaaaggaaattcttccagaggtgatgatgcggcagatattcccagtgctctcccaaagcaagctggccctcttgtcatcctctcagtgggcggcaccagctgcccctccttccacaagtactcaagcctgtttgtaaatactgaaggaattgatggggttgaggaaaggaggtgcatgtgaccagggtcccaaggccacagcttttcagatcctaggaagcaagtggcatttgcttgagttgtggcctcggaaggagaatgtttatctgttttctaactttgctgacaccaggattctccctgtcattgagaagaaagcattatctaattaccttcaggtggtttacttattctgtaaagaatatgtgtaaatattttgtacagagccctgtatcaaataaacagccatatgtggttactaatcacc

SEQ ID NO: 27797 - protein, 82 aa, Homo sapiens; identical to SEQ ID NO: 27789

SEQ ID NO: 27798 - DNA, 3827 bp, Homo sapiens
gcctgcgcgcctgcgcgccgctggccgacggaggggagcctgccgatgccgagcgggtgctacgtcccgcggtcggagccgcgtcttctcccggctccgccaccagccggggctcgggtgggggcccggggccccggggcatggccctccggagtgcgcagggcgacggccccacctccggccactgggacggcggcgcggagaaggcagactttaacgccaaaaggaaaaagaaagtggcagagatacaccaggctctgaacagtgatcccactgatgtggctgcccttagacgcatggctatcagtgaaggagggctcctgactgatgagatcagacgaaaagtgtggcccaagctcctcaatgtcaatgccaatgacccacctcctatatcagggaagaacctacggcagatgagcaaggactaccaacaagtgttgctggacgtccggcggtcattgcggcggttccctcctggcatgccagaggaacagagagaagggctccaggaagaactgattgacatcatcctcctcatcttggagcgcaaccctcagctgcactactaccagggctaccatgacattgtggtcacatttctgctggtggtaggcgagaggctggcaacatccctggtagaaaaattatctacccaccacctcaggtaccagtagagaggaacacaagacgacgggcatcactcctcagccgtcctggggataactcactggcctgttttctggtcagcttttttaggagtttgagccctcgccaccctgagccctgatctaagtgtttggtaaccaggcttattgaattgtctccctccagggattttatggatccaacaatggacaacaccaagcatatattaaactatctgatgcccatcattgaccaggtgaatccagagctccatgacttcatgcagagtgctgaggtagggaccatctttgccctcagctggctcatcacctggtttgggcatgtcctgtctgacttcaggcacgtcgtgcggttatatgacttcttcctggcctgccacccactgatgccgatttactttgcagccgtgattgtgttgtatcgcgagcaggaagtcctggactgtgactgtgacatggcctcggtccaccacctgttgtcccagatccctcaggacttgccctatgagacactgatcagcagagcaggagacctttttgttcagtttcccccatccgaacttgctcgggaggccgctgcccaacagcaagctgagaggacggcagcctctactttcaaagactttgagctggcatcagcccagcagaggcctgatatggtgctgcggcagcggtttcggggacttctgcggcctgaagatcgaacaaaagatgtcctgaccaagccaaggaccaaccgctttgtgaaattggcagtgatggggctgacagtggcacttggagcggctgcactggctgtggtgaaaagtgccctggaatgggcccctaagtttcagctgcagctgtttccctgaaagccagagaagaccttcctcttacatcacattaaggtctcacccttccatggaaggattgggaggggtggaatttcctttattaaaagggtttctgtccagagttttttattcctgccaccctgccctgcccgtttgtgtttgcctttacttcagaggccagtagcagagcctacctgacacagaggggacctgggggcctggcacagaatcttatgcctctcccagtgggcttttggatgggctctctgccacctccctggtgttggaggaagtgggtttctgaagcttgcagctgcttttgcaacctgctgggcctgggctgccctagttaccgggaacctcctagtcaccccatagaaggtgaactggaacatgggatgccctcttactgctcctgcttgcctgcatcagatggacacagaaggagggggctgctgctgaaggagtcaggcttgggatggagagcaagaggccaaaggactcgtctgggagcatgatcggcccctcttactagcagctccatcagctgatcagaaatcagagacagaagggaactaggttactcgttaaatcctacctattttcagcctagaaatcacatgggcgtttccagtcaagtgggaaggaagctcatttttagggcctagacctagactagttttgcctgcctttttttcctccctgctttcttctacaagccacacaacattgcttataaaaggtacttttattactatttttagaatatatacaccccatatgtaaattaccctcacttttaaagtaataatagttccttcacggaaaaaaaaatagttctcatcagaaggatgagcttctaagatcctgaattttactttctacttgattaacattttcgctttagccagagttgctatttgcaaacagctttccacttccaaagtgccactttctgaccggtttttcttcctgttttcctcaaatcatcctactcccaaataggcacccactcactaccttggcgtcgttttttgggtctgacttgactcgtcaactgctggtctctcccacctggttggaaatgtcgttggaaacttgcaaagactctccagaccttagggaacaagaggcatcactcagtccttctgggacagcttccctgtaagcaaagccaggtttgttttagattcactctggcctgaaaaaaaaagtgccttttgctgctttaaagaattggggtatatggtatgaagcagccatgtacttgtattttcctggtctttcctgggcactcttctctcttggcagatgttttcttaaagtgaacacaccagaagcactctaccccaccatatccagtcctctttgcatgcctgttgtgtgcagggtggagggtgtcccacgtgccagagcagctgggagccctgtccgctgagttacactaagcactttatttttatttattttattattattttcttttttctgagatggagtctcactctgttgcccaggctggagtgcagtggtgcagtctcagctcactgcaacctccgcctcccaagttcaggcaattctcgctgcctcagcctcccgagtagctgggactacaggcacctgctaccacgcctgactaatttttgtatttttagtagagatggggtttcgccacgttggccaggctggtctcgaactcctgacctcaggtgatctgcccgtctcgtcctcccaaagtgctgggattacaggtgtgagccaccacgcccagccaccactacgcactttaaaaccaaaaaaagctcaaagggatggatcattgtccatggctcaggagccccactgtggggtaagtgtgatgtcgatggattaatttagacagtggtgtattcatcagggcaaaggaaattcttccagaggtgatgatgcggcagatattcccagtgctctcccaaagcaagctggccctcttgtcatcctctcagtgggcggcaccagctgcccctccttccacaagtactcaagcctgtttgtaaatactgaaggaattgatggggttgaggaaaggaggtgcatgtgaccagggtcccaaggccacagcttttcagatcctaggaagcaagtggcatttgcttgagttgtggcctcggaaggagaatgtttatctgttttctaactttgctgacaccaggattctccctgtcattgagaagaaagcattatctaattaccttcaggtggtttacttattctgtaaagaatatgtgtaaatattttgtacagagccctgtatcaaataaacagccatatgtggttactaatcacc

SEQ ID NO: 27799 - protein, 226 aa, Homo sapiens; identical to SEQ ID NO: 27791

SEQ ID NO: 27800 - DNA, 3668 bp, Homo sapiens
agcggggcgcctgcgcgcctgcgcgccgctggccgacggaggggagcctgccgatgccgagcgggtgctacgtcccgcggtcggagccgcgtcttctcccggctccgccaccagccggggctcgggtgggggcccggggccccggggcatggccctccggagtgcgcagggcgacggccccacctccggccactgggacggcggcgcggagaaggcagactttaacgccaaaaggaaaaagaaagtggcagagatacaccaggctctgaacagtgatcccactgatgtggctgcccttagacgcatggctatcagtgaaggagggctcctgactgatgagatcagacgaaaagtgtggcccaagctcctcaatgtcaatgccaatgacccacctcctatatcagggaagaacctacggcagatgagcaaggactaccaacaagtgttgctggacgtccggcggtcattgcggcggttccctcctggcatgccagaggaacagagagaagggctccaggaagaactgattgacatcatcctcctcatcttggagcgcaaccctcagctgcactactaccagggctaccatgacattgtggtcacatttctgctggtggtaggcgagaggctggcaacatccctggtagaaaaattatctacccaccacctcagggattttatggatccaacaatggacaacaccaagcatatattaaactatctgatgcccatcattgaccaggtgaatccagagctccatgacttcatgcagagtgctgaggtagggaccatctttgccctcagctggctcatcacctggtttgggcatgtcctgtctgacttcaggcacgtcgtgcggttatatgacttcttcctggcctgccacccactgatgccgatttactttgcagccgtgattgtgttgtatcgcgagcaggaagtcctggactgtgactgtgacatggcctcggtccaccacctgttgtcccagatccctcaggacttgccctatgagacactgatcagcagagcaggagacctttttgttcagtttcccccatccgaacttgctcgggaggccgctgcccaacagcaagctgagaggacggcagcctctactttcaaagactttgagctggcatcagcccagcagaggcctgatatggtgctgcggcagcggtttcggggacttctgcggcctgaagatcgaacaaaagatgtcctgaccaagccaaggaccaaccgctttgtgaaattggcagtgatggggctgacagtggcacttggagcggctgcactggctgtggtgaaaagtgccctggaatgggcccctaagtttcagctgcagctgtttccctgaaagccagagaagaccttcctcttacatcacattaaggtctcacccttccatggaaggattgggaggggtggaatttcctttattaaaagggtttctgtccagagttttttattcctgccaccctgccctgcccgtttgtgtttgcctttacttcagaggccagtagcagagcctacctgacacagaggggacctgggggcctggcacagaatcttatgcctctcccagtgggcttttggatgggctctctgccacctccctggtgttggaggaagtgggtttctgaagcttgcagctgcttttgcaacctgctgggcctgggctgccctagttaccgggaacctcctagtcaccccatagaaggtgaactggaacatgggatgccctcttactgctcctgcttgcctgcatcagatggacacagaaggagggggctgctgctgaaggagtcaggcttgggatggagagcaagaggccaaaggactcgtctgggagcatgatcggcccctcttactagcagctccatcagctgatcagaaatcagagacagaagggaactaggttactcgttaaatcctacctattttcagcctagaaatcacatgggcgtttccagtcaagtgggaaggaagctcatttttagggcctagacctagactagttttgcctgcctttttttcctccctgctttcttctacaagccacacaacattgcttataaaaggtacttttattactatttttagaatatatacaccccatatgtaaattaccctcacttttaaagtaataatagttccttcacggaaaaaaaaatagttctcatcagaaggatgagcttctaagatcctgaattttactttctacttgattaacattttcgctttagccagagttgctatttgcaaacagctttccacttccaaagtgccactttctgaccggtttttcttcctgttttcctcaaatcatcctactcccaaataggcacccactcactaccttggcgtcgttttttgggtctgacttgactcgtcaactgctggtctctcccacctggttggaaatgtcgttggaaacttgcaaagactctccagaccttagggaacaagaggcatcactcagtccttctgggacagcttccctgtaagcaaagccaggtttgttttagattcactctggcctgaaaaaaaaagtgccttttgctgctttaaagaattggggtatatggtatgaagcagccatgtacttgtattttcctggtctttcctgggcactcttctctcttggcagatgttttcttaaagtgaacacaccagaagcactctaccccaccatatccagtcctctttgcatgcctgttgtgtgcagggtggagggtgtcccacgtgccagagcagctgggagccctgtccgctgagttacactaagcactttatttttatttattttattattattttcttttttctgagatggagtctcactctgttgcccaggctggagtgcagtggtgcagtctcagctcactgcaacctccgcctcccaagttcaggcaattctcgctgcctcagcctcccgagtagctgggactacaggcacctgctaccacgcctgactaatttttgtatttttagtagagatggggtttcgccacgttggccaggctggtctcgaactcctgacctcaggtgatctgcccgtctcgtcctcccaaagtgctgggattacaggtgtgagccaccacgcccagccaccactacgcactttaaaaccaaaaaaagctcaaagggatggatcattgtccatggctcaggagccccactgtggggtaagtgtgatgtcgatggattaatttagacagtggtgtattcatcagggcaaaggaaattcttccagaggtgatgatgcggcagatattcccagtgctctcccaaagcaagctggccctcttgtcatcctctcagtgggcggcaccagctgcccctccttccacaagtactcaagcctgtttgtaaatactgaaggaattgatggggttgaggaaaggaggtgcatgtgaccagggtcccaaggccacagcttttcagatcctaggaagcaagtggcatttgcttgagttgtggcctcggaaggagaatgtttatctgttttctaactttgctgacaccaggattctccctgtcattgagaagaaagcattatctaattaccttcaggtggtttacttattctgtaaagaatatgtgtaaatattttgtacagagccctgtatcaaataaacagccatatgtggttactaatcacc

SEQ ID NO: 27801 - protein, 403 aa, Homo sapiens; identical to SEQ ID NO: 3807

SEQ ID NO: 27802 - DNA, 2167 bp, Homo sapiens
acccaccacctcaggtaccagtagagaggaacacaagacgacgggcatcactcctcagccgtcctggggataactcactggcctgttttctggtcagcttttttaggagtttgagccctcgccaccctgagccctgatctaagtgtttggtaaccaggcttattgaattgtctccctccagggattttatggatccaacaatggacaacaccaagcatatattaaactatctgatgcccatcattgaccaggtgaatccagagctccatgacttcatgcagaggtacatatgtgtctgcatttctgtgtgcatgcatacacacgcccacacccccccacacctgaaacactcctcacaagccgagcgcagtttcctcattgtcttgggtggatttgttaagttctccccagttgttccagtcaccagcaatctgggtaattcagttcttggagcatttttggggactgtgctctttgggggacatagcccatcccttgagtttacatctagtggggagaggtggataaggtatgtatgccaaggtaagatgttgaggttattgccacaagagaaacacaaagtcctgtgggatccagtggcgagaaggggaaggccaacaatgggttgttttatttcccaagtaccaaagagaagaaatatttttttgcaaatcccatgtgatgttttgtttcttctctgtttagttggaaatgtgttcttggccaatgcctctttttttaaaattttttaaaaggtaatggctatgccttctttttttttgagatggagtattttctcttgttgcccaggctggagtgcaatggcatgatcttggctcactgcaacctctatcttccgggttcaagcgattcttctgcctcagcctcaagtagctgggattacaggcatgcgccaccacgctcggctaattttgtatttttagtagagacagggtttctccatgttggtcaggctggtctcgagctcccgatgtcaggtgatccgcccgctttggcctcccaaagtgctgagattataggcgtgactcaccgtgtctggcagctacatcttaagatatttcagttgtctcatgttaacagaaaaattaatgcagtcatgttttcaggcttgggaatatgtacctgtgccccccagaagggtaagacttagtcagaaggagaatcatggcgtagttctctgaaaacaactgcttctcgttcctgtagttgacatttgttggccagtaggcgagcacccagtgagataaagcagccaggaccctgttgtggtgttagtgttgtggtacaccttaaagactttgtattaaatattttgtaaggagaagatgctgaattcctaggtaactgaattttccagaaatcttattcctaaatgcttccttctcaccagcgctataaggcccagagagagggaagggatggcccacaggacctgacacctgcctttcctttgtttctagtgctgaggtagggaccatctttgccctcagctggctcatcacctggtttgggcatgtcctgtctgacttcaggcacgtcgtgcggttatatgacttcttcctggcctgccacccactgatgccgatttactttgcagccgtgattgtgttgtatcgcgagcaggaagtcctggactgtgactgtgacatggcctcggtccaccacctgttgtcccagatccctcaggacttgccctatgagacactgatcagcagagcaggagacctttttgttcagtttcccccatccgaacttgctcgggaggccgctgcccaacagcaagctgagaggacggcagcctctactttcaaagactttgagctggcatcagcccagcagaggcctgatatggtgctgcggcagcggtttcggggacttctgcggcctgaagatcgaacaaaagatgtcctgaccaagccaaggaccaaccgctttgtgaaattggcagtgatggggctgacagtggcacttggagcggctgcactggctgtggtgaaaagtgccctggaatgggcccctaagtttcagctgcagctgtttccctgaaagccagagaagaccttcctcttacatcacattaaggtctcacccttccatggaaggattgggaggggtggaatttcctttattaaaagggtttctgtcc

SEQ ID NO: 27803 - protein, 155 aa, Homo sapiens; identical to SEQ ID NO: 27785

SEQ ID NO: 27804 - DNA, 621 bp, Homo sapiens
cttgggatgcctgttccagctgccgctggcgctcagcagtaacggccctatctgtctcctgatgcctgagcagagagccccagtttgagggacagcgggatatccaccatgctgctgtgagactcgggcagttgtgactggtttagaagtggatacacagggagaggtcttctggaaaaggtcttctggagagctgagatcagaagacaatcaactggcttcaaatctaaggagagacaggcacaaaatggaagagatgacatgggcactggttacctggtaaacacaagtggacactggtgagggactgggtcatggagactgcagtagtctttacccttttcagcgtttttcaccatgaaccccactgggagcacacagaagattggagaaagttttaataaaatgtctcaagatctggaagaagacaatggcagctactgtgaaaggatcacagtgctccacccagacccttccctgtatcccctaccggacaaaagccttagtctgtggagggaaggacaccaaatcctgtcacccccttggatgaagctcccttgcatctgggggaatgaaacaggaacaaaacaaaactttccctgggcaggggcaggaatacac

SEQ ID NO: 27805 - protein, 87 aa, Homo sapiens
MNPTGSTQKIGESFNKMSQDLEEDNGSYCERITVLHPDPSLYPLPDKSLSLWREGHQILSPPWMKLPCIWGNETGTKQNFPWAGAGI

SEQ ID NO: 27806 - DNA, 3212 bp, Homo sapiens
agtgccaaccccttcaccccttggacctctggcaggctcaccagtgattgctgctgccaacccccttgggatgcctgttccagctgccgctggcgctcagcagtaacggccctatctgtctcctgatgcctgagcagaggtgggggagtccaccctctccttgatgcagcttgcgcctggcggggaggggtgaaacacttcagaagcaccgtgtctgaaccgttgcttgtggatttatagtagttcagtcataaaaaaaaaattataataggctgattttcttttttctttttttttttaactcgaacttttcataactcaggggattccctgaaaaattacctgcaggtggaatatttcatggacaaatttttttttctcccctcccaaatttagttcctcatcacaaaagaacaaagataaaccagcctcaatcccggctgctgcatttaggtggagacttcttcccattcccaccattgttcctccaccgtcccacactttagggggttggtatctcgtgctcttctccagagattacaaaaatgtagcttctcaggggaggcaggaagaaaggaaggaaggaaagaaggaagggaggacccaatctataggagcagtggactgcttgctggtcgcttacatcatatctccattgaagctgaaatggtagacctgtaattgtgggaaaactataaactctcttgttacagccccgccaccccttgctgtgtgtatatatataatactttgtccttcatatgtgaaagatccagtgttggaattctttggtgtaaataaacgtttggttttatttatcaaggttagatttaagttccctgtgtaaaggtcttgctgggtgggtgtctcatgttcacatctgaggggcctgcagccctgtaccgtggaggcttcccaaggcccccattttatacacccctcgttcgacccatggtaccgggcagagcagagaggccttaaaaaaaaagcaccacaagccaaagcgtctctggggattaaggatcctttgccataaaactcattttgtgtctcagcagtgcagggattggggatggaaaaagtcgccagtttttgtgtgtttgtgtgtgtgtgtaaagtggactttccactgtaatccaaccacctaagtttatcaggtgcttcactgaggaagcctagttttttaagcacaatagcaaaaccatcagctctgtattttctcctgttatttcattacagtagctgcttgtgggaactaggaaaaattcttccaacatattttaaggcctaaaatcttagttccccattctcctaccttatagattcacaggcctttctcgcctaggcatcatagataaacgtaattgtttggggagttgaatttaatgaacttatctaactttgtaacccatcttggctttagtaactttatcaaggtggtggctttagtgaatataatggtaaactttagaggacgctaaagcctccttttatagcgcttctcaacggtagggagagctgaagggaaaacattctgactgtgtggcagggtgattttcttccttatgaccacttacagtggatatttattgtacttgacccttttatgccctagaatgctgtgagggttaccatgttgaatttgtgcagaagctaaaagcaccagatgtgccagagatgcaatttgtgattatgtttgcactggattgtgatttgaacaggacacttataactaatgagttctttcttttgaggtggggagagggttgtaaatcaagacttcataccctatccttgtagctcggaaattgaggtgtagcttaggctgatgcggagagctgcagacagctggacctccttacacccatcagaccttggaataaaccgaaggtgaatgcagaggactctgaggtgccacccaagagccttttaaaataaatagaagtttttaaaaatgctacttaagagtcactgcagaagcatggagagagagaaaaaaaaaaaagacccaattgggtggggggtgggggggaggcaagggtttacagagtaacaacttacgtgttgttgtaaattacctcatctgtataccttgtattgggacactatttctcagcactacctgtgtctgcattgcttagatggcaggaaatggaatggccaacatgaaaggttatgttggcaattactctgaaagattttttaaagtatttttaaactttgtttgaagtggtccctcccctcttcctctgcttttttttaagtttgaagccagaaggccctccccaccttgctttattggttgtaattgtattgtaattggtatgactaaaccataactgtgctgggaagaagttgtgccatgaaggtctttaattttttttaataaaaacatttaaataaatgaaatgtccctgcagcctgagcaatatgcttctccaaccgacaccgtgtgtgatagatggctccgttttcacgttttgaattctgtttcttgtacttgaaatgcctgtccagcttacataagatagattaaattgttagagtgggactgtcagaggaatatatcttgtaaagtagatcctcagggtatggctaattactatagtcctaaagtagcagagaaaattagagattggttgacagatttgggaattttaatttcttcttagtttttaactttcatctttgcttcaccttttgacaagtatggttataattagaattgaccatttaagcatctcttgaaaaacctgattttgtcccaccagcaaattctctcccaagactggaattgggtttgcatagtagagagcctgtcttcccagggccttttcctagttaaagaaacacttaactaaaaaggctgtgtggtaaggtcatgctcagttccttcctcaaaaaatgagtctaaaattggtttatcctgaatccgacttcccccactgtcatcacttacccttgcccttctttttcctcagaacacctgaacttttgttgtattattttgtatctccccacttgcatgtaaactccctggtgaccttgcatgtcttatgcaatcctcattaaaaccttttgtttttttttttaagtgggttcgttttccctcaggatcgaagagtattgaatggaatggcacgaggaaaatatttaacaccctacttggcttgtaataataggtgcttaataaattgtagttccactctcca

SEQ ID NO: 27807 - protein, 55 aa, Homo sapiens
MSLKLVYPESDFPHCHHLPLPFFFLRTPELLLYYFVSPHLHVNSLVTLHVLCNPH

SEQ ID NO: 27808 - DNA, 5226 bp, Homo sapiens
cccgcctcctggtaggagggggtttccgcttccggcagcagcggctgcagcctcgctctggtccctgcggctggcggccgagccgtgtgtctcctcctccatcgccgccatattgtctgtgtgagcagaggggagagcggccgccgccgctgccgcttccaccacagctctatcaaggcttgtcaagcagtgtgctcatcacatggtaaatcatgcagcgtggaacctcataaaatctccaagaaacatcattcacccatactgactagtttcacatctctttgtttgaagaaaacaggtctgaaacaaggtcttacccccagctgcttctgaacacagtgactgccagatctccaaacatcaagtccagctttgtccgccaacctgtctgacatgtcgggacccgtgccaagcagggccagagtttacacagatgttaatacacacagacctcgagaatactgggattacgagtcacatgtggtggaatggggaaatcaagatgactaccagctggttcgaaaattaggccgaggtaaatacagtgaagtatttgaagccatcaacatcacaaataatgaaaaagttgttgttaaaattctcaagccagtaaaaaagaagaaaattaagcgtgaaataaagattttggagaatttgagaggaggtcccaacatcatcacactggcagacattgtaaaagaccctgtgtcacgaacccccgccttggtttttgaacacgtaaacaacacagacttcaagcaattgtaccagacgttaacagactatgatattcgattttacatgtatgagattctgaaggccctggattattgtcacagcatgggaattatgcacagagatgtcaagccccataatgtcatgattgatcatgagcacagaaagctacgactaatagactggggtttggctgagttttatcatcctggccaagaatataatgtccgagttgcttcccgatacttcaaaggtcctgagctacttgtagactatcagatgtacgattatagtttggatatgtggagtttgggttgtatgctggcaagtatgatctttcggaaggagccatttttccatggacatgacaattatgatcagttggtgaggatagccaaggttctggggacagaagatttatatgactatattgacaaatacaacattgaattagatccacgtttcaatgatatcttgggcagacactctcgaaagcgatgggaacgctttgtccacagtgaaaatcagcaccttgtcagccctgaggccttggatttcctggacaaactgctgcgatatgaccaccagtcacggcttactgcaagagaggcaatggagcacccctatttctacactgttgtgaaggaccaggctcgaatgggttcatctagcatgccagggggcagtacgcccgtcagcagcgccaatatgatgtcagggatttcttcagtgccaaccccttcaccccttggacctctggcaggctcaccagtgattgctgctgccaacccccttgggatgcctgttccagctgccgctggcgctcagcagtaacggccctatctgtctcctgatgcctgagcagaggtgggggagtccaccctctccttgatgcagcttgcgcctggcggggaggggtgaaacacttcagaagcaccgtgtctgaaccgttgcttgtggatttatagtagttcagtcataaaaaaaaaattataataggctgattttcttttttctttttttttttaactcgaacttttcataactcaggggattccctgaaaaattacctgcaggtggaatatttcatggacaaatttttttttctcccctcccaaatttagttcctcatcacaaaagaacaaagataaaccagcctcaatcccggctgctgcatttaggtggagacttcttcccattcccaccattgttcctccaccgtcccacactttagggggttggtatctcgtgctcttctccagagattacaaaaatgtagcttctcaggggaggcaggaagaaaggaaggaaggaaagaaggaagggaggacccaatctataggagcagtggactgcttgctggtcgcttacatcactttactccataagcgcttcagtggggttatcctagtggctcttgtggaagtgtgtcttagttacatcaagatgttgaaaatctacccaaaatgcagacagatactaaaaacttctgttcagtaagaatcatgtcttactgatctaaccctaaatccaactcatttatacttttatttttagttcagtttaaaatgttgataccttccctcccaggctccttaccttggtcttttccctgttcatctcccaacatgctgtgctccatagctggtaggagagggaaggcaaaatctttcttagttttctttgtcttggccattttgaattcatttagttactgggcataacttactgctttttacaaaagaaacaaacattgtctgtacaggtttcatgctagagctaatgggagatgtggccacactgacttccattttaagctttctaccttcttttcctccgaccgtccccttccctcacatgccatccagtgagaagacctgctcctcagtcttgtaaatgtatcttgagaggtaggagcagagccactatctccattgaagctgaaatggtagacctgtaattgtgggaaaactataaactctcttgttacagccccgccaccccttgctgtgtgtatatatataatactttgtccttcatatgtgaaagatccagtgttggaattctttggtgtaaataaacgtttggttttatttatcaaggttagatttaagttccctgtgtaaaggtcttgctgggtgggtgtctcatgttcacatctgaggggcctgcagccctgtaccgtggaggcttcccaaggcccccattttatacacccctcgttcgacccatggtaccgggcagagcagagaggccttaaaaaaaaagcaccacaagccaaagcgtctctggggattaaggatcctttgccataaaactcattttgtgtctcagcagtgcagggattggggatggaaaaagtcgccagtttttgtgtgtttgtgtgtgtgtgtaaagtggactttccactgtaatccaaccacctaagtttatcaggtgcttcactgaggaagcctagttttttaagcacaatagcaaaaccatcagctctgtattttctcctgttatttcattacagtagctgcttgtgggaactaggaaaaattcttccaacatattttaaggcctaaaatcttagttccccattctcctaccttatagattcacaggcctttctcgcctaggcatcatagataaacgtaattgtttggggagttgaatttaatgaacttatctaactttgtaacccatcttggctttagtaactttatcaaggtggtggctttagtgaatataatggtaaactttagaggacgctaaagcctccttttatagcgcttctcaacggtagggagagctgaagggaaaacattctgactgtgtggcagggtgattttcttccttatgaccacttacagtggatatttattgtacttgacccttttatgccctagaatgctgtgagggttaccatgttgaatttgtgcagaagctaaaagcaccagatgtgccagagatgcaatttgtgattatgtttgcactggattgtgatttgaacaggacacttataactaatgagttctttcttttgaggtggggagagggttgtaaatcaagacttcataccctatccttgtagctcggaaattgaggtgtagcttaggctgatgcggagagctgcagacagctggacctccttacacccatcagaccttggaataaaccgaaggtgaatgcagaggactctgaggtgccacccaagagccttttaaaataaatagaagtttttaaaaatgctacttaagagtcactgcagaagcatggagagagagaaaaaaaaaaaagacccaattgggtggggggtgggggggaggcaagggtttacagagtaacaacttacgtgttgttgtaaattacctcatctgtataccttgtattgggacactatttctcagcactacctgtgtctgcattgcttagatggcaggaaatggaatggccaacatgaaaggttatgttggcaattactctgaaagattttttaaagtatttttaaactttgtttgaagtggtccctcccctcttcctctgcttttttttaagtttgaagccagaaggccctccccaccttgctttattggttgtaattgtattgtaattggtatgactaaaccataactgtgctgggaagaagttgtgccatgaaggtctttaattttttttaataaaaacatttaaataaatgaaatgtccctgcagcctgagcaatatgcttctccaaccgacaccgtgtgtgatagatggctccgttttcacgttttgaattctgtttcttgtacttgaaatgcctgtccagcttacataagatagattaaattgttagagtgggactgtcagaggaatatatcttgtaaagtagatcctcagggtatggctaattactatagtcctaaagtagcagagaaaattagagattggttgacagatttgggaattttaatttcttcttagtttttaactttcatctttgcttcaccttttgacaagtatggttataattagaattgaccatttaagcatctcttgaaaaacctgattttgtcccaccagcaaattctctcccaagactggaattgggtttgcatagtagagagcctgtcttcccagggccttttcctagttaaagaaacacttaactaaaaaggctgtgtggtaaggtcatgctcagttccttcctcaaaaaatgagtctaaaattggtttatcctgaatccgacttcccccactgtcatcacttacccttgcccttctttttcctcagaacacctgaacttttgttgtattattttgtatctccccacttgcatgtaaactccctggtgaccttgcatgtcttatgcaatcctcattaaaaccttttgtttttttttttaagtgggttcgttttccctcaggatcgaagagtattgaatggaatggcacgaggaaaatatttaacaccctacttggcttgtaataataggtgcttaataaattgtagttccactctcca

SEQ ID NO: 27809 - protein, 391 aa, Homo sapiens; identical to SEQ ID NO: 3809

SEQ ID NO: 27810 - DNA, 5109 bp, Homo sapiens
cccgcctcctggtaggagggggtttccgcttccggcagcagcggctgcagcctcgctctggtccctgcggctggcggccgagccgtgtgtctcctcctccatcgccgccatattgtctgtgtgagcagaggggagagcggccgccgccgctgccgcttccaccacagtttgaagaaaacaggtctgaaacaaggtcttacccccagctgcttctgaacacagtgactgccagatctccaaacatcaagtccagctttgtccgccaacctgtctgacatgtcgggacccgtgccaagcagggccagagtttacacagatgttaatacacacagacctcgagaatactgggattacgagtcacatgtggtggaatggggaaatcaagatgactaccagctggttcgaaaattaggccgaggtaaatacagtgaagtatttgaagccatcaacatcacaaataatgaaaaagttgttgttaaaattctcaagccagtaaaaaagaagaaaattaagcgtgaaataaagattttggagaatttgagaggaggtcccaacatcatcacactggcagacattgtaaaagaccctgtgtcacgaacccccgccttggtttttgaacacgtaaacaacacagacttcaagcaattgtaccagacgttaacagactatgatattcgattttacatgtatgagattctgaaggccctggattattgtcacagcatgggaattatgcacagagatgtcaagccccataatgtcatgattgatcatgagcacagaaagctacgactaatagactggggtttggctgagttttatcatcctggccaagaatataatgtccgagttgcttcccgatacttcaaaggtcctgagctacttgtagactatcagatgtacgattatagtttggatatgtggagtttgggttgtatgctggcaagtatgatctttcggaaggagccatttttccatggacatgacaattatgatcagttggtgaggatagccaaggttctggggacagaagatttatatgactatattgacaaatacaacattgaattagatccacgtttcaatgatatcttgggcagacactctcgaaagcgatgggaacgctttgtccacagtgaaaatcagcaccttgtcagccctgaggccttggatttcctggacaaactgctgcgatatgaccaccagtcacggcttactgcaagagaggcaatggagcacccctatttctacactgttgtgaaggaccaggctcgaatgggttcatctagcatgccagggggcagtacgcccgtcagcagcgccaatatgatgtcagggatttcttcagtgccaaccccttcaccccttggacctctggcaggctcaccagtgattgctgctgccaacccccttgggatgcctgttccagctgccgctggcgctcagcagtaacggccctatctgtctcctgatgcctgagcagaggtgggggagtccaccctctccttgatgcagcttgcgcctggcggggaggggtgaaacacttcagaagcaccgtgtctgaaccgttgcttgtggatttatagtagttcagtcataaaaaaaaaattataataggctgattttcttttttctttttttttttaactcgaacttttcataactcaggggattccctgaaaaattacctgcaggtggaatatttcatggacaaatttttttttctcccctcccaaatttagttcctcatcacaaaagaacaaagataaaccagcctcaatcccggctgctgcatttaggtggagacttcttcccattcccaccattgttcctccaccgtcccacactttagggggttggtatctcgtgctcttctccagagattacaaaaatgtagcttctcaggggaggcaggaagaaaggaaggaaggaaagaaggaagggaggacccaatctataggagcagtggactgcttgctggtcgcttacatcactttactccataagcgcttcagtggggttatcctagtggctcttgtggaagtgtgtcttagttacatcaagatgttgaaaatctacccaaaatgcagacagatactaaaaacttctgttcagtaagaatcatgtcttactgatctaaccctaaatccaactcatttatacttttatttttagttcagtttaaaatgttgataccttccctcccaggctccttaccttggtcttttccctgttcatctcccaacatgctgtgctccatagctggtaggagagggaaggcaaaatctttcttagttttctttgtcttggccattttgaattcatttagttactgggcataacttactgctttttacaaaagaaacaaacattgtctgtacaggtttcatgctagagctaatgggagatgtggccacactgacttccattttaagctttctaccttcttttcctccgaccgtccccttccctcacatgccatccagtgagaagacctgctcctcagtcttgtaaatgtatcttgagaggtaggagcagagccactatctccattgaagctgaaatggtagacctgtaattgtgggaaaactataaactctcttgttacagccccgccaccccttgctgtgtgtatatatataatactttgtccttcatatgtgaaagatccagtgttggaattctttggtgtaaataaacgtttggttttatttatcaaggttagatttaagttccctgtgtaaaggtcttgctgggtgggtgtctcatgttcacatctgaggggcctgcagccctgtaccgtggaggcttcccaaggcccccattttatacacccctcgttcgacccatggtaccgggcagagcagagaggccttaaaaaaaaagcaccacaagccaaagcgtctctggggattaaggatcctttgccataaaactcattttgtgtctcagcagtgcagggattggggatggaaaaagtcgccagtttttgtgtgtttgtgtgtgtgtgtaaagtggactttccactgtaatccaaccacctaagtttatcaggtgcttcactgaggaagcctagttttttaagcacaatagcaaaaccatcagctctgtattttctcctgttatttcattacagtagctgcttgtgggaactaggaaaaattcttccaacatattttaaggcctaaaatcttagttccccattctcctaccttatagattcacaggcctttctcgcctaggcatcatagataaacgtaattgtttggggagttgaatttaatgaacttatctaactttgtaacccatcttggctttagtaactttatcaaggtggtggctttagtgaatataatggtaaactttagaggacgctaaagcctccttttatagcgcttctcaacggtagggagagctgaagggaaaacattctgactgtgtggcagggtgattttcttccttatgaccacttacagtggatatttattgtacttgacccttttatgccctagaatgctgtgagggttaccatgttgaatttgtgcagaagctaaaagcaccagatgtgccagagatgcaatttgtgattatgtttgcactggattgtgatttgaacaggacacttataactaatgagttctttcttttgaggtggggagagggttgtaaatcaagacttcataccctatccttgtagctcggaaattgaggtgtagcttaggctgatgcggagagctgcagacagctggacctccttacacccatcagaccttggaataaaccgaaggtgaatgcagaggactctgaggtgccacccaagagccttttaaaataaatagaagtttttaaaaatgctacttaagagtcactgcagaagcatggagagagagaaaaaaaaaaaagacccaattgggtggggggtgggggggaggcaagggtttacagagtaacaacttacgtgttgttgtaaattacctcatctgtataccttgtattgggacactatttctcagcactacctgtgtctgcattgcttagatggcaggaaatggaatggccaacatgaaaggttatgttggcaattactctgaaagattttttaaagtatttttaaactttgtttgaagtggtccctcccctcttcctctgcttttttttaagtttgaagccagaaggccctccccaccttgctttattggttgtaattgtattgtaattggtatgactaaaccataactgtgctgggaagaagttgtgccatgaaggtctttaattttttttaataaaaacatttaaataaatgaaatgtccctgcagcctgagcaatatgcttctccaaccgacaccgtgtgtgatagatggctccgttttcacgttttgaattctgtttcttgtacttgaaatgcctgtccagcttacataagatagattaaattgttagagtgggactgtcagaggaatatatcttgtaaagtagatcctcagggtatggctaattactatagtcctaaagtagcagagaaaattagagattggttgacagatttgggaattttaatttcttcttagtttttaactttcatctttgcttcaccttttgacaagtatggttataattagaattgaccatttaagcatctcttgaaaaacctgattttgtcccaccagcaaattctctcccaagactggaattgggtttgcatagtagagagcctgtcttcccagggccttttcctagttaaagaaacacttaactaaaaaggctgtgtggtaaggtcatgctcagttccttcctcaaaaaatgagtctaaaattggtttatcctgaatccgacttcccccactgtcatcacttacccttgcccttctttttcctcagaacacctgaacttttgttgtattattttgtatctccccacttgcatgtaaactccctggtgaccttgcatgtcttatgcaatcctcattaaaaccttttgtttttttttttaagtgggttcgttttccctcaggatcgaagagtattgaatggaatggcacgaggaaaatatttaacaccctacttggcttgtaataataggtgcttaataaattgtagttccactctcca

SEQ ID NO: 27811 - protein, 391 aa, Homo sapiens; identical to SEQ ID NO: 3809

SEQ ID NO: 27812 - DNA, 4899 bp, Homo sapiens
cccgcctcctggtaggagggggtttccgcttccggcagcagcggctgcagcctcgctctggtccctgcggctggcggccgagccgtgtgtctcctcctccatcgccgccatattgtctgtgtgagcagaggggagagcggccgccgccgctgccgcttccaccacagaaatcaagatgactaccagctggttcgaaaattaggccgaggtaaatacagtgaagtatttgaagccatcaacatcacaaataatgaaaaagttgttgttaaaattctcaagccagtaaaaaagaagaaaattaagcgtgaaataaagattttggagaatttgagaggaggtcccaacatcatcacactggcagacattgtaaaagaccctgtgtcacgaacccccgccttggtttttgaacacgtaaacaacacagacttcaagcaattgtaccagacgttaacagactatgatattcgattttacatgtatgagattctgaaggccctggattattgtcacagcatgggaattatgcacagagatgtcaagccccataatgtcatgattgatcatgagcacagaaagctacgactaatagactggggtttggctgagttttatcatcctggccaagaatataatgtccgagttgcttcccgatacttcaaaggtcctgagctacttgtagactatcagatgtacgattatagtttggatatgtggagtttgggttgtatgctggcaagtatgatctttcggaaggagccatttttccatggacatgacaattatgatcagttggtgaggatagccaaggttctggggacagaagatttatatgactatattgacaaatacaacattgaattagatccacgtttcaatgatatcttgggcagacactctcgaaagcgatgggaacgctttgtccacagtgaaaatcagcaccttgtcagccctgaggccttggatttcctggacaaactgctgcgatatgaccaccagtcacggcttactgcaagagaggcaatggagcacccctatttctacactgttgtgaaggaccaggctcgaatgggttcatctagcatgccagggggcagtacgcccgtcagcagcgccaatatgatgtcagggatttcttcagtgccaaccccttcaccccttggacctctggcaggctcaccagtgattgctgctgccaacccccttgggatgcctgttccagctgccgctggcgctcagcagtaacggccctatctgtctcctgatgcctgagcagaggtgggggagtccaccctctccttgatgcagcttgcgcctggcggggaggggtgaaacacttcagaagcaccgtgtctgaaccgttgcttgtggatttatagtagttcagtcataaaaaaaaaattataataggctgattttcttttttctttttttttttaactcgaacttttcataactcaggggattccctgaaaaattacctgcaggtggaatatttcatggacaaatttttttttctcccctcccaaatttagttcctcatcacaaaagaacaaagataaaccagcctcaatcccggctgctgcatttaggtggagacttcttcccattcccaccattgttcctccaccgtcccacactttagggggttggtatctcgtgctcttctccagagattacaaaaatgtagcttctcaggggaggcaggaagaaaggaaggaaggaaagaaggaagggaggacccaatctataggagcagtggactgcttgctggtcgcttacatcactttactccataagcgcttcagtggggttatcctagtggctcttgtggaagtgtgtcttagttacatcaagatgttgaaaatctacccaaaatgcagacagatactaaaaacttctgttcagtaagaatcatgtcttactgatctaaccctaaatccaactcatttatacttttatttttagttcagtttaaaatgttgataccttccctcccaggctccttaccttggtcttttccctgttcatctcccaacatgctgtgctccatagctggtaggagagggaaggcaaaatctttcttagttttctttgtcttggccattttgaattcatttagttactgggcataacttactgctttttacaaaagaaacaaacattgtctgtacaggtttcatgctagagctaatgggagatgtggccacactgacttccattttaagctttctaccttcttttcctccgaccgtccccttccctcacatgccatccagtgagaagacctgctcctcagtcttgtaaatgtatcttgagaggtaggagcagagccactatctccattgaagctgaaatggtagacctgtaattgtgggaaaactataaactctcttgttacagccccgccaccccttgctgtgtgtatatatataatactttgtccttcatatgtgaaagatccagtgttggaattctttggtgtaaataaacgtttggttttatttatcaaggttagatttaagttccctgtgtaaaggtcttgctgggtgggtgtctcatgttcacatctgaggggcctgcagccctgtaccgtggaggcttcccaaggcccccattttatacacccctcgttcgacccatggtaccgggcagagcagagaggccttaaaaaaaaagcaccacaagccaaagcgtctctggggattaaggatcctttgccataaaactcattttgtgtctcagcagtgcagggattggggatggaaaaagtcgccagtttttgtgtgtttgtgtgtgtgtgtaaagtggactttccactgtaatccaaccacctaagtttatcaggtgcttcactgaggaagcctagttttttaagcacaatagcaaaaccatcagctctgtattttctcctgttatttcattacagtagctgcttgtgggaactaggaaaaattcttccaacatattttaaggcctaaaatcttagttccccattctcctaccttatagattcacaggcctttctcgcctaggcatcatagataaacgtaattgtttggggagttgaatttaatgaacttatctaactttgtaacccatcttggctttagtaactttatcaaggtggtggctttagtgaatataatggtaaactttagaggacgctaaagcctccttttatagcgcttctcaacggtagggagagctgaagggaaaacattctgactgtgtggcagggtgattttcttccttatgaccacttacagtggatatttattgtacttgacccttttatgccctagaatgctgtgagggttaccatgttgaatttgtgcagaagctaaaagcaccagatgtgccagagatgcaatttgtgattatgtttgcactggattgtgatttgaacaggacacttataactaatgagttctttcttttgaggtggggagagggttgtaaatcaagacttcataccctatccttgtagctcggaaattgaggtgtagcttaggctgatgcggagagctgcagacagctggacctccttacacccatcagaccttggaataaaccgaaggtgaatgcagaggactctgaggtgccacccaagagccttttaaaataaatagaagtttttaaaaatgctacttaagagtcactgcagaagcatggagagagagaaaaaaaaaaaagacccaattgggtggggggtgggggggaggcaagggtttacagagtaacaacttacgtgttgttgtaaattacctcatctgtataccttgtattgggacactatttctcagcactacctgtgtctgcattgcttagatggcaggaaatggaatggccaacatgaaaggttatgttggcaattactctgaaagattttttaaagtatttttaaactttgtttgaagtggtccctcccctcttcctctgcttttttttaagtttgaagccagaaggccctccccaccttgctttattggttgtaattgtattgtaattggtatgactaaaccataactgtgctgggaagaagttgtgccatgaaggtctttaattttttttaataaaaacatttaaataaatgaaatgtccctgcagcctgagcaatatgcttctccaaccgacaccgtgtgtgatagatggctccgttttcacgttttgaattctgtttcttgtacttgaaatgcctgtccagcttacataagatagattaaattgttagagtgggactgtcagaggaatatatcttgtaaagtagatcctcagggtatggctaattactatagtcctaaagtagcagagaaaattagagattggttgacagatttgggaattttaatttcttcttagtttttaactttcatctttgcttcaccttttgacaagtatggttataattagaattgaccatttaagcatctcttgaaaaacctgattttgtcccaccagcaaattctctcccaagactggaattgggtttgcatagtagagagcctgtcttcccagggccttttcctagttaaagaaacacttaactaaaaaggctgtgtggtaaggtcatgctcagttccttcctcaaaaaatgagtctaaaattggtttatcctgaatccgacttcccccactgtcatcacttacccttgcccttctttttcctcagaacacctgaacttttgttgtattattttgtatctccccacttgcatgtaaactccctggtgaccttgcatgtcttatgcaatcctcattaaaaccttttgtttttttttttaagtgggttcgttttccctcaggatcgaagagtattgaatggaatggcacgaggaaaatatttaacaccctacttggcttgtaataataggtgcttaataaattgtagttccactctcca

SEQ ID NO: 27813 - protein, 255 aa, Homo sapiens; identical to SEQ ID NO: 3813

SEQ ID NO: 27814 - DNA, 2413 bp, Homo sapiens
agtgccaaccccttcaccccttggacctctggcaggctcaccagtgattgctgctgccaacccccttgggatgcctgttccagctgccgctggcgctcagcagtaacggccctatctgtctcctgatgcctgagcagaggtgggggagtccaccctctccttgatgcagcttgcgcctggcggggaggggtgaaacacttcagaagcaccgtgtctgaaccgttgcttgtggatttatagtagttcagtcataaaaaaaaaattataataggctgattttcttttttctttttttttttaactcgaacttttcataactcaggggattccctgaaaaattacctgcaggtggaatatttcatggacaaatttttttttctcccctcccaaatttagttcctcatcacaaaagaacaaagataaaccagcctcaatcccggctgctgcatttaggtggagacttcttcccattcccaccattgttcctccaccgtcccacactttagggggttggtatctcgtgctcttctccagagattacaaaaatgtagcttctcaggggaggcaggaagaaaggaaggaaggaaagaaggaagggaggacccaatctataggagcagtggactgcttgctggtcgcttacatcatatctccattgaagctgaaatggtagacctgtaattgtgggaaaactataaactctcttgttacagccccgccaccccttgctgtgtgtatatatataatactttgtccttcatatgtgaaagatccagtgttggaattctttggtgtaaataaacgtttggttttatttatcaaggttagatttaagttccctgtgtaaaggtcttgctgggtgggtgtctcatgttcacatctgaggggcctgcagccctgtaccgtggaggcttcccaaggcccccattttatacacccctcgttcgacccatggtaccgggcagagcagagaggccttaaaaaaaaagcaccacaagccaaagcgtctctggggattaaggatcctttgccataaaactcattttgtgtctcagcagtgcagggattggggatggaaaaagtcgccagtttttgtgtgtttgtgtgtgtgtgtaaagtggactttccactgtaatccaaccacctaagtttatcaggtgcttcactgaggaagcctagttttttaagcacaatagcaaaaccatcagctctgtattttctcctgttatttcattacagtagctgcttgtgggaactaggaaaaattcttccaacatattttaaggcctaaaatcttagttccccattctcctaccttatagattcacaggcctttctcgcctaggcatcatagataaacgtaattgtttggggagttgaatttaatgaacttatctaactttgtaacccatcttggctttagtaactttatcaaggtggtggctttagtgaatataatggtaaactttagaggacgctaaagcctccttttatagcgcttctcaacggtagggagagctgaagggaaaacattctgactgtgtggcagggtgattttcttccttatgaccacttacagtggatatttattgtacttgacccttttatgccctagaatgctgtgagggttaccatgttgaatttgtgcagaagctaaaagcaccagatgtgccagagatgcaatttgtgattatgtttgcactggattgtgatttgaacaggacacttataactaatgagttctttcttttgaggtggggagagggttgtaaatcaagacttcataccctatccttgtagctcggaaattgaggtgtagcttaggctgatgcggagagctgcagacagctggacctccttacacccatcagaccttggaataaaccgaaggtgaatgcagaggactctgaggtgccacccaagagccttttaaaataaatagaagtttttaaaaatgctacttaagagtcactgcagaagcatggagagagagaaaaaaaaaaaagacccaattgggtggggggtgggggggaggcaagggtttacagagtaacaacttacgtgttgttgtaaattacctcatctgtataccttgtattgggacactatttctcagcactacctgtgtctgcattgcttagatggcaggaaatggaatggccaacatgaaaggttatgttggcaattactctgaaagattttttaaagtatttttaaactttgtttgaagtggtccctcccctcttcctctgcttttttttaagtttgaagccagaaggccctccccaccttgctttattggttgtaattgtattgtaattggtatgactaaaccataactgtgctgggaagaagttgtgccatgaaggtctttaattttttttaataaaaacatttaaataaatgaaatgtc

SEQ ID NO: 27815 - protein, 40 aa, Homo sapiens
MQFVIMFALDCDLNRTLITNEFFLLRWGEGCKSRLHTLSL

SEQ ID NO: 27816 - DNA, 4427 bp, Homo sapiens
cccgcctcctggtaggagggggtttccgcttccggcagcagcggctgcagcctcgctctggtccctgcggctggcggccgagccgtgtgtctcctcctccatcgccgccatattgtctgtgtgagcagaggggagagcggccgccgccgctgccgcttccaccacagctctatcaaggcttgtcaagcagtgtgctcatcacatggtaaatcatgcagcgtggaacctcataaaatctccaagaaacatcattcacccatactgactagtttcacatctctttgtttgaagaaaacaggtctgaaacaaggtcttacccccagctgcttctgaacacagtgactgccagatctccaaacatcaagtccagctttgtccgccaacctgtctgacatgtcgggacccgtgccaagcagggccagagtttacacagatgttaatacacacagacctcgagaatactgggattacgagtcacatgtggtggaatggggaaatcaagatgactaccagctggttcgaaaattaggccgaggtaaatacagtgaagtatttgaagccatcaacatcacaaataatgaaaaagttgttgttaaaattctcaagccagtaaaaaagaagaaaattaagcgtgaaataaagattttggagaatttgagaggaggtcccaacatcatcacactggcagacattgtaaaagaccctgtgtcacgaacccccgccttggtttttgaacacgtaaacaacacagacttcaagcaattgtaccagacgttaacagactatgatattcgattttacatgtatgagattctgaaggccctggattattgtcacagcatgggaattatgcacagagatgtcaagccccataatgtcatgattgatcatgagcacagaaagctacgactaatagactggggtttggctgagttttatcatcctggccaagaatataatgtccgagttgcttcccgatacttcaaaggtcctgagctacttgtagactatcagatgtacgattatagtttggatatgtggagtttgggttgtatgctggcaagtatgatctttcggaaggagccatttttccatggacatgacaattatgatcagttggtgaggatagccaaggttctggggacagaagatttatatgactatattgacaaatacaacattgaattagatccacgtttcaatgatatcttgggcagacactctcgaaagcgatgggaacgctttgtccacagtgaaaatcagcaccttgtcagccctgaggccttggatttcctggacaaactgctgcgatatgaccaccagtcacggcttactgcaagagaggcaatggagcacccctatttctacactgttgtgaaggaccaggctcgaatgggttcatctagcatgccagggggcagtacgcccgtcagcagcgccaatatgatgtcagggatttcttcagtgccaaccccttcaccccttggacctctggcaggctcaccagtgattgctgctgccaacccccttgggatgcctgttccagctgccgctggcgctcagcagtaacggccctatctgtctcctgatgcctgagcagaggtgggggagtccaccctctccttgatgcagcttgcgcctggcggggaggggtgaaacacttcagaagcaccgtgtctgaaccgttgcttgtggatttatagtagttcagtcataaaaaaaaaattataataggctgattttcttttttctttttttttttaactcgaacttttcataactcaggggattccctgaaaaattacctgcaggtggaatatttcatggacaaatttttttttctcccctcccaaatttagttcctcatcacaaaagaacaaagataaaccagcctcaatcccggctgctgcatttaggtggagacttcttcccattcccaccattgttcctccaccgtcccacactttagggggttggtatctcgtgctcttctccagagattacaaaaatgtagcttctcaggggaggcaggaagaaaggaaggaaggaaagaaggaagggaggacccaatctataggagcagtggactgcttgctggtcgcttacatcactttactccataagcgcttcagtggggttatcctagtggctcttgtggaagtgtgtcttagttacatcaagatgttgaaaatctacccaaaatgcagacagatactaaaaacttctgttcagtaagaatcatgtcttactgatctaaccctaaatccaactcatttatacttttatttttagttcagtttaaaatgttgataccttccctcccaggctccttaccttggtcttttccctgttcatctcccaacatgctgtgctccatagctggtaggagagggaaggcaaaatctttcttagttttctttgtcttggccattttgaattcatttagttactgggcataacttactgctttttacaaaagaaacaaacattgtctgtacaggtttcatgctagagctaatgggagatgtggccacactgacttccattttaagctttctaccttcttttcctccgaccgtccccttccctcacatgccatccagtgagaagacctgctcctcagtcttgtaaatgtatcttgagaggtaggagcagagccactatctccattgaagctgaaatggtagacctgtaattgtgggaaaactataaactctcttgttacagccccgccaccccttgctgtgtgtatatatataatactttgtccttcatatgtgaaagatccagtgttggaattctttggtgtaaataaacgtttggttttatttatcaaggttagatttaagttccctgtgtaaaggtcttgctgggtgggtgtctcatgttcacatctgaggggcctgcagccctgtaccgtggaggcttcccaaggcccccattttatacacccctcgttcgacccatggtaccgggcagagcagagaggccttaaaaaaaaagcaccacaagccaaagcgtctctggggattaaggatcctttgccataaaactcattttgtgtctcagcagtgcagggattggggatggaaaaagtcgccagtttttgtgtgtttgtgtgtgtgtgtaaagtggactttccactgtaatccaaccacctaagtttatcaggtgcttcactgaggaagcctagttttttaagcacaatagcaaaaccatcagctctgtattttctcctgttatttcattacagtagctgcttgtgggaactaggaaaaattcttccaacatattttaaggcctaaaatcttagttccccattctcctaccttatagattcacaggcctttctcgcctaggcatcatagataaacgtaattgtttggggagttgaatttaatgaacttatctaactttgtaacccatcttggctttagtaactttatcaaggtggtggctttagtgaatataatggtaaactttagaggacgctaaagcctccttttatagcgcttctcaacggtagggagagctgaagggaaaacattctgactgtgtggcagggtgattttcttccttatgaccacttacagtggatatttattgtacttgacccttttatgccctagaatgctgtgagggttaccatgttgaatttgtgcagaagctaaaagcaccagatgtgccagagatgcaatttgtgattatgtttgcactggattgtgatttgaacaggacacttataactaatgagttctttcttttgaggtggggagagggttgtaaatcaagacttcataccctatccttgtagctcggaaattgaggtgtagcttaggctgatgcggagagctgcagacagctggacctccttacacccatcagaccttggaataaaccgaaggtgaatgcagaggactctgaggtgccacccaagagccttttaaaataaatagaagtttttaaaaatgctacttaagagtcactgcagaagcatggagagagagaaaaaaaaaaaagacccaattgggtggggggtgggggggaggcaagggtttacagagtaacaacttacgtgttgttgtaaattacctcatctgtataccttgtattgggacactatttctcagcactacctgtgtctgcattgcttagatggcaggaaatggaatggccaacatgaaaggttatgttggcaattactctgaaagattttttaaagtatttttaaactttgtttgaagtggtccctcccctcttcctctgcttttttttaagtttgaagccagaaggccctccccaccttgctttattggttgtaattgtattgtaattggtatgactaaaccataactgtgctgggaagaagttgtgccatgaaggtctttaattttttttaataaaaacatttaaataaatgaaatgtc

SEQ ID NO: 27817 - protein, 391 aa, Homo sapiens; identical to SEQ ID NO: 3809

SEQ ID NO: 27818 - DNA, 4310 bp, Homo sapiens
cccgcctcctggtaggagggggtttccgcttccggcagcagcggctgcagcctcgctctggtccctgcggctggcggccgagccgtgtgtctcctcctccatcgccgccatattgtctgtgtgagcagaggggagagcggccgccgccgctgccgcttccaccacagtttgaagaaaacaggtctgaaacaaggtcttacccccagctgcttctgaacacagtgactgccagatctccaaacatcaagtccagctttgtccgccaacctgtctgacatgtcgggacccgtgccaagcagggccagagtttacacagatgttaatacacacagacctcgagaatactgggattacgagtcacatgtggtggaatggggaaatcaagatgactaccagctggttcgaaaattaggccgaggtaaatacagtgaagtatttgaagccatcaacatcacaaataatgaaaaagttgttgttaaaattctcaagccagtaaaaaagaagaaaattaagcgtgaaataaagattttggagaatttgagaggaggtcccaacatcatcacactggcagacattgtaaaagaccctgtgtcacgaacccccgccttggtttttgaacacgtaaacaacacagacttcaagcaattgtaccagacgttaacagactatgatattcgattttacatgtatgagattctgaaggccctggattattgtcacagcatgggaattatgcacagagatgtcaagccccataatgtcatgattgatcatgagcacagaaagctacgactaatagactggggtttggctgagttttatcatcctggccaagaatataatgtccgagttgcttcccgatacttcaaaggtcctgagctacttgtagactatcagatgtacgattatagtttggatatgtggagtttgggttgtatgctggcaagtatgatctttcggaaggagccatttttccatggacatgacaattatgatcagttggtgaggatagccaaggttctggggacagaagatttatatgactatattgacaaatacaacattgaattagatccacgtttcaatgatatcttgggcagacactctcgaaagcgatgggaacgctttgtccacagtgaaaatcagcaccttgtcagccctgaggccttggatttcctggacaaactgctgcgatatgaccaccagtcacggcttactgcaagagaggcaatggagcacccctatttctacactgttgtgaaggaccaggctcgaatgggttcatctagcatgccagggggcagtacgcccgtcagcagcgccaatatgatgtcagggatttcttcagtgccaaccccttcaccccttggacctctggcaggctcaccagtgattgctgctgccaacccccttgggatgcctgttccagctgccgctggcgctcagcagtaacggccctatctgtctcctgatgcctgagcagaggtgggggagtccaccctctccttgatgcagcttgcgcctggcggggaggggtgaaacacttcagaagcaccgtgtctgaaccgttgcttgtggatttatagtagttcagtcataaaaaaaaaattataataggctgattttcttttttctttttttttttaactcgaacttttcataactcaggggattccctgaaaaattacctgcaggtggaatatttcatggacaaatttttttttctcccctcccaaatttagttcctcatcacaaaagaacaaagataaaccagcctcaatcccggctgctgcatttaggtggagacttcttcccattcccaccattgttcctccaccgtcccacactttagggggttggtatctcgtgctcttctccagagattacaaaaatgtagcttctcaggggaggcaggaagaaaggaaggaaggaaagaaggaagggaggacccaatctataggagcagtggactgcttgctggtcgcttacatcactttactccataagcgcttcagtggggttatcctagtggctcttgtggaagtgtgtcttagttacatcaagatgttgaaaatctacccaaaatgcagacagatactaaaaacttctgttcagtaagaatcatgtcttactgatctaaccctaaatccaactcatttatacttttatttttagttcagtttaaaatgttgataccttccctcccaggctccttaccttggtcttttccctgttcatctcccaacatgctgtgctccatagctggtaggagagggaaggcaaaatctttcttagttttctttgtcttggccattttgaattcatttagttactgggcataacttactgctttttacaaaagaaacaaacattgtctgtacaggtttcatgctagagctaatgggagatgtggccacactgacttccattttaagctttctaccttcttttcctccgaccgtccccttccctcacatgccatccagtgagaagacctgctcctcagtcttgtaaatgtatcttgagaggtaggagcagagccactatctccattgaagctgaaatggtagacctgtaattgtgggaaaactataaactctcttgttacagccccgccaccccttgctgtgtgtatatatataatactttgtccttcatatgtgaaagatccagtgttggaattctttggtgtaaataaacgtttggttttatttatcaaggttagatttaagttccctgtgtaaaggtcttgctgggtgggtgtctcatgttcacatctgaggggcctgcagccctgtaccgtggaggcttcccaaggcccccattttatacacccctcgttcgacccatggtaccgggcagagcagagaggccttaaaaaaaaagcaccacaagccaaagcgtctctggggattaaggatcctttgccataaaactcattttgtgtctcagcagtgcagggattggggatggaaaaagtcgccagtttttgtgtgtttgtgtgtgtgtgtaaagtggactttccactgtaatccaaccacctaagtttatcaggtgcttcactgaggaagcctagttttttaagcacaatagcaaaaccatcagctctgtattttctcctgttatttcattacagtagctgcttgtgggaactaggaaaaattcttccaacatattttaaggcctaaaatcttagttccccattctcctaccttatagattcacaggcctttctcgcctaggcatcatagataaacgtaattgtttggggagttgaatttaatgaacttatctaactttgtaacccatcttggctttagtaactttatcaaggtggtggctttagtgaatataatggtaaactttagaggacgctaaagcctccttttatagcgcttctcaacggtagggagagctgaagggaaaacattctgactgtgtggcagggtgattttcttccttatgaccacttacagtggatatttattgtacttgacccttttatgccctagaatgctgtgagggttaccatgttgaatttgtgcagaagctaaaagcaccagatgtgccagagatgcaatttgtgattatgtttgcactggattgtgatttgaacaggacacttataactaatgagttctttcttttgaggtggggagagggttgtaaatcaagacttcataccctatccttgtagctcggaaattgaggtgtagcttaggctgatgcggagagctgcagacagctggacctccttacacccatcagaccttggaataaaccgaaggtgaatgcagaggactctgaggtgccacccaagagccttttaaaataaatagaagtttttaaaaatgctacttaagagtcactgcagaagcatggagagagagaaaaaaaaaaaagacccaattgggtggggggtgggggggaggcaagggtttacagagtaacaacttacgtgttgttgtaaattacctcatctgtataccttgtattgggacactatttctcagcactacctgtgtctgcattgcttagatggcaggaaatggaatggccaacatgaaaggttatgttggcaattactctgaaagattttttaaagtatttttaaactttgtttgaagtggtccctcccctcttcctctgcttttttttaagtttgaagccagaaggccctccccaccttgctttattggttgtaattgtattgtaattggtatgactaaaccataactgtgctgggaagaagttgtgccatgaaggtctttaattttttttaataaaaacatttaaataaatgaaatgtc

SEQ ID NO: 27819 - protein, 391 aa, Homo sapiens; identical to SEQ ID NO: 3809

SEQ ID NO: 27820 - DNA, 4100 bp, Homo sapiens
cccgcctcctggtaggagggggtttccgcttccggcagcagcggctgcagcctcgctctggtccctgcggctggcggccgagccgtgtgtctcctcctccatcgccgccatattgtctgtgtgagcagaggggagagcggccgccgccgctgccgcttccaccacagaaatcaagatgactaccagctggttcgaaaattaggccgaggtaaatacagtgaagtatttgaagccatcaacatcacaaataatgaaaaagttgttgttaaaattctcaagccagtaaaaaagaagaaaattaagcgtgaaataaagattttggagaatttgagaggaggtcccaacatcatcacactggcagacattgtaaaagaccctgtgtcacgaacccccgccttggtttttgaacacgtaaacaacacagacttcaagcaattgtaccagacgttaacagactatgatattcgattttacatgtatgagattctgaaggccctggattattgtcacagcatgggaattatgcacagagatgtcaagccccataatgtcatgattgatcatgagcacagaaagctacgactaatagactggggtttggctgagttttatcatcctggccaagaatataatgtccgagttgcttcccgatacttcaaaggtcctgagctacttgtagactatcagatgtacgattatagtttggatatgtggagtttgggttgtatgctggcaagtatgatctttcggaaggagccatttttccatggacatgacaattatgatcagttggtgaggatagccaaggttctggggacagaagatttatatgactatattgacaaatacaacattgaattagatccacgtttcaatgatatcttgggcagacactctcgaaagcgatgggaacgctttgtccacagtgaaaatcagcaccttgtcagccctgaggccttggatttcctggacaaactgctgcgatatgaccaccagtcacggcttactgcaagagaggcaatggagcacccctatttctacactgttgtgaaggaccaggctcgaatgggttcatctagcatgccagggggcagtacgcccgtcagcagcgccaatatgatgtcagggatttcttcagtgccaaccccttcaccccttggacctctggcaggctcaccagtgattgctgctgccaacccccttgggatgcctgttccagctgccgctggcgctcagcagtaacggccctatctgtctcctgatgcctgagcagaggtgggggagtccaccctctccttgatgcagcttgcgcctggcggggaggggtgaaacacttcagaagcaccgtgtctgaaccgttgcttgtggatttatagtagttcagtcataaaaaaaaaattataataggctgattttcttttttctttttttttttaactcgaacttttcataactcaggggattccctgaaaaattacctgcaggtggaatatttcatggacaaatttttttttctcccctcccaaatttagttcctcatcacaaaagaacaaagataaaccagcctcaatcccggctgctgcatttaggtggagacttcttcccattcccaccattgttcctccaccgtcccacactttagggggttggtatctcgtgctcttctccagagattacaaaaatgtagcttctcaggggaggcaggaagaaaggaaggaaggaaagaaggaagggaggacccaatctataggagcagtggactgcttgctggtcgcttacatcactttactccataagcgcttcagtggggttatcctagtggctcttgtggaagtgtgtcttagttacatcaagatgttgaaaatctacccaaaatgcagacagatactaaaaacttctgttcagtaagaatcatgtcttactgatctaaccctaaatccaactcatttatacttttatttttagttcagtttaaaatgttgataccttccctcccaggctccttaccttggtcttttccctgttcatctcccaacatgctgtgctccatagctggtaggagagggaaggcaaaatctttcttagttttctttgtcttggccattttgaattcatttagttactgggcataacttactgctttttacaaaagaaacaaacattgtctgtacaggtttcatgctagagctaatgggagatgtggccacactgacttccattttaagctttctaccttcttttcctccgaccgtccccttccctcacatgccatccagtgagaagacctgctcctcagtcttgtaaatgtatcttgagaggtaggagcagagccactatctccattgaagctgaaatggtagacctgtaattgtgggaaaactataaactctcttgttacagccccgccaccccttgctgtgtgtatatatataatactttgtccttcatatgtgaaagatccagtgttggaattctttggtgtaaataaacgtttggttttatttatcaaggttagatttaagttccctgtgtaaaggtcttgctgggtgggtgtctcatgttcacatctgaggggcctgcagccctgtaccgtggaggcttcccaaggcccccattttatacacccctcgttcgacccatggtaccgggcagagcagagaggccttaaaaaaaaagcaccacaagccaaagcgtctctggggattaaggatcctttgccataaaactcattttgtgtctcagcagtgcagggattggggatggaaaaagtcgccagtttttgtgtgtttgtgtgtgtgtgtaaagtggactttccactgtaatccaaccacctaagtttatcaggtgcttcactgaggaagcctagttttttaagcacaatagcaaaaccatcagctctgtattttctcctgttatttcattacagtagctgcttgtgggaactaggaaaaattcttccaacatattttaaggcctaaaatcttagttccccattctcctaccttatagattcacaggcctttctcgcctaggcatcatagataaacgtaattgtttggggagttgaatttaatgaacttatctaactttgtaacccatcttggctttagtaactttatcaaggtggtggctttagtgaatataatggtaaactttagaggacgctaaagcctccttttatagcgcttctcaacggtagggagagctgaagggaaaacattctgactgtgtggcagggtgattttcttccttatgaccacttacagtggatatttattgtacttgacccttttatgccctagaatgctgtgagggttaccatgttgaatttgtgcagaagctaaaagcaccagatgtgccagagatgcaatttgtgattatgtttgcactggattgtgatttgaacaggacacttataactaatgagttctttcttttgaggtggggagagggttgtaaatcaagacttcataccctatccttgtagctcggaaattgaggtgtagcttaggctgatgcggagagctgcagacagctggacctccttacacccatcagaccttggaataaaccgaaggtgaatgcagaggactctgaggtgccacccaagagccttttaaaataaatagaagtttttaaaaatgctacttaagagtcactgcagaagcatggagagagagaaaaaaaaaaaagacccaattgggtggggggtgggggggaggcaagggtttacagagtaacaacttacgtgttgttgtaaattacctcatctgtataccttgtattgggacactatttctcagcactacctgtgtctgcattgcttagatggcaggaaatggaatggccaacatgaaaggttatgttggcaattactctgaaagattttttaaagtatttttaaactttgtttgaagtggtccctcccctcttcctctgcttttttttaagtttgaagccagaaggccctccccaccttgctttattggttgtaattgtattgtaattggtatgactaaaccataactgtgctgggaagaagttgtgccatgaaggtctttaattttttttaataaaaacatttaaataaatgaaatgtc

SEQ ID NO: 27821 - protein, 255 aa, Homo sapiens; identical to SEQ ID NO: 3813

SEQ ID NO: 27822 - DNA, 2840 bp, Homo sapiens
cccgcctcctggtaggagggggtttccgcttccggcagcagcggctgcagcctcgctctggtccctgcggctggcggccgagccgtgtgtctcctcctccatcgccgccatattgtctgtgtgagcagaggggagagcggccgccgccgctgccgcttccaccacagctctatcaaggcttgtcaagcagtgtgctcatcacatggtaaatcatgcagcgtggaacctcataaaatctccaagaaacatcattcacccatactgactagtttcacatctctttgtttgaagaaaacaggtctgaaacaaggtcttacccccagctgcttctgaacacagtgactgccagatctccaaacatcaagtccagctttgtccgccaacctgtctgacatgtcgggacccgtgccaagcagggccagagtttacacagatgttaatacacacagacctcgagaatactgggattacgagtcacatgtggtggaatggggaaatcaagatgactaccagctggttcgaaaattaggccgaggtaaatacagtgaagtatttgaagccatcaacatcacaaataatgaaaaagttgttgttaaaattctcaagccagtaaaaaagaagaaaattaagcgtgaaataaagattttggagaatttgagaggaggtcccaacatcatcacactggcagacattgtaaaagaccctgtgtcacgaacccccgccttggtttttgaacacgtaaacaacacagacttcaagcaattgtaccagacgttaacagactatgatattcgattttacatgtatgagattctgaaggccctggattattgtcacagcatgggaattatgcacagagatgtcaagccccataatgtcatgattgatcatgagcacagaaagctacgactaatagactggggtttggctgagttttatcatcctggccaagaatataatgtccgagttgcttcccgatacttcaaaggtcctgagctacttgtagactatcagatgtacgattatagtttggatatgtggagtttgggttgtatgctggcaagtatgatctttcggaaggagccatttttccatggacatgacaattatgatcagttggtgaggatagccaaggttctggggacagaagatttatatgactatattgacaaatacaacattgaattagatccacgtttcaatgatatcttgggcagacactctcgaaagcgatgggaacgctttgtccacagtgaaaatcagcaccttgtcagccctgaggccttggatttcctggacaaactgctgcgatatgaccaccagtcacggcttactgcaagagaggcaatggagcacccctatttctacactgttgtgaaggaccaggctcgaatgggttcatctagcatgccagggggcagtacgcccgtcagcagcgccaatatgatgtcagggatttcttcagtgccaaccccttcaccccttggacctctggcaggctcaccagtgattgctgctgccaacccccttgggatgcctgttccagctgccgctggcgctcagcagtaacggccctatctgtctcctgatgcctgagcagaggtgggggagtccaccctctccttgatgcagcttgcgcctggcggggaggggtgaaacacttcagaagcaccgtgtctgaaccgttgcttgtggatttatagtagttcagtcataaaaaaaaaattataataggctgattttcttttttctttttttttttaactcgaacttttcataactcaggggattccctgaaaaattacctgcaggtggaatatttcatggacaaatttttttttctcccctcccaaatttagttcctcatcacaaaagaacaaagataaaccagcctcaatcccggctgctgcatttaggtggagacttcttcccattcccaccattgttcctccaccgtcccacactttagggggttggtatctcgtgctcttctccagagattacaaaaatgtagcttctcaggggaggcaggaagaaaggaaggaaggaaagaaggaagggaggacccaatctataggagcagtggactgcttgctggtcgcttacatcactttactccataagcgcttcagtggggttatcctagtggctcttgtggaagtgtgtcttagttacatcaagatgttgaaaatctacccaaaatgcagacagatactaaaaacttctgttcagtaagaatcatgtcttactgatctaaccctaaatccaactcatttatacttttatttttagttcagtttaaaatgttgataccttccctcccaggctccttaccttggtcttttccctgttcatctcccaacatgctgtgctccatagctggtaggagagggaaggcaaaatctttcttagttttctttgtcttggccattttgaattcatttagttactgggcataacttactgctttttacaaaagaaacaaacattgtctgtacaggtttcatgctagagctaatgggagatgtggccacactgacttccattttaagctttctaccttcttttcctccgaccgtccccttccctcacatgccatccagtgagaagacctgctcctcagtcttgtaaatgtatcttgagaggtaggagcagagccactatctccattgaagctgaaatggtagacctgtaattgtgggaaaactataaactctcttgttacagccccgccaccccttgctgtgtgtatatatataatactttgtccttcatatgtgaaagatccagtgttggaattctttggtgtaaataaacgtttggttttatttatcaaggtt

SEQ ID NO: 27823 - protein, 391 aa, Homo sapiens; identical to SEQ ID NO: 3809

SEQ ID NO: 27824 - DNA, 2723 bp, Homo sapiens
cccgcctcctggtaggagggggtttccgcttccggcagcagcggctgcagcctcgctctggtccctgcggctggcggccgagccgtgtgtctcctcctccatcgccgccatattgtctgtgtgagcagaggggagagcggccgccgccgctgccgcttccaccacagtttgaagaaaacaggtctgaaacaaggtcttacccccagctgcttctgaacacagtgactgccagatctccaaacatcaagtccagctttgtccgccaacctgtctgacatgtcgggacccgtgccaagcagggccagagtttacacagatgttaatacacacagacctcgagaatactgggattacgagtcacatgtggtggaatggggaaatcaagatgactaccagctggttcgaaaattaggccgaggtaaatacagtgaagtatttgaagccatcaacatcacaaataatgaaaaagttgttgttaaaattctcaagccagtaaaaaagaagaaaattaagcgtgaaataaagattttggagaatttgagaggaggtcccaacatcatcacactggcagacattgtaaaagaccctgtgtcacgaacccccgccttggtttttgaacacgtaaacaacacagacttcaagcaattgtaccagacgttaacagactatgatattcgattttacatgtatgagattctgaaggccctggattattgtcacagcatgggaattatgcacagagatgtcaagccccataatgtcatgattgatcatgagcacagaaagctacgactaatagactggggtttggctgagttttatcatcctggccaagaatataatgtccgagttgcttcccgatacttcaaaggtcctgagctacttgtagactatcagatgtacgattatagtttggatatgtggagtttgggttgtatgctggcaagtatgatctttcggaaggagccatttttccatggacatgacaattatgatcagttggtgaggatagccaaggttctggggacagaagatttatatgactatattgacaaatacaacattgaattagatccacgtttcaatgatatcttgggcagacactctcgaaagcgatgggaacgctttgtccacagtgaaaatcagcaccttgtcagccctgaggccttggatttcctggacaaactgctgcgatatgaccaccagtcacggcttactgcaagagaggcaatggagcacccctatttctacactgttgtgaaggaccaggctcgaatgggttcatctagcatgccagggggcagtacgcccgtcagcagcgccaatatgatgtcagggatttcttcagtgccaaccccttcaccccttggacctctggcaggctcaccagtgattgctgctgccaacccccttgggatgcctgttccagctgccgctggcgctcagcagtaacggccctatctgtctcctgatgcctgagcagaggtgggggagtccaccctctccttgatgcagcttgcgcctggcggggaggggtgaaacacttcagaagcaccgtgtctgaaccgttgcttgtggatttatagtagttcagtcataaaaaaaaaattataataggctgattttcttttttctttttttttttaactcgaacttttcataactcaggggattccctgaaaaattacctgcaggtggaatatttcatggacaaatttttttttctcccctcccaaatttagttcctcatcacaaaagaacaaagataaaccagcctcaatcccggctgctgcatttaggtggagacttcttcccattcccaccattgttcctccaccgtcccacactttagggggttggtatctcgtgctcttctccagagattacaaaaatgtagcttctcaggggaggcaggaagaaaggaaggaaggaaagaaggaagggaggacccaatctataggagcagtggactgcttgctggtcgcttacatcactttactccataagcgcttcagtggggttatcctagtggctcttgtggaagtgtgtcttagttacatcaagatgttgaaaatctacccaaaatgcagacagatactaaaaacttctgttcagtaagaatcatgtcttactgatctaaccctaaatccaactcatttatacttttatttttagttcagtttaaaatgttgataccttccctcccaggctccttaccttggtcttttccctgttcatctcccaacatgctgtgctccatagctggtaggagagggaaggcaaaatctttcttagttttctttgtcttggccattttgaattcatttagttactgggcataacttactgctttttacaaaagaaacaaacattgtctgtacaggtttcatgctagagctaatgggagatgtggccacactgacttccattttaagctttctaccttcttttcctccgaccgtccccttccctcacatgccatccagtgagaagacctgctcctcagtcttgtaaatgtatcttgagaggtaggagcagagccactatctccattgaagctgaaatggtagacctgtaattgtgggaaaactataaactctcttgttacagccccgccaccccttgctgtgtgtatatatataatactttgtccttcatatgtgaaagatccagtgttggaattctttggtgtaaataaacgtttggttttatttatcaaggtt

SEQ ID NO: 27825 - protein, 391 aa, Homo sapiens; identical to SEQ ID NO: 3809

SEQ ID NO: 27826 - DNA, 2513 bp, Homo sapiens
cccgcctcctggtaggagggggtttccgcttccggcagcagcggctgcagcctcgctctggtccctgcggctggcggccgagccgtgtgtctcctcctccatcgccgccatattgtctgtgtgagcagaggggagagcggccgccgccgctgccgcttccaccacagaaatcaagatgactaccagctggttcgaaaattaggccgaggtaaatacagtgaagtatttgaagccatcaacatcacaaataatgaaaaagttgttgttaaaattctcaagccagtaaaaaagaagaaaattaagcgtgaaataaagattttggagaatttgagaggaggtcccaacatcatcacactggcagacattgtaaaagaccctgtgtcacgaacccccgccttggtttttgaacacgtaaacaacacagacttcaagcaattgtaccagacgttaacagactatgatattcgattttacatgtatgagattctgaaggccctggattattgtcacagcatgggaattatgcacagagatgtcaagccccataatgtcatgattgatcatgagcacagaaagctacgactaatagactggggtttggctgagttttatcatcctggccaagaatataatgtccgagttgcttcccgatacttcaaaggtcctgagctacttgtagactatcagatgtacgattatagtttggatatgtggagtttgggttgtatgctggcaagtatgatctttcggaaggagccatttttccatggacatgacaattatgatcagttggtgaggatagccaaggttctggggacagaagatttatatgactatattgacaaatacaacattgaattagatccacgtttcaatgatatcttgggcagacactctcgaaagcgatgggaacgctttgtccacagtgaaaatcagcaccttgtcagccctgaggccttggatttcctggacaaactgctgcgatatgaccaccagtcacggcttactgcaagagaggcaatggagcacccctatttctacactgttgtgaaggaccaggctcgaatgggttcatctagcatgccagggggcagtacgcccgtcagcagcgccaatatgatgtcagggatttcttcagtgccaaccccttcaccccttggacctctggcaggctcaccagtgattgctgctgccaacccccttgggatgcctgttccagctgccgctggcgctcagcagtaacggccctatctgtctcctgatgcctgagcagaggtgggggagtccaccctctccttgatgcagcttgcgcctggcggggaggggtgaaacacttcagaagcaccgtgtctgaaccgttgcttgtggatttatagtagttcagtcataaaaaaaaaattataataggctgattttcttttttctttttttttttaactcgaacttttcataactcaggggattccctgaaaaattacctgcaggtggaatatttcatggacaaatttttttttctcccctcccaaatttagttcctcatcacaaaagaacaaagataaaccagcctcaatcccggctgctgcatttaggtggagacttcttcccattcccaccattgttcctccaccgtcccacactttagggggttggtatctcgtgctcttctccagagattacaaaaatgtagcttctcaggggaggcaggaagaaaggaaggaaggaaagaaggaagggaggacccaatctataggagcagtggactgcttgctggtcgcttacatcactttactccataagcgcttcagtggggttatcctagtggctcttgtggaagtgtgtcttagttacatcaagatgttgaaaatctacccaaaatgcagacagatactaaaaacttctgttcagtaagaatcatgtcttactgatctaaccctaaatccaactcatttatacttttatttttagttcagtttaaaatgttgataccttccctcccaggctccttaccttggtcttttccctgttcatctcccaacatgctgtgctccatagctggtaggagagggaaggcaaaatctttcttagttttctttgtcttggccattttgaattcatttagttactgggcataacttactgctttttacaaaagaaacaaacattgtctgtacaggtttcatgctagagctaatgggagatgtggccacactgacttccattttaagctttctaccttcttttcctccgaccgtccccttccctcacatgccatccagtgagaagacctgctcctcagtcttgtaaatgtatcttgagaggtaggagcagagccactatctccattgaagctgaaatggtagacctgtaattgtgggaaaactataaactctcttgttacagccccgccaccccttgctgtgtgtatatatataatactttgtccttcatatgtgaaagatccagtgttggaattctttggtgtaaataaacgtttggttttatttatcaaggtt

SEQ ID NO: 27827 - protein, 255 aa, Homo sapiens; identical to SEQ ID NO: 3813

SEQ ID NO: 27828 - DNA, 1493 bp, Homo sapiens
gaggggagagcggccgccgccgctgccgcttccaccacagtttgaagaaaacaggtctgaaacaaggtcttacccccagctgcttctgaacacagtgactgccagatctccaaacatcaagtccagctttgtccgccaacctgtctgacatgtcgggacccgtgccaagcagggccagagtttacacagatgttaatacacacagacctcgagaatactgggattacgagtcacatgtggtggaatggggaaatcaagatgactaccagctggttcgaaaattaggccgaggtaaatacagtgaagtatttgaagccatcaacatcacaaataatgaaaaagttgttgttaaaattctcaagccagtaaaaaagaagaaaattaagcgtgaaataaagattttggagaatttgagaggaggtcccaacatcatcacactggcagacattgtaaaagaccctgtgtcacgaacccccgccttggtttttgaacacgtaaacaacacagacttcaagcaattgtaccagacgttaacagactatgatattcgattttacatgtatgagattctgaaggccctggattattgtcacagcatgggaattatgcacagagatgtcaagccccataatgtcatgattgatcatgagcacagaaagctacgactaatagactggggtttggctgagttttatcatcctggccaagaatataatgtccgagttgcttcccgatacttcaaaggtcctgagctacttgtagactatcagatgtacgattatagtttggatatgtggagtttgggttgtatgctggcaagtatgatctttcggaaggagccatttttccatggacatgacaattatgatcagttggtgaggatagccaaggttctggggacagaagatttatatgactatattgacaaatacaacattgaattagatccacgtttcaatgatatcttgggcagacactctcgaaagcgatgggaacgctttgtccacagtgaaaatcagcaccttgtcagccctgaggccttggatttcctggacaaactgctgcgatatgaccaccagtcacggcttactgcaagagaggcaatggagcacccctatttctacactgttgtgaaggaccaggctcgaatgggttcatctagcatgccagggggcagtacgcccgtcagcagcgccaatatgatgtcagggatttcttcagtgccaaccccttcaccccttggacctctggcaggctcaccagtgattgctgctgccaacccccttgggatgcctgttccagctgccgctggcgctcagcagtaacggccctatctgtctcctgatgcctgagcagaggtgggggagtccaccctctccttgatgcagcttgcgcctggcggggaggggtgaaacacttcagaagcaccgtgtctgaaccgttgcttgtggatttatagtagttcagtcataaaaaaaaaattataataggct

SEQ ID NO: 27829 - protein, 391 aa, Homo sapiens; identical to SEQ ID NO: 3809

SEQ ID NO: 27830 - DNA, 696 bp, Homo sapiens
ataaagtacattaattttgtcctttttaaaattttcttgatgtggctactaacacatttaaaattacacatgtggtttgtattatatttcctttgggccagcactgttttagactattcaggagaaggctttataatataagcccaggcacagtggctcatgcctataatcccagcactttggaaggccaaggcaggcggatcatgaggtcaggagttcgagacgatcctgaccaacatgatgaaaccctgtctctactaaaaatacaaaaaaaaaaaaaaaaggctttataaaggaggtgcagtgggaccaaggccctcctcagaaaaaaatgaaaaggattccatactagaacagatgtggaaagaatgggtaaggacaaaggaatgtttaagatatgctctgcagaatactctttagaatggaggggttcatttataagagtattggcactttgggaggccgaggcaggcagatcacgaggtcaggagatcgagaccatcctggctaacacggtgaaaccccgtctctactaaaaatacaaaaattagcctggcctggtggcgggtgcctgtagtcccagctactcgggaggctgaggcaagagaatggcgtgaacccaggaggcggaggttgcagtgagccaagattgcaccactgcactccagcctgggtgacagagcaagactctgtctc

SEQ ID NO: 27831 - protein, 55 aa, Homo sapiens [sequence omitted]

SEQ ID NO: 27832 - DNA, 2853 bp, Homo sapiens
atggggttgaagggagagacagagaaaagggagaaccagaggcccagccaggaggacacagacaggcagtgccccggctccgccaacgccctcactagacctggcggccggaccgacccgcgcctggcggatgcgcccggcgcgcccacagcagcccccgcgcccgccgtgccgccgccgggacgtggggcccttgggccgtcgggccgcctggggagcgccagcccggatccggctgcccagatgcgggcgccactctgcctgctcctgctcgtcgcccacgccgtggacatgctcgccctgaaccgaaggaagaagcaagtgggcactggcctggggggcaactgcacaggctgtatcatctgctcagaggagaacggctgttccacctgccagcagaggctcttcctgttcatccgccgggaaggcatccgccagtacggcaagtgcctgcacgactgtccccctgggtacttcggcatccgcggccaggaggtcaacaggtgcaaaaaatgtggggccacttgtgagagctgcttcagccaggacttctgcatccggtgcaagaggcagttttacttgtacaaggggaagtgtctgcccacctgcccgccgggcactttggcccaccagaacacacgggagtgccagggggagtgtgaactgggtccctggggcggctggagcccctgcacacacaatggaaagacctgcggctcggcttggggcctggagagccgggtacgagaggctggccgggctgggcatgaggaggcagccacctgccaggtgctttctgagtcaaggaaatgtcccatccagaggccctgcccaggagagaggagccccggccagaagaagggcaggaaggaccggcgcccacgcaaggacaggaagctggaccgcaggctggacgtgaggccgcgccagcccggcctgcagccctgaccgccggctctcccgactctctggtcctagtcctcggcccctgcacacctcctcctgctccttctcctcctctcctcttactctttctcctctgtcttctccatttgtcctctctttctttccacccttctatcatttttctgtcagtctaccttccctttctttttcttttttatttcctttatttcttccacctccattctcctctcctttctccctccctccttcccttccttcctcttctttctcacttatcttttatctttccttttctttcttcctgtgtttcttcctgtccttcaccgcatccttctctctctccctcctcttgtctccctctcacacacactttaagagggaccatgagcctgtgccctcccctgcagctttctctatctacaacttaaagaaagcaaacatcttttcccaggcctttccctgaccccatctttgcagagaaagggtttccagagggcaaagctgggacacagcacaggtgaatcctgaaggccctgcttctgctctgggggaggctccaggaccctgagctgtgagcacctggttctctggacagtccccagaggccatttccacagccttcagccaccagccaccccgaggagctggctggacaaggctccagggcttccagaggcctggcttggacacctcccccagctggccgtggagggtcacaacctggcctctgggtgggcagccagccctggagggcatcctctgcaagctgcctgccaccctcatcggcactcccccacaggcctccctctcatgggttccatgcccctttttcccaagccggatcaggtgagctgtcactgctgggggatccacctgcccagcccagaagaggccactgaaacggaaaggaaagctgagattatccagcagctctgttccccacctcagcgcttcctgcccatgtggggaaacaggtctgagaaggaaggggcttgcccagggtcacacaggaagccttcaggctctgcttctgcctgatggctctgctcagcacattcacggtggagaggagaatttgggggtcacttgaggggggaaatgtagggaattgtgggtggggagcaagggaagatccgtgcactcgtccacacccaccaccacactcgctgacacccacccccacacgctgacacccacccccacacttgcccacacccatcaccgcactcgcccacacccaccaccacactgccccacacccaccaccacactcccccacacccaccaccacactcgcccacacccaccaccagtgacttgagcatctgtgcttcgctgtgacgcccctcgccctaggcaggaacgacgctgggaggagtctccaggtcagacccagcttggaagcaagtctgtcctcactgcctatccttctgccatcataacacccccttcctgctctgctccccggaatcctcagaaacgggatttgtatttgccgtgactggttggcctgaacacgtagggctccgtgactgggacaggaatgggcaggagaagcaagagtcggagctccaaggggcccaggggtggcctggggaaggaagatggtcagcaggctgggggagaggctctaggtgatgaaatattacattcccgaccccaagagagcacccaccctcagacctgccctccacctggcagctggggagccctggcctgaacccccccctcccagcaggcccaccctctctctgacttccctgctctcacctccccgagaacagctagagccccctcctccgcctggccaggccaccagcttctcttctgcaaacgtttgtgcctctgaaatgctccgttgttattgtttcaagaccctaacttttttttaaaactttcttaataaagggaaaagaaacttgtaaa

SEQ ID NO: 27833 - protein, 315 aa, Homo sapiens
MGLKGETEKRENQRPSQEDTDRQCPGSANALTRPGGRTDPRLADAPGAPTAAPAPAVPPPGRGALGPSGRLGSASPDPAAQMRAPLCLLLLVAHAVDMLALNRRKKQVGTGLGGNCTGCIICSEENGCSTCQQRLFLFIRREGIRQYGKCLHDCPPGYFGIRGQEVNRCKKCGATCESCFSQDFCIRCKRQFYLYKGKCLPTCPPGTLAHQNTRECQGECELGPWGGWSPCTHNGKTCGSAWGLESRVREAGRAGHEEAATCQVLSESRKCPIQRPCPGERSPGQKKGRKDRRPRKDRKLDRRLDVRPRQPGLQP

SEQ ID NO: 27834 - DNA, 3217 bp, Homo sapiens
atcatcctgggccctcacctctggcataggctcttggtagtgggggcccagacagggaggcacctgccacctgcttcccttctcagccacccacagccctcatagggcagaatgggactcttgctgatgtagacgccgaagtcgcgggcgctcatggcgggcctggaggtactgttcgcatcggcagcgccggccatcacctgcaggcaggacgcgctcgtctgcttcttgcattgggaagtggtgacacacggttacttcggcttgggtgtcggtgaccagccgggtcccaatgataagaagtcagaactgctgccagctgggtggaacaacaataaagacctgtatgtcctccggtatgagtataaggatgggtccagaaagctccttgtgaaagccatcaccgtggagagcagcatgatcctcaatgtgctggaatatggctcacagcaagtggcagacttgaccctgaacttggatgattatatcgatgcagaacacctgggtgacttccacaggacctacaagaacagtgaggagcttcggtctcgtattgtgtctggaatcatcacacctatccatgagcagtgggaaaaggctaatgtaagcagtccccaccgggagttcccccctgctaccgccagagaggtggacccactccggattcctccacaccacccacacaccagtcggcagcctccctggtgtgatcccctgggcccgtttgttgtcgggggagaagacttagacccttttgggcctcggagaggtggcatgattgtggatcccctgagatctggcttcccaagagcacttattgacccttcctcaggcctcccgaaccgacttcctccaggcgctgtgcccccaggagctcgctttgacccctttggacccattgggaccagcccacccggacctaacccagaccatctccccccgccgggctacgatgacatgtacctgtgaaggcctcaagaatgtaacatcccaggcttccctccattctcctggagctgccaccgctgtccccatcagcaaccatgttcttgcaggctgggggcaagggattctgctcatgtgtttgcagaccggctgggatagcctccccaccccttatcagagccaagacacctgctgcagctctccacctagctgcagatagctcccaaagagaaatcagtgtgtctctttcaccatcagctcctcccctttcaccaccagctcctctccacttcccaagggagactccggcaaccttcagcaacatatatcctcgaccagatgcagtgctataagaacagaacgcattttggatgttattattaagaaccaaatgtcaatacagaattcatgttgccggtttcccacttttctttttacattaatgcatagctgcttccatttatgagactttagagtttgagtttctgtagggctgaatgactctttttcctgcccagggcccattcttgcttctcaggcaccttccgtttattaattgccattgctcctgacatcactaagatgggtccccttctggctgcatgaatggaaatgagtgactggaaatcccataggccacaagaatgactttcacaagggcaggaacattgtggaaagactgcatcattctgatgaggcaaaatcctccagctattcctgtctgggccagttttgtaggtccatctgtgcatgggcagcagtagtcaaaaagccaaggaaaaaacagagcagacctgaaggctaatcttatttttgccactaacttagtgaatgaccctaagcaagttccttctcctcttagggccttgtgccaagcctatgaaattggaggtggctttcctgctctaaagcattttgatgtctcattctgtgtttggtaacccctataaactggggcagaggaaaagaatgatggttcaaggccatacttcccttgaaccttgtgtggttcttgcctaactctgtggtttttggaccccatggggcccagacagagcacaggagcatgggctgcctctgagtgtggtgttgaacttcgggaggagcagggagccctgcaccttgtgtcctggcccacctgacctttggtgttctccggatccttttcagcccgaggcctgacagacgcgggcagtgatgagccctgttctggagtggaaagagcacgatagagcaccaggctaagaggcacgagatcaaggcggtagtcacttccgctctgcagctagcatttcaaccatatgtggatcctttcatttctcagctccctggattccttcccctaaattaggacctattatttacctgtaggtaagcaagctactgtagctcttctgaggtatctgccaggctgttttctgtagcctcagattgcctatctgcttagcctgagaacaggtagatgaaaactaaactgatgcctaggcccagggtcagtctcagatggaagctgggcctgggtggggaggctagcatgcgtggctccctgggtatttctgtcagtccccatggcaagcagtgatttagtaaaacaccccagagtcagggaagccaaccaccttgaaacctttagaacatctctgctttggagaaagacccagagatcaggcagaggtgcagattcaatcattactcataacctttgagagatggcaaatgggaggagtgttagtctttgttttggaattggaccattcttgcaaccaaaaggacttagagcagtttgctcataaagacatcctttattataaaaggaagtatttaaaggatgatagagaccatcagatagaagcagggaaggtagataacttttaggaccttgatgtgaggaaaagataaaatttaaacaataaatttgccacttagattttctagcagcaaagtccgaaaagatagttatatacaaaattctgttttctgaaaacaaaattgtgattcaccttcagaattggccattttttttgtgagtttccttgcatcaaggacactgagaaacacagtcattgtcttaggtgttctatgggaggaagtgaatagagcctttaggaacttcctggtcaagcttatggtgcttattttgatctgggccacttccctccttccagtcatgagtaatcatcaaggagcaagttggagtgtttcaggtgtatattttgtagaacccaaaagattggagccttaacaataaacatcagcactaagtgacctgttc

SEQ ID NO: 27835 - protein, 271 aa, Homo sapiens
MAGLEVLFASAAPAITCRQDALVCFLHWEVVTHGYFGLGVGDQPGPNDKKSELLPAGWNNNKDLYVLRYEYKDGSRKLLVKAITVESSMILNVLEYGSQQVADLTLNLDDYIDAEHLGDFHRTYKNSEELRSRIVSGIITPIHEQWEKANVSSPHREFPPATAREVDPLRIPPHHPHTSRQPPWCDPLGPFVVGGEDLDPFGPRRGGMIVDPLRSGFPRALIDPSSGLPNRLPPGAVPPGARFDPFGPIGTSPPGPNPDHLPPPGYDDMYL

SEQ ID NO: 27836 - DNA, 198 bp, Homo sapiens
cgcgggcacagcgtcctccaagaggccaccttgctgagaggcagacttcccatccacaaaatgggatgacaaaacggctcagagttgaaaccacttctccaaggagacacaactgctgcccgcagagctgaagctcctgacccactatcaaatttcaatcatttatttgcctaccccctttatgatttttaccacccg

SEQ ID NO: 27837 - protein, 42 aa, Homo sapiens
QNGSELKPLLQGDTTAARRAEAPDPLSNFNHLFAYPLYDFYH

SEQ ID NO: 27838 - DNA, 1392 bp, Homo sapiens
ttccggcttccccgccccgccccgtccccgggcgtctccattttggtctcaggtgtggactcggcaagaaccagcgcaagagggaagcagagttatagctaccccggccgcggagccggctcactgcactacccccgcccccttctttcctccagacgccgaagtcgcgggcgctcatggcgggcctggaggtactgttcgcatcggcagcgccggccatcacctgcaggcaggacgcgctcgtctgcttcttgcattgggaagtggtgacacacggttacttcggcttgggtgtcggtgaccagccgggtcccaatgataagaagtcagaactgctgccagctgggtggaacaacaataaagacctgtatgtcctccggtatgagtataaggatgggtccagaaagctccttgtgaaagccatcaccgtggagagcagcatgatcctcaatgtgctggaatatggctcacagcaagtggcagacttgaccctgaacttggatgattatatcgatgcagaacacctgggtgacttccacaggacctacaagaacagtgaggagcttcggtctcgtattgtgtctggaatcatcacacctatccatgagcagtgggaaaaggctaatgtaagcagtccccaccgggagttcccccctgctaccgccagagaggtggacccactccggattcctccacaccacccacacaccagtcggcagcctccctggtgtgatcccctgggcccgtttgttgtcgggggagaagacttagacccttttgggcctcggagaggtggcatgattgtggatcccctgagatctggcttcccaagagcacttattgacccttcctcaggcctcccgaaccgacttcctccaggcgctgtgcccccaggagctcgctttgacccctttggacccattgggaccagcccacccggacctaacccagaccatctccccccgccgggctacgatgacatgtacctgtgaaggcctcaagaatgtaacatcccaggcttccctccattctcctggagctgccaccgctgtccccatcagcaaccatgttcttgcaggctgggggcaagggattctgctcatgtgtttgcagaccggctgggatagcctccccaccccttatcagagccaagacacctgctgcagctctccacctagctgcagatagctcccaaagagaaatcagtgtgtctctttcaccatcagctcctcccctttcaccaccagctcctctccacttcccaagggagactccggcaaccttcagcaacatatatcctcgaccagatgcagtgctataagaacagaacgcattttggatgttattattaagaaccaaatgtcaatacagaattcatgttgccggtttccc

SEQ ID NO: 27839 - protein, 271 aa, Homo sapiens; identical to SEQ ID NO: 27835

SEQ ID NO: 27840 - DNA, 1929 bp, Homo sapiens
ttccggcttccccgccccgccccgtccccgggcgtctccattttggtctcaggtgtggactcggcaagaaccagcgcaagagggaagcagagttatagctaccccggccgcggagccggctcactgcactacccccgcccccttctttcctccagacgccgaagtcgcgggcgctcatggcgggcctggaggtactgttcgcatcggcagcgccggccatcacctgcaggcaggacgcgctcgtctgcttcttgcattgggaagtggtgacacacggttacttcggcttgggtgtcggtgaccagccgggtcccaatgataagaagtcagaactgctgccagctgggtggaacaacaataaagacctgtatgtcctccggtatgagtataaggatgggtccagaaagctccttgtgaaagccatcaccgtggagagcagcatgatcctcaatgtgctggaatatggctcacagcaagtggcagacttgaccctgaacttggatgattatatcgatgcagaacacctgggtgacttccacaggacctacaagaacagtgaggagcttcggtctcgtattgtgtctggaatcatcacacctatccatgagcagtgggaaaaggctaatgtaagcagtccccaccgggagttcccccctgctaccgccagagcctcggagaggtggcatgattgtggatcccctgagatctggcttcccaagagcacttattgacccttcctcaggcctcccgaaccgacttcctccaggcgctgtgcccccaggagctcgctttgacccctttggacccattgggaccagcccacccggcccgaggcctgacagacgcgggcagtgatgagccctgttctggagtggaaagagcacgatagagcaccaggctaagaggcacgagatcaaggcggtagtcacttccgctctgcagctagcatttcaaccatatgtggatcctttcatttctcagctccctggattccttcccctaaattaggacctattatttacctgtaggtaagcaagctactgtagctcttctgaggtatctgccaggctgttttctgtagcctcagattgcctatctgcttagcctgagaacaggtagatgaaaactaaactgatgcctaggcccagggtcagtctcagatggaagctgggcctgggtggggaggctagcatgcgtggctccctgggtatttctgtcagtccccatggcaagcagtgatttagtaaaacaccccagagtcagggaagccaaccaccttgaaacctttagaacatctctgctttggagaaagacccagagatcaggcagaggtgcagattcaatcattactcataacctttgagagatggcaaatgggaggagtgttagtctttgttttggaattggaccattcttgcaaccaaaaggacttagagcagtttgctcataaagacatcctttattataaaaggaagtatttaaaggatgatagagaccatcagatagaagcagggaaggtagataacttttaggaccttgatgtgaggaaaagataaaatttaaacaataaatttgccacttagattttctagcagcaaagtccgaaaagatagttatatacaaaattctgttttctgaaaacaaaattgtgattcaccttcagaattggccattttttttgtgagtttccttgcatcaaggacactgagaaacacagtcattgtcttaggtgttctatgggaggaagtgaatagagcctttaggaacttcctggtcaagcttatggtgcttattttgatctgggccacttccctccttccagtcatgagtaatcatcaaggagcaagttggagtgtttcaggtgtatattttgtagaacccaaaagattggagccttaacaataaacatcagcactaagtgacctgttc

SEQ ID NO: 27841 - protein, 184 aa, Homo sapiens
MAGLEVLFASAAPAITCRQDALVCFLHWEVVTHGYFGLGVGDQPGPNDKKSELLPAGWNNNKDLYVLRYEYKDGSRKLLVKAITVESSMILNVLEYGSQQVADLTLNLDDYIDAEHLGDFHRTYKNSEELRSRIVSGIITPIHEQWEKANVSSPHREFPPATARASERWHDCGSPEIWLPKSTY

SEQ ID NO: 27842 - DNA, 2042 bp, Homo sapiens
ttccggcttccccgccccgccccgtccccgggcgtctccattttggtctcaggtgtggactcggcaagaaccagcgcaagagggaagcagagttatagctaccccggccgcggagccggctcactgcactacccccgcccccttctttcctccagacgccgaagtcgcgggcgctcatggcgggcctggaggtactgttcgcatcggcagcgccggccatcacctgcaggcaggacgcgctcgtctgcttcttgcattgggaagtggtgacacacggttacttcggcttgggtgtcggtgaccagccgggtcccaatgataagaagtcagaactgctgccagctgggtggaacaacaataaagacctgtatgtcctccggtatgagtataaggatgggtccagaaagctccttgtgaaagccatcaccgtggagagcagcatgatcctcaatgtgctggaatatggctcacagcaagtggcagacttgaccctgaacttggatgattatatcgatgcagaacacctgggtgacttccacaggacctacaagaacagtgaggagcttcggtctcgtattgtgtctggaatcatcacacctatccatgagcagtgggaaaaggctaatgtaagcagtccccaccgggagttcccccctgctaccgccagagaggtggacccactccggattcctccacaccacccacacaccagtcggcagcctccctggtgtgatcccctgggcccgtttgttgtcgggggagaagacttagacccttttgggcctcggagaggtggcatgattgtggatcccctgagatctggcttcccaagagcacttattgacccttcctcaggcctcccgaaccgacttcctccaggcgctgtgcccccaggagctcgctttgacccctttggacccattgggaccagcccacccggcccgaggcctgacagacgcgggcagtgatgagccctgttctggagtggaaagagcacgatagagcaccaggctaagaggcacgagatcaaggcggtagtcacttccgctctgcagctagcatttcaaccatatgtggatcctttcatttctcagctccctggattccttcccctaaattaggacctattatttacctgtaggtaagcaagctactgtagctcttctgaggtatctgccaggctgttttctgtagcctcagattgcctatctgcttagcctgagaacaggtagatgaaaactaaactgatgcctaggcccagggtcagtctcagatggaagctgggcctgggtggggaggctagcatgcgtggctccctgggtatttctgtcagtccccatggcaagcagtgatttagtaaaacaccccagagtcagggaagccaaccaccttgaaacctttagaacatctctgctttggagaaagacccagagatcaggcagaggtgcagattcaatcattactcataacctttgagagatggcaaatgggaggagtgttagtctttgttttggaattggaccattcttgcaaccaaaaggacttagagcagtttgctcataaagacatcctttattataaaaggaagtatttaaaggatgatagagaccatcagatagaagcagggaaggtagataacttttaggaccttgatgtgaggaaaagataaaatttaaacaataaatttgccacttagattttctagcagcaaagtccgaaaagatagttatatacaaaattctgttttctgaaaacaaaattgtgattcaccttcagaattggccattttttttgtgagtttccttgcatcaaggacactgagaaacacagtcattgtcttaggtgttctatgggaggaagtgaatagagcctttaggaacttcctggtcaagcttatggtgcttattttgatctgggccacttccctccttccagtcatgagtaatcatcaaggagcaagttggagtgtttcaggtgtatattttgtagaacccaaaagattggagccttaacaataaacatcagcactaagtgacctgttc

SEQ ID NO: 27843 - protein, 263 aa, Homo sapiens
MAGLEVLFASAAPAITCRQDALVCFLHWEVVTHGYFGLGVGDQPGPNDKKSELLPAGWNNNKDLYVLRYEYKDGSRKLLVKAITVESSMILNVLEYGSQQVADLTLNLDDYIDAEHLGDFHRTYKNSEELRSRIVSGIITPIHEQWEKANVSSPHREFPPATAREVDPLRIPPHHPHTSRQPPWCDPLGPFVVGGEDLDPFGPRRGGMIVDPLRSGFPRALIDPSSGLPNRLPPGAVPPGARFDPFGPIGTSPPGPRPDRRGQ

SEQ ID NO: 27844 - DNA, 3240 bp, Homo sapiens
ttccggcttccccgccccgccccgtccccgggcgtctccattttggtctcaggtgtggactcggcaagaaccagcgcaagagggaagcagagttatagctaccccggccgcggagccggctcactgcactacccccgcccccttctttcctccagacgccgaagtcgcgggcgctcatggcgggcctggaggtactgttcgcatcggcagcgccggccatcacctgcaggcaggacgcgctcgtctgcttcttgcattgggaagtggtgacacacggttacttcggcttgggtgtcggtgaccagccgggtcccaatgataagaagtcagaactgctgccagctgggtggaacaacaataaagacctgtatgtcctccggtatgagtataaggatgggtccagaaagctccttgtgaaagccatcaccgtggagagcagcatgatcctcaatgtgctggaatatggctcacagcaagtggcagacttgaccctgaacttggatgattatatcgatgcagaacacctgggtgacttccacaggacctacaagaacagtgaggagcttcggtctcgtattgtgtctggaatcatcacacctatccatgagcagtgggaaaaggctaatgtaagcagtccccaccgggagttcccccctgctaccgccagagaggtggacccactccggattcctccacaccacccacacaccagtcggcagcctccctggtgtgatcccctgggcccgtttgttgtcgggggagaagacttagacccttttgggcctcggagaggtggcatgattgtggatcccctgagatctggcttcccaagagcacttattgacccttcctcaggcctcccgaaccgacttcctccaggcgctgtgcccccaggagctcgctttgacccctttggacccattgggaccagcccacccggacctaacccagaccatctccccccgccgggctacgatgacatgtacctgtgaaggcctcaagaatgtaacatcccaggcttccctccattctcctggagctgccaccgctgtccccatcagcaaccatgttcttgcaggctgggggcaagggattctgctcatgtgtttgcagaccggctgggatagcctccccaccccttatcagagccaagacacctgctgcagctctccacctagctgcagatagctcccaaagagaaatcagtgtgtctctttcaccatcagctcctcccctttcaccaccagctcctctccacttcccaagggagactccggcaaccttcagcaacatatatcctcgaccagatgcagtgctataagaacagaacgcattttggatgttattattaagaaccaaatgtcaatacagaattcatgttgccggtttcccacttttctttttacattaatgcatagctgcttccatttatgagactttagagtttgagtttctgtagggctgaatgactctttttcctgcccagggcccattcttgcttctcaggcaccttccgtttattaattgccattgctcctgacatcactaagatgggtccccttctggctgcatgaatggaaatgagtgactggaaatcccataggccacaagaatgactttcacaagggcaggaacattgtggaaagactgcatcattctgatgaggcaaaatcctccagctattcctgtctgggccagttttgtaggtccatctgtgcatgggcagcagtagtcaaaaagccaaggaaaaaacagagcagacctgaaggctaatcttatttttgccactaacttagtgaatgaccctaagcaagttccttctcctcttagggccttgtgccaagcctatgaaattggaggtggctttcctgctctaaagcattttgatgtctcattctgtgtttggtaacccctataaactggggcagaggaaaagaatgatggttcaaggccatacttcccttgaaccttgtgtggttcttgcctaactctgtggtttttggaccccatggggcccagacagagcacaggagcatgggctgcctctgagtgtggtgttgaacttcgggaggagcagggagccctgcaccttgtgtcctggcccacctgacctttggtgttctccggatccttttcagcccgaggcctgacagacgcgggcagtgatgagccctgttctggagtggaaagagcacgatagagcaccaggctaagaggcacgagatcaaggcggtagtcacttccgctctgcagctagcatttcaaccatatgtggatcctttcatttctcagctccctggattccttcccctaaattaggacctattatttacctgtaggtaagcaagctactgtagctcttctgaggtatctgccaggctgttttctgtagcctcagattgcctatctgcttagcctgagaacaggtagatgaaaactaaactgatgcctaggcccagggtcagtctcagatggaagctgggcctgggtggggaggctagcatgcgtggctccctgggtatttctgtcagtccccatggcaagcagtgatttagtaaaacaccccagagtcagggaagccaaccaccttgaaacctttagaacatctctgctttggagaaagacccagagatcaggcagaggtgcagattcaatcattactcataacctttgagagatggcaaatgggaggagtgttagtctttgttttggaattggaccattcttgcaaccaaaaggacttagagcagtttgctcataaagacatcctttattataaaaggaagtatttaaaggatgatagagaccatcagatagaagcagggaaggtagataacttttaggaccttgatgtgaggaaaagataaaatttaaacaataaatttgccacttagattttctagcagcaaagtccgaaaagatagttatatacaaaattctgttttctgaaaacaaaattgtgattcaccttcagaattggccattttttttgtgagtttccttgcatcaaggacactgagaaacacagtcattgtcttaggtgttctatgggaggaagtgaatagagcctttaggaacttcctggtcaagcttatggtgcttattttgatctgggccacttccctccttccagtcatgagtaatcatcaaggagcaagttggagtgtttcaggtgtatattttgtagaacccaaaagattggagccttaacaataaacatcagcactaagtgacctgttc

SEQ ID NO: 27845 - protein, 271 aa, Homo sapiens; identical to SEQ ID NO: 27835

SEQ ID NO: 27846 - DNA, 3595 bp, Homo sapiens
ttccggcttccccgccccgccccgtccccgggcgtctccattttggtctcaggtgtggactcggcaagaaccagcgcaagagggaagcagagttatagctaccccggccgcggagccggctcactgcactacccccgcccccttctttcctccagacgccgaagtcgcgggcgctcatggcgggcctggaggtactgttcgcatcggcagcgccggccatcacctgcaggcaggacgcgctcgtctgcttcttgcattgggaagtggtgacacacggttacttcggcttgggtgtcggtgaccagccgggtcccaatgataagaagtcagaactgctgccagctgggtggaacaacaataaagacctgtatgtcctccggtatgagtataaggatgggtccagaaagctccttgtgaaagccatcaccgtggagagcagcatgatcctcaatgtgctggaatatggctcacagcaagtggcagacttgaccctgaacttggatgattatatcgatgcagaacacctgggtgacttccacaggacctacaagaacagtgaggagcttcggtctcgtattgtgtctggaatcatcacacctatccatgagcagtgggaaaaggctaatgtaagcagtccccaccgggagttcccccctgctaccgccagagcctcggagaggtggcatgattgtggatcccctgagatctggcttcccaagagcacttattgacccttcctcaggcctcccgaaccgacttcctccaggcgctgtgcccccaggagctcgctttgacccctttggacccattgggaccagcccacccggcccgaggcctgacagacgcgggcagtgatgagccctgttctggagtggaaagagcacgatagagcaccaggctaagaggcacgagatcaaggcggtagtcacttccgctctgcagctagcatttcaaccatatgtggatcctttcatttctcagctccctggattccttcccctaaattaggacctattatttacctgtaggtaagcaagctactgtagctcttctgaggtatctgccaggctgttttctgtagcctcagattgcctatctgcttagcctgagaacaggtagatgaaaactaaactgatgcctaggcccagggtcagtctcagatggaagctgggcctgggtggggaggctagcatgcgtggctccctgggtatttctgtcagtccccatggcaagcagtgatttagtaaaacaccccagagtcagggaagccaaccaccttgaaacctttagaacatctctgctttggagaaagacccagagatcaggcagaggtgcagattcaatcattactcataacctttgagagatggcaaatgggaggagtgttagtctttgttttggaattggaccattcttgcaaccaaaaggacttagagcagtttgctcataaagacatcctttattataaaaggaagtatttaaaggatgatagagaccatcagatagaagcagggaaggtagataacttttaggaccttgatgtgaggaaaagataaaatttaaacaataaatttgccacttagattttctagcagcaaagtccgaaaagatagttatatacaaaattctgttttctgaaaacaaaattgtgattcaccttcagaattggccattttttttgtgagtttccttgcatcaaggacactgagaaacacagtcattgtcttaggtgttctatgggaggaagtgaatagagcctttaggaacttcctggtcaagcttatggtgcttattttgatctgggccacttccctccttccagtcatgagtaatcatcaaggagcaagttggagtgtttcaggtgtatattttgtagaacccaaaagattggagccttaacaataaacatcagcactaagtgacctgttcctccttttttaaatagcagctttattgagatataatttacatacccataatttacatacctgtttaaagtatacaattcagtggatttagtatgttcacagtgttgcacatccaccaccatttctaattcctgaacattttcaccacctcaaaaagaaaccacacacccattggcatgactccccattcccttgctcccagccccaggcaaccactaacatctgtctctaaagattttttttttttttctggacagttctcataagtggaatcactcagtattatggccttttgtgtctggcttctttcatttcatgtgatgttttcaagattcattcatgctgtagcatgtatccatggtatggatatatcacattttgcttatccttttatcagttgatggacagttgggttgtttctacaaaaaggctattatgagtaatgcagccaagaacatttgtgtaccagtttttgagttttcagttgtttgagtttcagatgttttcagttcatttgggtatataccaaggagtggaattgctggttcacatggtagctctatattctactttgtgaggaattgtcagactgttttccacggaagctgcaccattttacatttccactggtaatttatgagggttccagtttccccacatcttcaccaactcttgttatttttcatgcttatggccatcctagttagcgtgaagtagcatctcattgtggtcttctcttccattttttaaaaaagaattttgacctacaccaagcaaggcagagaccagagtcagtcccccttggggagcaatctgtggttttgataatcaccaccttgggatgaacatggctggtgagctgcagagcagttgatttgacttttggggatggttctaggctggatgtgatacagggcaggttttgtctctagagaaagttctcatgaccttcaggtctaatgagattcagatcatcactttggtttggtttgaaatttctttgtttatccagtgaattacaagtagaataaagatctggttctaaattgtcttttggtggtgaagtgccatagaccatttcggaccatttctatgatgtaccagcagcccccacatcacacctcctcttccttggcttgtctcttccccaattcttagagttagcagtgtttcttactgcattcatctcctcagtcataagtgtctgtcaacctccgttgtgaagtcatgagtctcttgagactgaaactccaagaatgtattgtgctcacagtggcgatggtgttcctgtgctggatggtcagtggttgttgacatgtagttagaaaataggtagcaagttccacgcagcctcactctttggaacctagtttctcctatggcctccctttctactgttgttaataacattctattaatgatccatgcctctcttcacaggaggaatattagaatctatggagcagttagtattctttgtcacctaaatttgtctacttctgtacatttccaataaggcaccaccagggcaagggaagattccccacatgtatatccccagctgtttctgtcataaaacttgcatgtgtataaaccactattgactttttgcaccaaaggagatattcaaggacagacatccaagtccccagccctttattgccctt

SEQ ID NO: 27847 - protein, 184 aa, Homo sapiens; identical to SEQ ID NO: 27841

SEQ ID NO: 27848 - DNA, 3708 bp, Homo sapiens
ttccggcttccccgccccgccccgtccccgggcgtctccattttggtctcaggtgtggactcggcaagaaccagcgcaagagggaagcagagttatagctaccccggccgcggagccggctcactgcactacccccgcccccttctttcctccagacgccgaagtcgcgggcgctcatggcgggcctggaggtactgttcgcatcggcagcgccggccatcacctgcaggcaggacgcgctcgtctgcttcttgcattgggaagtggtgacacacggttacttcggcttgggtgtcggtgaccagccgggtcccaatgataagaagtcagaactgctgccagctgggtggaacaacaataaagacctgtatgtcctccggtatgagtataaggatgggtccagaaagctccttgtgaaagccatcaccgtggagagcagcatgatcctcaatgtgctggaatatggctcacagcaagtggcagacttgaccctgaacttggatgattatatcgatgcagaacacctgggtgacttccacaggacctacaagaacagtgaggagcttcggtctcgtattgtgtctggaatcatcacacctatccatgagcagtgggaaaaggctaatgtaagcagtccccaccgggagttcccccctgctaccgccagagaggtggacccactccggattcctccacaccacccacacaccagtcggcagcctccctggtgtgatcccctgggcccgtttgttgtcgggggagaagacttagacccttttgggcctcggagaggtggcatgattgtggatcccctgagatctggcttcccaagagcacttattgacccttcctcaggcctcccgaaccgacttcctccaggcgctgtgcccccaggagctcgctttgacccctttggacccattgggaccagcccacccggcccgaggcctgacagacgcgggcagtgatgagccctgttctggagtggaaagagcacgatagagcaccaggctaagaggcacgagatcaaggcggtagtcacttccgctctgcagctagcatttcaaccatatgtggatcctttcatttctcagctccctggattccttcccctaaattaggacctattatttacctgtaggtaagcaagctactgtagctcttctgaggtatctgccaggctgttttctgtagcctcagattgcctatctgcttagcctgagaacaggtagatgaaaactaaactgatgcctaggcccagggtcagtctcagatggaagctgggcctgggtggggaggctagcatgcgtggctccctgggtatttctgtcagtccccatggcaagcagtgatttagtaaaacaccccagagtcagggaagccaaccaccttgaaacctttagaacatctctgctttggagaaagacccagagatcaggcagaggtgcagattcaatcattactcataacctttgagagatggcaaatgggaggagtgttagtctttgttttggaattggaccattcttgcaaccaaaaggacttagagcagtttgctcataaagacatcctttattataaaaggaagtatttaaaggatgatagagaccatcagatagaagcagggaaggtagataacttttaggaccttgatgtgaggaaaagataaaatttaaacaataaatttgccacttagattttctagcagcaaagtccgaaaagatagttatatacaaaattctgttttctgaaaacaaaattgtgattcaccttcagaattggccattttttttgtgagtttccttgcatcaaggacactgagaaacacagtcattgtcttaggtgttctatgggaggaagtgaatagagcctttaggaacttcctggtcaagcttatggtgcttattttgatctgggccacttccctccttccagtcatgagtaatcatcaaggagcaagttggagtgtttcaggtgtatattttgtagaacccaaaagattggagccttaacaataaacatcagcactaagtgacctgttcctccttttttaaatagcagctttattgagatataatttacatacccataatttacatacctgtttaaagtatacaattcagtggatttagtatgttcacagtgttgcacatccaccaccatttctaattcctgaacattttcaccacctcaaaaagaaaccacacacccattggcatgactccccattcccttgctcccagccccaggcaaccactaacatctgtctctaaagattttttttttttttctggacagttctcataagtggaatcactcagtattatggccttttgtgtctggcttctttcatttcatgtgatgttttcaagattcattcatgctgtagcatgtatccatggtatggatatatcacattttgcttatccttttatcagttgatggacagttgggttgtttctacaaaaaggctattatgagtaatgcagccaagaacatttgtgtaccagtttttgagttttcagttgtttgagtttcagatgttttcagttcatttgggtatataccaaggagtggaattgctggttcacatggtagctctatattctactttgtgaggaattgtcagactgttttccacggaagctgcaccattttacatttccactggtaatttatgagggttccagtttccccacatcttcaccaactcttgttatttttcatgcttatggccatcctagttagcgtgaagtagcatctcattgtggtcttctcttccattttttaaaaaagaattttgacctacaccaagcaaggcagagaccagagtcagtcccccttggggagcaatctgtggttttgataatcaccaccttgggatgaacatggctggtgagctgcagagcagttgatttgacttttggggatggttctaggctggatgtgatacagggcaggttttgtctctagagaaagttctcatgaccttcaggtctaatgagattcagatcatcactttggtttggtttgaaatttctttgtttatccagtgaattacaagtagaataaagatctggttctaaattgtcttttggtggtgaagtgccatagaccatttcggaccatttctatgatgtaccagcagcccccacatcacacctcctcttccttggcttgtctcttccccaattcttagagttagcagtgtttcttactgcattcatctcctcagtcataagtgtctgtcaacctccgttgtgaagtcatgagtctcttgagactgaaactccaagaatgtattgtgctcacagtggcgatggtgttcctgtgctggatggtcagtggttgttgacatgtagttagaaaataggtagcaagttccacgcagcctcactctttggaacctagtttctcctatggcctccctttctactgttgttaataacattctattaatgatccatgcctctcttcacaggaggaatattagaatctatggagcagttagtattctttgtcacctaaatttgtctacttctgtacatttccaataaggcaccaccagggcaagggaagattccccacatgtatatccccagctgtttctgtcataaaacttgcatgtgtataaaccactattgactttttgcaccaaaggagatattcaaggacagacatccaagtccccagccctttattgccctt

SEQ ID NO: 27849 - protein, 263 aa, Homo sapiens; identical to SEQ ID NO: 27843

SEQ ID NO: 27850 - DNA, 4906 bp, Homo sapiens
ttccggcttccccgccccgccccgtccccgggcgtctccattttggtctcaggtgtggactcggcaagaaccagcgcaagagggaagcagagttatagctaccccggccgcggagccggctcactgcactacccccgcccccttctttcctccagacgccgaagtcgcgggcgctcatggcgggcctggaggtactgttcgcatcggcagcgccggccatcacctgcaggcaggacgcgctcgtctgcttcttgcattgggaagtggtgacacacggttacttcggcttgggtgtcggtgaccagccgggtcccaatgataagaagtcagaactgctgccagctgggtggaacaacaataaagacctgtatgtcctccggtatgagtataaggatgggtccagaaagctccttgtgaaagccatcaccgtggagagcagcatgatcctcaatgtgctggaatatggctcacagcaagtggcagacttgaccctgaacttggatgattatatcgatgcagaacacctgggtgacttccacaggacctacaagaacagtgaggagcttcggtctcgtattgtgtctggaatcatcacacctatccatgagcagtgggaaaaggctaatgtaagcagtccccaccgggagttcccccctgctaccgccagagaggtggacccactccggattcctccacaccacccacacaccagtcggcagcctccctggtgtgatcccctgggcccgtttgttgtcgggggagaagacttagacccttttgggcctcggagaggtggcatgattgtggatcccctgagatctggcttcccaagagcacttattgacccttcctcaggcctcccgaaccgacttcctccaggcgctgtgcccccaggagctcgctttgacccctttggacccattgggaccagcccacccggacctaacccagaccatctccccccgccgggctacgatgacatgtacctgtgaaggcctcaagaatgtaacatcccaggcttccctccattctcctggagctgccaccgctgtccccatcagcaaccatgttcttgcaggctgggggcaagggattctgctcatgtgtttgcagaccggctgggatagcctccccaccccttatcagagccaagacacctgctgcagctctccacctagctgcagatagctcccaaagagaaatcagtgtgtctctttcaccatcagctcctcccctttcaccaccagctcctctccacttcccaagggagactccggcaaccttcagcaacatatatcctcgaccagatgcagtgctataagaacagaacgcattttggatgttattattaagaaccaaatgtcaatacagaattcatgttgccggtttcccacttttctttttacattaatgcatagctgcttccatttatgagactttagagtttgagtttctgtagggctgaatgactctttttcctgcccagggcccattcttgcttctcaggcaccttccgtttattaattgccattgctcctgacatcactaagatgggtccccttctggctgcatgaatggaaatgagtgactggaaatcccataggccacaagaatgactttcacaagggcaggaacattgtggaaagactgcatcattctgatgaggcaaaatcctccagctattcctgtctgggccagttttgtaggtccatctgtgcatgggcagcagtagtcaaaaagccaaggaaaaaacagagcagacctgaaggctaatcttatttttgccactaacttagtgaatgaccctaagcaagttccttctcctcttagggccttgtgccaagcctatgaaattggaggtggctttcctgctctaaagcattttgatgtctcattctgtgtttggtaacccctataaactggggcagaggaaaagaatgatggttcaaggccatacttcccttgaaccttgtgtggttcttgcctaactctgtggtttttggaccccatggggcccagacagagcacaggagcatgggctgcctctgagtgtggtgttgaacttcgggaggagcagggagccctgcaccttgtgtcctggcccacctgacctttggtgttctccggatccttttcagcccgaggcctgacagacgcgggcagtgatgagccctgttctggagtggaaagagcacgatagagcaccaggctaagaggcacgagatcaaggcggtagtcacttccgctctgcagctagcatttcaaccatatgtggatcctttcatttctcagctccctggattccttcccctaaattaggacctattatttacctgtaggtaagcaagctactgtagctcttctgaggtatctgccaggctgttttctgtagcctcagattgcctatctgcttagcctgagaacaggtagatgaaaactaaactgatgcctaggcccagggtcagtctcagatggaagctgggcctgggtggggaggctagcatgcgtggctccctgggtatttctgtcagtccccatggcaagcagtgatttagtaaaacaccccagagtcagggaagccaaccaccttgaaacctttagaacatctctgctttggagaaagacccagagatcaggcagaggtgcagattcaatcattactcataacctttgagagatggcaaatgggaggagtgttagtctttgttttggaattggaccattcttgcaaccaaaaggacttagagcagtttgctcataaagacatcctttattataaaaggaagtatttaaaggatgatagagaccatcagatagaagcagggaaggtagataacttttaggaccttgatgtgaggaaaagataaaatttaaacaataaatttgccacttagattttctagcagcaaagtccgaaaagatagttatatacaaaattctgttttctgaaaacaaaattgtgattcaccttcagaattggccattttttttgtgagtttccttgcatcaaggacactgagaaacacagtcattgtcttaggtgttctatgggaggaagtgaatagagcctttaggaacttcctggtcaagcttatggtgcttattttgatctgggccacttccctccttccagtcatgagtaatcatcaaggagcaagttggagtgtttcaggtgtatattttgtagaacccaaaagattggagccttaacaataaacatcagcactaagtgacctgttcctccttttttaaatagcagctttattgagatataatttacatacccataatttacatacctgtttaaagtatacaattcagtggatttagtatgttcacagtgttgcacatccaccaccatttctaattcctgaacattttcaccacctcaaaaagaaaccacacacccattggcatgactccccattcccttgctcccagccccaggcaaccactaacatctgtctctaaagattttttttttttttctggacagttctcataagtggaatcactcagtattatggccttttgtgtctggcttctttcatttcatgtgatgttttcaagattcattcatgctgtagcatgtatccatggtatggatatatcacattttgcttatccttttatcagttgatggacagttgggttgtttctacaaaaaggctattatgagtaatgcagccaagaacatttgtgtaccagtttttgagttttcagttgtttgagtttcagatgttttcagttcatttgggtatataccaaggagtggaattgctggttcacatggtagctctatattctactttgtgaggaattgtcagactgttttccacggaagctgcaccattttacatttccactggtaatttatgagggttccagtttccccacatcttcaccaactcttgttatttttcatgcttatggccatcctagttagcgtgaagtagcatctcattgtggtcttctcttccattttttaaaaaagaattttgacctacaccaagcaaggcagagaccagagtcagtcccccttggggagcaatctgtggttttgataatcaccaccttgggatgaacatggctggtgagctgcagagcagttgatttgacttttggggatggttctaggctggatgtgatacagggcaggttttgtctctagagaaagttctcatgaccttcaggtctaatgagattcagatcatcactttggtttggtttgaaatttctttgtttatccagtgaattacaagtagaataaagatctggttctaaattgtcttttggtggtgaagtgccatagaccatttcggaccatttctatgatgtaccagcagcccccacatcacacctcctcttccttggcttgtctcttccccaattcttagagttagcagtgtttcttactgcattcatctcctcagtcataagtgtctgtcaacctccgttgtgaagtcatgagtctcttgagactgaaactccaagaatgtattgtgctcacagtggcgatggtgttcctgtgctggatggtcagtggttgttgacatgtagttagaaaataggtagcaagttccacgcagcctcactctttggaacctagtttctcctatggcctccctttctactgttgttaataacattctattaatgatccatgcctctcttcacaggaggaatattagaatctatggagcagttagtattctttgtcacctaaatttgtctacttctgtacatttccaataaggcaccaccagggcaagggaagattccccacatgtatatccccagctgtttctgtcataaaacttgcatgtgtataaaccactattgactttttgcaccaaaggagatattcaaggacagacatccaagtccccagccctttattgccctt

SEQ ID NO: 27851 - protein, 271 aa, Homo sapiens; identical to SEQ ID NO: 27835

SEQ ID NO: 27852 - DNA, 3153 bp, Homo sapiens
ggcttccccgccccgccccgtccccgggcgtctccattttggtctcaggtgtggactcggcaagaaccagcgcaagagggaagcagagttatagctaccccggccgcggagccggctcactgcactacccccgcccccttctttcctccagacgccgaagtcgcgggcgctcatggcgggcctggaggtactgttcgcatcggcagcgccggccatcacctgcaggcaggacgcgctcgtctgcttcttgcattgggaagtggtgacacacggttacttcggcttgggtgtcggtgaccagccgggtcccaatgataagaagtcagaactgctgccagctgggtggaacaacaataaagacctgtatgtcctccggtatgagtataaggatgggtccagaaagctccttgtgaaagccatcaccgtggagagcagcatgatcctcaatgtgctggacctacaagaacagtgaggagcttcggtctcgtattgtgtctggaatcatcacacctatccatgagcagtgggaaaaggctaatgtaagcagtccccaccgggagttcccccctgctaccgccagagaggtggacccactccggattcctccacaccacccacacaccagtcggcagcctccctggtgtgatcccctgggcccgtttgttgtcgggggagaagacttagacccttttgggcctcggagaggtggcatgattgtggatcccctgagatctggcttcccaagagcacttattgacccttcctcaggcctcccgaaccgacttcctccaggcgctgtgcccccaggagctcgctttgacccctttggacccattgggaccagcccacccggacctaacccagaccatctccccccgccgggctacgatgacatgtacctgtgaaggcctcaagaatgtaacatcccaggcttccctccattctcctggagctgccaccgctgtccccatcagcaaccatgttcttgcaggctgggggcaagggattctgctcatgtgtttgcagaccggctgggatagcctccccaccccttatcagagccaagacacctgctgcagctctccacctagctgcagatagctcccaaagagaaatcagtgtgtctctttcaccatcagctcctcccctttcaccaccagctcctctccacttcccaagggagactccggcaaccttcagcaacatatatcctcgaccagatgcagtgctataagaacagaacgcattttggatgttattattaagaaccaaatgtcaatacagaattcatgttgccggtttcccacttttctttttacattaatgcatagctgcttccatttatgagactttagagtttgagtttctgtagggctgaatgactctttttcctgcccagggcccattcttgcttctcaggcaccttccgtttattaattgccattgctcctgacatcactaagatgggtccccttctggctgcatgaatggaaatgagtgactggaaatcccataggccacaagaatgactttcacaagggcaggaacattgtggaaagactgcatcattctgatgaggcaaaatcctccagctattcctgtctgggccagttttgtaggtccatctgtgcatgggcagcagtagtcaaaaagccaaggaaaaaacagagcagacctgaaggctaatcttatttttgccactaacttagtgaatgaccctaagcaagttccttctcctcttagggccttgtgccaagcctatgaaattggaggtggctttcctgctctaaagcattttgatgtctcattctgtgtttggtaacccctataaactggggcagaggaaaagaatgatggttcaaggccatacttcccttgaaccttgtgtggttcttgcctaactctgtggtttttggaccccatggggcccagacagagcacaggagcatgggctgcctctgagtgtggtgttgaacttcgggaggagcagggagccctgcaccttgtgtcctggcccacctgacctttggtgttctccggatccttttcagcccgaggcctgacagacgcgggcagtgatgagccctgttctggagtggaaagagcacgatagagcaccaggctaagaggcacgagatcaaggcggtagtcacttccgctctgcagctagcatttcaaccatatgtggatcctttcatttctcagctccctggattccttcccctaaattaggacctattatttacctgtaggtaagcaagctactgtagctcttctgaggtatctgccaggctgttttctgtagcctcagattgcctatctgcttagcctgagaacaggtagatgaaaactaaactgatgcctaggcccagggtcagtctcagatggaagctgggcctgggtggggaggctagcatgcgtggctccctgggtatttctgtcagtccccatggcaagcagtgatttagtaaaacaccccagagtcagggaagccaaccaccttgaaacctttagaacatctctgctttggagaaagacccagagatcaggcagaggtgcagattcaatcattactcataacctttgagagatggcaaatgggaggagtgttagtctttgttttggaattggaccattcttgcaaccaaaaggacttagagcagtttgctcataaagacatcctttattataaaaggaagtatttaaaggatgatagagaccatcagatagaagcagggaaggtagataacttttaggaccttgatgtgaggaaaagataaaatttaaacaataaatttgccacttagattttctagcagcaaagtccgaaaagatagttatatacaaaattctgttttctgaaaacaaaattgtgattcaccttcagaattggccattttttttgtgagtttccttgcatcaaggacactgagaaacacagtcattgtcttaggtgttctatgggaggaagtgaatagagcctttaggaacttcctggtcaagcttatggtgcttattttgatctgggccacttccctccttccagtcatgagtaatcatcaaggagcaagttggagtgtttcaggtgtatattttgtagaacccaaaagattggagccttaacaataaacatcagcactaagtgacctgttc

SEQ ID NO: 27853 - protein, 152 aa, Homo sapiens
MCWTYKNSEELRSRIVSGIITPIHEQWEKANVSSPHREFPPATAREVDPLRIPPHHPHTSRQPPWCDPLGPFVVGGEDLDPFGPRRGGMIVDPLRSGFPRALIDPSSGLPNRLPPGAVPPGARFDPFGPIGTSPPGPNPDHLPPPGYDDMYL

SEQ ID NO: 27854 - DNA, 574 bp, Homo sapiens
cgccccgccccgtccccgggcgtctccattttggtctcaggtgtggactcggcaagaaccagcgcaagagggaagcagagttatagctaccccggccgcggagccggctcactgcactacccccgcccccttctttcctccagacgccgaagtcgcgggcgctcatggcgggcctggagccgggtcccaatgataagaagtcagaactgctgccagctgggtggaacaacaataaagacctgtatgtcctccggtatgagtataaggatgggtccagaaagctccttgtgaaagccatcaccgtggagagcagcatgatcctcaatgtgctggaatatggctcacagcaagtggcagacttgaccctgaacttggatgattatatcgatgcagaacacctgggtgacttccacaggacctacaagaacagtgaggagcttcggtctcgtattgtgtctggaatcatcacacctatccatgagcagtgggaaaaggctaatgtaagcagtccccaccgggagttcccccctgctaccgccagagaggtggacccactccggattcctccacacca

SEQ ID NO: 27855 - protein, 135 aa, Homo sapiens
MAGLEPGPNDKKSELLPAGWNNNKDLYVLRYEYKDGSRKLLVKAITVESSMILNVLEYGSQQVADLTLNLDDYIDAEHLGDFHRTYKNSEELRSRIVSGIITPIHEQWEKANVSSPHREFPPATAREVDPLRIPP

SEQ ID NO: 27856 - DNA, 594 bp, Homo sapiens
gtccccgggcgtctccattttggtctcaggtgtggactcggcaagaaccagcgcaagagggaagcagagttatagctaccccggccgcggagccggctcactgcactacccccgcccccttctttcctccagacgccgaagtcgcgggcgctcatggcgggcctggaggtactgttcgcatcggcagcgccggccatcacctgcaggcaggacgcgctcgtctgcttcttgcattgggaagtggtgacacacggttacttcggcttgggtgtcggtgaccagccgggtcccaatgataagaagtcagaactgctgccagctgggtggaacaacaataaagacctgtatgtcctccggtatgagtataaggatgggtccagaaagctccttgtgaaagccatcaccgtggagagcagcatgatcctcaatgtgctggacctacaagaacagtgaggagcttcggtctcgtattgtgtctggaatcatcacacctatccatgagcagtgggaaaaggctaatgtaagcagtccccaccgggagttcccccctgctaccgccagagaggtggacccactccggattcctccacacca

SEQ ID NO: 27857 - protein, 99 aa, Homo sapiens
MAGLEVLFASAAPAITCRQDALVCFLHWEVVTHGYFGLGVGDQPGPNDKKSELLPAGWNNNKDLYVLRYEYKDGSRKLLVKAITVESSMILNVLDLQEQ

SEQ ID NO: 27858 - DNA, 499 bp, Homo sapiens
cccgggcgtctccattttggtctcaggtgtggactcggcaagaaccagcgcaagagggaagcagagttatagctaccccggccgcggagccggctcactgcactacccccgcccccttctttcctccagacgccgaagtcgcgggcgctcatggcgggcctggaggtactgttcgcatcggcagcgccggccatcacctgcaggcaggacgcgctcgtctgcttcttgcattgggaagtggtgacacacggttacttcggcttgggtgtcggtgaccagtccacctagctgcagatagctcccaaagagaaatcagtgtgtctctttcaccatcagctcctcccctttcaccaccagctcctctccacttcccaagggagactccggcaaccttcagcaacatatatcctcgaccagatgcagtgctataagaacagaacgcattttggatgttattattaagaaccaaatgtcaatacagaattcatgttgccggttt

SEQ ID NO: 27859 - protein, 45 aa, Homo sapiens
MAGLEVLFASAAPAITCRQDALVCFLHWEVVTHGYFGLGVGDQST

SEQ ID NO: 27860 - DNA, 632 bp, Homo sapiens
cattttggtctcaggtgtggactcggcaagaaccagcgcaagagggaagcagagttatagctaccccggccgcggagccggctcactgcactacccccgcccccttcgacttcctccaggcgctgtgcccccaggagctcgctttgacccctttggacccattgggaccagcccacccggacctaacccagaccatctccccccgccgggctacgatgacatgtacctgtgaaggcctcaagaatgtaacatcccaggcttccctccattctcctggagctgccaccgctgtccccatcagcaaccatgttcttgcaggctgggggcaagggattctgctcatgtgtttgcagaccggctgggatagcctccccaccccttatcagagccaagacacctgctgcagctctccacctagctgcagatagctcccaaagagaaatcagtgtgtctctttcaccatcagctcctcccctttcaccaccagctcctctccacttcccaagggagactccggcaaccttcagcaacatatatcctcgaccagatgcagtgctataagaacagaacgcattttggatgttattattaagaaccaaatgtcaatacagaattcatgttgccggtttccc

SEQ ID NO: 27861 - protein, 84 aa, Homo sapiens
MFLQAGGKGFCSCVCRPAGIASPPLIRAKTPAAALHLAADSSQREISVSLSPSAPPLSPPAPLHFPRETPATFSNIYPRPDAVL

SEQ ID NO: 27862 - DNA, 2480 bp, Homo sapiens
cattttggtctcaggtgtggactcggcaagaaccagcgcaagagggaagcagagttatagctaccccggccgcggagccggctcactgcactacccccgcccccttcgacttcctccaggcgctgtgcccccaggagctcgctttgacccctttggacccattgggaccagcccacccggacctaacccagaccatctccccccgccgggctacgatgacatgtacctgtgaaggcctcaagaatgtaacatcccaggcttccctccattctcctggagctgccaccgctgtccccatcagcaaccatgttcttgcaggctgggggcaagggattctgctcatgtgtttgcagaccggctgggatagcctccccaccccttatcagagccaagacacctgctgcagctctccacctagctgcagatagctcccaaagagaaatcagtgtgtctctttcaccatcagctcctcccctttcaccaccagctcctctccacttcccaagggagactccggcaaccttcagcaacatatatcctcgaccagatgcagtgctataagaacagaacgcattttggatgttattattaagaaccaaatgtcaatacagaattcatgttgccggtttcccacttttctttttacattaatgcatagctgcttccatttatgagactttagagtttgagtttctgtagggctgaatgactctttttcctgcccagggcccattcttgcttctcaggcaccttccgtttattaattgccattgctcctgacatcactaagatgggtccccttctggctgcatgaatggaaatgagtgactggaaatcccataggccacaagaatgactttcacaagggcaggaacattgtggaaagactgcatcattctgatgaggcaaaatcctccagctattcctgtctgggccagttttgtaggtccatctgtgcatgggcagcagtagtcaaaaagccaaggaaaaaacagagcagacctgaaggctaatcttatttttgccactaacttagtgaatgaccctaagcaagttccttctcctcttagggccttgtgccaagcctatgaaattggaggtggctttcctgctctaaagcattttgatgtctcattctgtgtttggtaacccctataaactggggcagaggaaaagaatgatggttcaaggccatacttcccttgaaccttgtgtggttcttgcctaactctgtggtttttggaccccatggggcccagacagagcacaggagcatgggctgcctctgagtgtggtgttgaacttcgggaggagcagggagccctgcaccttgtgtcctggcccacctgacctttggtgttctccggatccttttcagcccgaggcctgacagacgcgggcagtgatgagccctgttctggagtggaaagagcacgatagagcaccaggctaagaggcacgagatcaaggcggtagtcacttccgctctgcagctagcatttcaaccatatgtggatcctttcatttctcagctccctggattccttcccctaaattaggacctattatttacctgtaggtaagcaagctactgtagctcttctgaggtatctgccaggctgttttctgtagcctcagattgcctatctgcttagcctgagaacaggtagatgaaaactaaactgatgcctaggcccagggtcagtctcagatggaagctgggcctgggtggggaggctagcatgcgtggctccctgggtatttctgtcagtccccatggcaagcagtgatttagtaaaacaccccagagtcagggaagccaaccaccttgaaacctttagaacatctctgctttggagaaagacccagagatcaggcagaggtgcagattcaatcattactcataacctttgagagatggcaaatgggaggagtgttagtctttgttttggaattggaccattcttgcaaccaaaaggacttagagcagtttgctcataaagacatcctttattataaaaggaagtatttaaaggatgatagagaccatcagatagaagcagggaaggtagataacttttaggaccttgatgtgaggaaaagataaaatttaaacaataaatttgccacttagattttctagcagcaaagtccgaaaagatagttatatacaaaattctgttttctgaaaacaaaattgtgattcaccttcagaattggccattttttttgtgagtttccttgcatcaaggacactgagaaacacagtcattgtcttaggtgttctatgggaggaagtgaatagagcctttaggaacttcctggtcaagcttatggtgcttattttgatctgggccacttccctccttccagtcatgagtaatcatcaaggagcaagttggagtgtttcaggtgtatattttgtagaacccaaaagattggagccttaacaataaacatcagcactaagtgacctgttc

SEQ ID NO: 27863 - protein, 84 aa, Homo sapiens; identical to SEQ ID NO: 27861

SEQ ID NO: 27864 - DNA, 4146 bp, Homo sapiens
cattttggtctcaggtgtggactcggcaagaaccagcgcaagagggaagcagagttatagctaccccggccgcggagccggctcactgcactacccccgcccccttcgacttcctccaggcgctgtgcccccaggagctcgctttgacccctttggacccattgggaccagcccacccggacctaacccagaccatctccccccgccgggctacgatgacatgtacctgtgaaggcctcaagaatgtaacatcccaggcttccctccattctcctggagctgccaccgctgtccccatcagcaaccatgttcttgcaggctgggggcaagggattctgctcatgtgtttgcagaccggctgggatagcctccccaccccttatcagagccaagacacctgctgcagctctccacctagctgcagatagctcccaaagagaaatcagtgtgtctctttcaccatcagctcctcccctttcaccaccagctcctctccacttcccaagggagactccggcaaccttcagcaacatatatcctcgaccagatgcagtgctataagaacagaacgcattttggatgttattattaagaaccaaatgtcaatacagaattcatgttgccggtttcccacttttctttttacattaatgcatagctgcttccatttatgagactttagagtttgagtttctgtagggctgaatgactctttttcctgcccagggcccattcttgcttctcaggcaccttccgtttattaattgccattgctcctgacatcactaagatgggtccccttctggctgcatgaatggaaatgagtgactggaaatcccataggccacaagaatgactttcacaagggcaggaacattgtggaaagactgcatcattctgatgaggcaaaatcctccagctattcctgtctgggccagttttgtaggtccatctgtgcatgggcagcagtagtcaaaaagccaaggaaaaaacagagcagacctgaaggctaatcttatttttgccactaacttagtgaatgaccctaagcaagttccttctcctcttagggccttgtgccaagcctatgaaattggaggtggctttcctgctctaaagcattttgatgtctcattctgtgtttggtaacccctataaactggggcagaggaaaagaatgatggttcaaggccatacttcccttgaaccttgtgtggttcttgcctaactctgtggtttttggaccccatggggcccagacagagcacaggagcatgggctgcctctgagtgtggtgttgaacttcgggaggagcagggagccctgcaccttgtgtcctggcccacctgacctttggtgttctccggatccttttcagcccgaggcctgacagacgcgggcagtgatgagccctgttctggagtggaaagagcacgatagagcaccaggctaagaggcacgagatcaaggcggtagtcacttccgctctgcagctagcatttcaaccatatgtggatcctttcatttctcagctccctggattccttcccctaaattaggacctattatttacctgtaggtaagcaagctactgtagctcttctgaggtatctgccaggctgttttctgtagcctcagattgcctatctgcttagcctgagaacaggtagatgaaaactaaactgatgcctaggcccagggtcagtctcagatggaagctgggcctgggtggggaggctagcatgcgtggctccctgggtatttctgtcagtccccatggcaagcagtgatttagtaaaacaccccagagtcagggaagccaaccaccttgaaacctttagaacatctctgctttggagaaagacccagagatcaggcagaggtgcagattcaatcattactcataacctttgagagatggcaaatgggaggagtgttagtctttgttttggaattggaccattcttgcaaccaaaaggacttagagcagtttgctcataaagacatcctttattataaaaggaagtatttaaaggatgatagagaccatcagatagaagcagggaaggtagataacttttaggaccttgatgtgaggaaaagataaaatttaaacaataaatttgccacttagattttctagcagcaaagtccgaaaagatagttatatacaaaattctgttttctgaaaacaaaattgtgattcaccttcagaattggccattttttttgtgagtttccttgcatcaaggacactgagaaacacagtcattgtcttaggtgttctatgggaggaagtgaatagagcctttaggaacttcctggtcaagcttatggtgcttattttgatctgggccacttccctccttccagtcatgagtaatcatcaaggagcaagttggagtgtttcaggtgtatattttgtagaacccaaaagattggagccttaacaataaacatcagcactaagtgacctgttcctccttttttaaatagcagctttattgagatataatttacatacccataatttacatacctgtttaaagtatacaattcagtggatttagtatgttcacagtgttgcacatccaccaccatttctaattcctgaacattttcaccacctcaaaaagaaaccacacacccattggcatgactccccattcccttgctcccagccccaggcaaccactaacatctgtctctaaagattttttttttttttctggacagttctcataagtggaatcactcagtattatggccttttgtgtctggcttctttcatttcatgtgatgttttcaagattcattcatgctgtagcatgtatccatggtatggatatatcacattttgcttatccttttatcagttgatggacagttgggttgtttctacaaaaaggctattatgagtaatgcagccaagaacatttgtgtaccagtttttgagttttcagttgtttgagtttcagatgttttcagttcatttgggtatataccaaggagtggaattgctggttcacatggtagctctatattctactttgtgaggaattgtcagactgttttccacggaagctgcaccattttacatttccactggtaatttatgagggttccagtttccccacatcttcaccaactcttgttatttttcatgcttatggccatcctagttagcgtgaagtagcatctcattgtggtcttctcttccattttttaaaaaagaattttgacctacaccaagcaaggcagagaccagagtcagtcccccttggggagcaatctgtggttttgataatcaccaccttgggatgaacatggctggtgagctgcagagcagttgatttgacttttggggatggttctaggctggatgtgatacagggcaggttttgtctctagagaaagttctcatgaccttcaggtctaatgagattcagatcatcactttggtttggtttgaaatttctttgtttatccagtgaattacaagtagaataaagatctggttctaaattgtcttttggtggtgaagtgccatagaccatttcggaccatttctatgatgtaccagcagcccccacatcacacctcctcttccttggcttgtctcttccccaattcttagagttagcagtgtttcttactgcattcatctcctcagtcataagtgtctgtcaacctccgttgtgaagtcatgagtctcttgagactgaaactccaagaatgtattgtgctcacagtggcgatggtgttcctgtgctggatggtcagtggttgttgacatgtagttagaaaataggtagcaagttccacgcagcctcactctttggaacctagtttctcctatggcctccctttctactgttgttaataacattctattaatgatccatgcctctcttcacaggaggaatattagaatctatggagcagttagtattctttgtcacctaaatttgtctacttctgtacatttccaataaggcaccaccagggcaagggaagattccccacatgtatatccccagctgtttctgtcataaaacttgcatgtgtataaaccactattgactttttgcaccaaaggagatattcaaggacagacatccaagtccccagccctttattgccctt

SEQ ID NO: 27865 - protein, 84 aa, Homo sapiens; identical to SEQ ID NO: 27861

SEQ ID NO: 27866 - DNA, 1132 bp, Homo sapiens
gccctgtgcccctacaccctcacctctttctaatggggtggtaaacaaggaggggcaactcagatgcctaagaagcttgggcccaaatctcagagacagcgtggggctgttgcccccctcacccaggtccagcaggcggcctgttcccccacttataaacaggccaagcgcaatgccaggagctatcagggccgccgccgccgccgtcgttgcagccagaataccacttccagggttcctagccaactgcaagcagttgactcttcatctgcttcctgcaggacctacaagaacagtgaggagcttcggtctcgtattgtgtctggaatcatcacacctatccatgagcagtgggaaaaggctaatgtaagcagtccccaccgggagttcccccctgctaccgccagagaggtggacccactccggattcctccacaccacccacacaccagtcggcagcctccctggtgtgatcccctgggcccgtttgttgtcgggggagaagacttagacccttttgggcctcggagaggtggcatgattgtggatcccctgagatctggcttcccaagagcacttattgacccttcctcaggcctcccgaaccgacttcctccaggcgctgtgcccccaggagctcgctttgacccctttggacccattgggaccagcccacccggacctaacccagaccatctccccccgccgggctacgatgacatgtacctgtgaaggcctcaagaatgtaacatcccaggcttccctccattctcctggagctgccaccgctgtccccatcagcaaccatgttcttgcaggctgggggcaagggattctgctcatgtgtttgcagaccggctgggatagcctccccaccccttatcagagccaagacacctgctgcagctctccacctagctgcagatagctcccaaagagaaatcagtgtgtctctttcaccatcagctcctcccctttcaccaccagctcctctccacttcccaagggagactccggcaaccttcagcaacatatatcctcgaccagatgcagtgctataagaacagaacgcattttggatgttattattaagaaccaaatgtcaatacagaattcatgttgccggtttccc

SEQ ID NO: 27867 - protein, 222 aa, Homo sapiens
MPKKLGPKSQRQRGAVAPLTQVQQAACSPTYKQAKRNARSYQGRRRRRRCSQNTTSRVPSQLQAVDSSSASCRTYKNSEELRSRIVSGIITPIHEQWEKANVSSPHREFPPATAREVDPLRIPPHHPHTSRQPPWCDPLGPFVVGGEDLDPFGPRRGGMIVDPLRSGFPRALIDPSSGLPNRLPPGAVPPGARFDPFGPIGTSPPGPNPDHLPPPGYDDMYL

SEQ ID NO: 27868 - DNA, 2980 bp, Homo sapiens
gccctgtgcccctacaccctcacctctttctaatggggtggtaaacaaggaggggcaactcagatgcctaagaagcttgggcccaaatctcagagacagcgtggggctgttgcccccctcacccaggtccagcaggcggcctgttcccccacttataaacaggccaagcgcaatgccaggagctatcagggccgccgccgccgccgtcgttgcagccagaataccacttccagggttcctagccaactgcaagcagttgactcttcatctgcttcctgcaggacctacaagaacagtgaggagcttcggtctcgtattgtgtctggaatcatcacacctatccatgagcagtgggaaaaggctaatgtaagcagtccccaccgggagttcccccctgctaccgccagagaggtggacccactccggattcctccacaccacccacacaccagtcggcagcctccctggtgtgatcccctgggcccgtttgttgtcgggggagaagacttagacccttttgggcctcggagaggtggcatgattgtggatcccctgagatctggcttcccaagagcacttattgacccttcctcaggcctcccgaaccgacttcctccaggcgctgtgcccccaggagctcgctttgacccctttggacccattgggaccagcccacccggacctaacccagaccatctccccccgccgggctacgatgacatgtacctgtgaaggcctcaagaatgtaacatcccaggcttccctccattctcctggagctgccaccgctgtccccatcagcaaccatgttcttgcaggctgggggcaagggattctgctcatgtgtttgcagaccggctgggatagcctccccaccccttatcagagccaagacacctgctgcagctctccacctagctgcagatagctcccaaagagaaatcagtgtgtctctttcaccatcagctcctcccctttcaccaccagctcctctccacttcccaagggagactccggcaaccttcagcaacatatatcctcgaccagatgcagtgctataagaacagaacgcattttggatgttattattaagaaccaaatgtcaatacagaattcatgttgccggtttcccacttttctttttacattaatgcatagctgcttccatttatgagactttagagtttgagtttctgtagggctgaatgactctttttcctgcccagggcccattcttgcttctcaggcaccttccgtttattaattgccattgctcctgacatcactaagatgggtccccttctggctgcatgaatggaaatgagtgactggaaatcccataggccacaagaatgactttcacaagggcaggaacattgtggaaagactgcatcattctgatgaggcaaaatcctccagctattcctgtctgggccagttttgtaggtccatctgtgcatgggcagcagtagtcaaaaagccaaggaaaaaacagagcagacctgaaggctaatcttatttttgccactaacttagtgaatgaccctaagcaagttccttctcctcttagggccttgtgccaagcctatgaaattggaggtggctttcctgctctaaagcattttgatgtctcattctgtgtttggtaacccctataaactggggcagaggaaaagaatgatggttcaaggccatacttcccttgaaccttgtgtggttcttgcctaactctgtggtttttggaccccatggggcccagacagagcacaggagcatgggctgcctctgagtgtggtgttgaacttcgggaggagcagggagccctgcaccttgtgtcctggcccacctgacctttggtgttctccggatccttttcagcccgaggcctgacagacgcgggcagtgatgagccctgttctggagtggaaagagcacgatagagcaccaggctaagaggcacgagatcaaggcggtagtcacttccgctctgcagctagcatttcaaccatatgtggatcctttcatttctcagctccctggattccttcccctaaattaggacctattatttacctgtaggtaagcaagctactgtagctcttctgaggtatctgccaggctgttttctgtagcctcagattgcctatctgcttagcctgagaacaggtagatgaaaactaaactgatgcctaggcccagggtcagtctcagatggaagctgggcctgggtggggaggctagcatgcgtggctccctgggtatttctgtcagtccccatggcaagcagtgatttagtaaaacaccccagagtcagggaagccaaccaccttgaaacctttagaacatctctgctttggagaaagacccagagatcaggcagaggtgcagattcaatcattactcataacctttgagagatggcaaatgggaggagtgttagtctttgttttggaattggaccattcttgcaaccaaaaggacttagagcagtttgctcataaagacatcctttattataaaaggaagtatttaaaggatgatagagaccatcagatagaagcagggaaggtagataacttttaggaccttgatgtgaggaaaagataaaatttaaacaataaatttgccacttagattttctagcagcaaagtccgaaaagatagttatatacaaaattctgttttctgaaaacaaaattgtgattcaccttcagaattggccattttttttgtgagtttccttgcatcaaggacactgagaaacacagtcattgtcttaggtgttctatgggaggaagtgaatagagcctttaggaacttcctggtcaagcttatggtgcttattttgatctgggccacttccctccttccagtcatgagtaatcatcaaggagcaagttggagtgtttcaggtgtatattttgtagaacccaaaagattggagccttaacaataaacatcagcactaagtgacctgttc

SEQ ID NO: 27869 - protein, 222 aa, Homo sapiens; identical to SEQ ID NO: 27867

SEQ ID NO: 27870 - DNA, 4646 bp, Homo sapiens
gccctgtgcccctacaccctcacctctttctaatggggtggtaaacaaggaggggcaactcagatgcctaagaagcttgggcccaaatctcagagacagcgtggggctgttgcccccctcacccaggtccagcaggcggcctgttcccccacttataaacaggccaagcgcaatgccaggagctatcagggccgccgccgccgccgtcgttgcagccagaataccacttccagggttcctagccaactgcaagcagttgactcttcatctgcttcctgcaggacctacaagaacagtgaggagcttcggtctcgtattgtgtctggaatcatcacacctatccatgagcagtgggaaaaggctaatgtaagcagtccccaccgggagttcccccctgctaccgccagagaggtggacccactccggattcctccacaccacccacacaccagtcggcagcctccctggtgtgatcccctgggcccgtttgttgtcgggggagaagacttagacccttttgggcctcggagaggtggcatgattgtggatcccctgagatctggcttcccaagagcacttattgacccttcctcaggcctcccgaaccgacttcctccaggcgctgtgcccccaggagctcgctttgacccctttggacccattgggaccagcccacccggacctaacccagaccatctccccccgccgggctacgatgacatgtacctgtgaaggcctcaagaatgtaacatcccaggcttccctccattctcctggagctgccaccgctgtccccatcagcaaccatgttcttgcaggctgggggcaagggattctgctcatgtgtttgcagaccggctgggatagcctccccaccccttatcagagccaagacacctgctgcagctctccacctagctgcagatagctcccaaagagaaatcagtgtgtctctttcaccatcagctcctcccctttcaccaccagctcctctccacttcccaagggagactccggcaaccttcagcaacatatatcctcgaccagatgcagtgctataagaacagaacgcattttggatgttattattaagaaccaaatgtcaatacagaattcatgttgccggtttcccacttttctttttacattaatgcatagctgcttccatttatgagactttagagtttgagtttctgtagggctgaatgactctttttcctgcccagggcccattcttgcttctcaggcaccttccgtttattaattgccattgctcctgacatcactaagatgggtccccttctggctgcatgaatggaaatgagtgactggaaatcccataggccacaagaatgactttcacaagggcaggaacattgtggaaagactgcatcattctgatgaggcaaaatcctccagctattcctgtctgggccagttttgtaggtccatctgtgcatgggcagcagtagtcaaaaagccaaggaaaaaacagagcagacctgaaggctaatcttatttttgccactaacttagtgaatgaccctaagcaagttccttctcctcttagggccttgtgccaagcctatgaaattggaggtggctttcctgctctaaagcattttgatgtctcattctgtgtttggtaacccctataaactggggcagaggaaaagaatgatggttcaaggccatacttcccttgaaccttgtgtggttcttgcctaactctgtggtttttggaccccatggggcccagacagagcacaggagcatgggctgcctctgagtgtggtgttgaacttcgggaggagcagggagccctgcaccttgtgtcctggcccacctgacctttggtgttctccggatccttttcagcccgaggcctgacagacgcgggcagtgatgagccctgttctggagtggaaagagcacgatagagcaccaggctaagaggcacgagatcaaggcggtagtcacttccgctctgcagctagcatttcaaccatatgtggatcctttcatttctcagctccctggattccttcccctaaattaggacctattatttacctgtaggtaagcaagctactgtagctcttctgaggtatctgccaggctgttttctgtagcctcagattgcctatctgcttagcctgagaacaggtagatgaaaactaaactgatgcctaggcccagggtcagtctcagatggaagctgggcctgggtggggaggctagcatgcgtggctccctgggtatttctgtcagtccccatggcaagcagtgatttagtaaaacaccccagagtcagggaagccaaccaccttgaaacctttagaacatctctgctttggagaaagacccagagatcaggcagaggtgcagattcaatcattactcataacctttgagagatggcaaatgggaggagtgttagtctttgttttggaattggaccattcttgcaaccaaaaggacttagagcagtttgctcataaagacatcctttattataaaaggaagtatttaaaggatgatagagaccatcagatagaagcagggaaggtagataacttttaggaccttgatgtgaggaaaagataaaatttaaacaataaatttgccacttagattttctagcagcaaagtccgaaaagatagttatatacaaaattctgttttctgaaaacaaaattgtgattcaccttcagaattggccattttttttgtgagtttccttgcatcaaggacactgagaaacacagtcattgtcttaggtgttctatgggaggaagtgaatagagcctttaggaacttcctggtcaagcttatggtgcttattttgatctgggccacttccctccttccagtcatgagtaatcatcaaggagcaagttggagtgtttcaggtgtatattttgtagaacccaaaagattggagccttaacaataaacatcagcactaagtgacctgttcctccttttttaaatagcagctttattgagatataatttacatacccataatttacatacctgtttaaagtatacaattcagtggatttagtatgttcacagtgttgcacatccaccaccatttctaattcctgaacattttcaccacctcaaaaagaaaccacacacccattggcatgactccccattcccttgctcccagccccaggcaaccactaacatctgtctctaaagattttttttttttttctggacagttctcataagtggaatcactcagtattatggccttttgtgtctggcttctttcatttcatgtgatgttttcaagattcattcatgctgtagcatgtatccatggtatggatatatcacattttgcttatccttttatcagttgatggacagttgggttgtttctacaaaaaggctattatgagtaatgcagccaagaacatttgtgtaccagtttttgagttttcagttgtttgagtttcagatgttttcagttcatttgggtatataccaaggagtggaattgctggttcacatggtagctctatattctactttgtgaggaattgtcagactgttttccacggaagctgcaccattttacatttccactggtaatttatgagggttccagtttccccacatcttcaccaactcttgttatttttcatgcttatggccatcctagttagcgtgaagtagcatctcattgtggtcttctcttccattttttaaaaaagaattttgacctacaccaagcaaggcagagaccagagtcagtcccccttggggagcaatctgtggttttgataatcaccaccttgggatgaacatggctggtgagctgcagagcagttgatttgacttttggggatggttctaggctggatgtgatacagggcaggttttgtctctagagaaagttctcatgaccttcaggtctaatgagattcagatcatcactttggtttggtttgaaatttctttgtttatccagtgaattacaagtagaataaagatctggttctaaattgtcttttggtggtgaagtgccatagaccatttcggaccatttctatgatgtaccagcagcccccacatcacacctcctcttccttggcttgtctcttccccaattcttagagttagcagtgtttcttactgcattcatctcctcagtcataagtgtctgtcaacctccgttgtgaagtcatgagtctcttgagactgaaactccaagaatgtattgtgctcacagtggcgatggtgttcctgtgctggatggtcagtggttgttgacatgtagttagaaaataggtagcaagttccacgcagcctcactctttggaacctagtttctcctatggcctccctttctactgttgttaataacattctattaatgatccatgcctctcttcacaggaggaatattagaatctatggagcagttagtattctttgtcacctaaatttgtctacttctgtacatttccaataaggcaccaccagggcaagggaagattccccacatgtatatccccagctgtttctgtcataaaacttgcatgtgtataaaccactattgactttttgcaccaaaggagatattcaaggacagacatccaagtccccagccctttattgccctt

SEQ ID NO: 27871 - protein, 222 aa, Homo sapiens; identical to SEQ ID NO: 27867

SEQ ID NO: 27872 - DNA, 2441 bp, Homo sapiens
cagatgcctaagaagcttgggcccaaatctcagagacagcgtggggctgttgcccccctcacccaggtccagcaggcggcctgttcccccacttataaacaggccaagcgcaatgccaggagctatcagggccgccgccgccgccgtcgttgcagccagaataccacttccagggttcctagccaactgcaagcagttgactcttcatctgcttcctgcaggacctacaagaacagtgaggagcttcggtctcgtattgtgtctggaatcatcacacctatccatgagcagtgggaaaaggctaatgtaagcagtccccaccgggagttcccccctgctaccgccagagaggtggacccactccggattcctccactagctgcagatagctcccaaagagaaatcagtgtgtctctttcaccatcagctcctcccctttcaccaccagctcctctccacttcccaagggagactccggcaaccttcagcaacatatatcctcgaccagatgcagtgctataagaacagaacgcattttggatgttattattaagaaccaaatgtcaatacagaattcatgttgccggtttcccacttttctttttacattaatgcatagctgcttccatttatgagactttagagtttgagtttctgtagggctgaatgactctttttcctgcccagggcccattcttgcttctcaggcaccttccgtttattaattgccattgctcctgacatcactaagatgggtccccttctggctgcatgaatggaaatgagtgactggaaatcccataggccacaagaatgactttcacaagggcaggaacattgtggaaagactgcatcattctgatgaggcaaaatcctccagctattcctgtctgggccagttttgtaggtccatctgtgcatgggcagcagtagtcaaaaagccaaggaaaaaacagagcagacctgaaggctaatcttatttttgccactaacttagtgaatgaccctaagcaagttccttctcctcttagggccttgtgccaagcctatgaaattggaggtggctttcctgctctaaagcattttgatgtctcattctgtgtttggtaacccctataaactggggcagaggaaaagaatgatggttcaaggccatacttcccttgaaccttgtgtggttcttgcctaactctgtggtttttggaccccatggggcccagacagagcacaggagcatgggctgcctctgagtgtggtgttgaacttcgggaggagcagggagccctgcaccttgtgtcctggcccacctgacctttggtgttctccggatccttttcagcccgaggcctgacagacgcgggcagtgatgagccctgttctggagtggaaagagcacgatagagcaccaggctaagaggcacgagatcaaggcggtagtcacttccgctctgcagctagcatttcaaccatatgtggatcctttcatttctcagctccctggattccttcccctaaattaggacctattatttacctgtaggtaagcaagctactgtagctcttctgaggtatctgccaggctgttttctgtagcctcagattgcctatctgcttagcctgagaacaggtagatgaaaactaaactgatgcctaggcccagggtcagtctcagatggaagctgggcctgggtggggaggctagcatgcgtggctccctgggtatttctgtcagtccccatggcaagcagtgatttagtaaaacaccccagagtcagggaagccaaccaccttgaaacctttagaacatctctgctttggagaaagacccagagatcaggcagaggtgcagattcaatcattactcataacctttgagagatggcaaatgggaggagtgttagtctttgttttggaattggaccattcttgcaaccaaaaggacttagagcagtttgctcataaagacatcctttattataaaaggaagtatttaaaggatgatagagaccatcagatagaagcagggaaggtagataacttttaggaccttgatgtgaggaaaagataaaatttaaacaataaatttgccacttagattttctagcagcaaagtccgaaaagatagttatatacaaaattctgttttctgaaaacaaaattgtgattcaccttcagaattggccattttttttgtgagtttccttgcatcaaggacactgagaaacacagtcattgtcttaggtgttctatgggaggaagtgaatagagcctttaggaacttcctggtcaagcttatggtgcttattttgatctgggccacttccctccttccagtcatgagtaatcatcaaggagcaagttggagtgtttcaggtgtatattttgtagaacccaaaagattggagccttaacaataaacatcagcactaagtgacctgttc

SEQ ID NO: 27873 - protein, 172 aa, Homo sapiens
MPKKLGPKSQRQRGAVAPLTQVQQAACSPTYKQAKRNARSYQGRRRRRRCSQNTTSRVPSQLQAVDSSSASCRTYKNSEELRSRIVSGIITPIHEQWEKANVSSPHREFPPATAREVDPLRIPPLAADSSQREISVSLSPSAPPLSPPAPLHFPRETPATFSNIYPRPDAVL

SEQ ID NO: 27874 - DNA, 4107 bp, Homo sapiens
cagatgcctaagaagcttgggcccaaatctcagagacagcgtggggctgttgcccccctcacccaggtccagcaggcggcctgttcccccacttataaacaggccaagcgcaatgccaggagctatcagggccgccgccgccgccgtcgttgcagccagaataccacttccagggttcctagccaactgcaagcagttgactcttcatctgcttcctgcaggacctacaagaacagtgaggagcttcggtctcgtattgtgtctggaatcatcacacctatccatgagcagtgggaaaaggctaatgtaagcagtccccaccgggagttcccccctgctaccgccagagaggtggacccactccggattcctccactagctgcagatagctcccaaagagaaatcagtgtgtctctttcaccatcagctcctcccctttcaccaccagctcctctccacttcccaagggagactccggcaaccttcagcaacatatatcctcgaccagatgcagtgctataagaacagaacgcattttggatgttattattaagaaccaaatgtcaatacagaattcatgttgccggtttcccacttttctttttacattaatgcatagctgcttccatttatgagactttagagtttgagtttctgtagggctgaatgactctttttcctgcccagggcccattcttgcttctcaggcaccttccgtttattaattgccattgctcctgacatcactaagatgggtccccttctggctgcatgaatggaaatgagtgactggaaatcccataggccacaagaatgactttcacaagggcaggaacattgtggaaagactgcatcattctgatgaggcaaaatcctccagctattcctgtctgggccagttttgtaggtccatctgtgcatgggcagcagtagtcaaaaagccaaggaaaaaacagagcagacctgaaggctaatcttatttttgccactaacttagtgaatgaccctaagcaagttccttctcctcttagggccttgtgccaagcctatgaaattggaggtggctttcctgctctaaagcattttgatgtctcattctgtgtttggtaacccctataaactggggcagaggaaaagaatgatggttcaaggccatacttcccttgaaccttgtgtggttcttgcctaactctgtggtttttggaccccatggggcccagacagagcacaggagcatgggctgcctctgagtgtggtgttgaacttcgggaggagcagggagccctgcaccttgtgtcctggcccacctgacctttggtgttctccggatccttttcagcccgaggcctgacagacgcgggcagtgatgagccctgttctggagtggaaagagcacgatagagcaccaggctaagaggcacgagatcaaggcggtagtcacttccgctctgcagctagcatttcaaccatatgtggatcctttcatttctcagctccctggattccttcccctaaattaggacctattatttacctgtaggtaagcaagctactgtagctcttctgaggtatctgccaggctgttttctgtagcctcagattgcctatctgcttagcctgagaacaggtagatgaaaactaaactgatgcctaggcccagggtcagtctcagatggaagctgggcctgggtggggaggctagcatgcgtggctccctgggtatttctgtcagtccccatggcaagcagtgatttagtaaaacaccccagagtcagggaagccaaccaccttgaaacctttagaacatctctgctttggagaaagacccagagatcaggcagaggtgcagattcaatcattactcataacctttgagagatggcaaatgggaggagtgttagtctttgttttggaattggaccattcttgcaaccaaaaggacttagagcagtttgctcataaagacatcctttattataaaaggaagtatttaaaggatgatagagaccatcagatagaagcagggaaggtagataacttttaggaccttgatgtgaggaaaagataaaatttaaacaataaatttgccacttagattttctagcagcaaagtccgaaaagatagttatatacaaaattctgttttctgaaaacaaaattgtgattcaccttcagaattggccattttttttgtgagtttccttgcatcaaggacactgagaaacacagtcattgtcttaggtgttctatgggaggaagtgaatagagcctttaggaacttcctggtcaagcttatggtgcttattttgatctgggccacttccctccttccagtcatgagtaatcatcaaggagcaagttggagtgtttcaggtgtatattttgtagaacccaaaagattggagccttaacaataaacatcagcactaagtgacctgttcctccttttttaaatagcagctttattgagatataatttacatacccataatttacatacctgtttaaagtatacaattcagtggatttagtatgttcacagtgttgcacatccaccaccatttctaattcctgaacattttcaccacctcaaaaagaaaccacacacccattggcatgactccccattcccttgctcccagccccaggcaaccactaacatctgtctctaaagattttttttttttttctggacagttctcataagtggaatcactcagtattatggccttttgtgtctggcttctttcatttcatgtgatgttttcaagattcattcatgctgtagcatgtatccatggtatggatatatcacattttgcttatccttttatcagttgatggacagttgggttgtttctacaaaaaggctattatgagtaatgcagccaagaacatttgtgtaccagtttttgagttttcagttgtttgagtttcagatgttttcagttcatttgggtatataccaaggagtggaattgctggttcacatggtagctctatattctactttgtgaggaattgtcagactgttttccacggaagctgcaccattttacatttccactggtaatttatgagggttccagtttccccacatcttcaccaactcttgttatttttcatgcttatggccatcctagttagcgtgaagtagcatctcattgtggtcttctcttccattttttaaaaaagaattttgacctacaccaagcaaggcagagaccagagtcagtcccccttggggagcaatctgtggttttgataatcaccaccttgggatgaacatggctggtgagctgcagagcagttgatttgacttttggggatggttctaggctggatgtgatacagggcaggttttgtctctagagaaagttctcatgaccttcaggtctaatgagattcagatcatcactttggtttggtttgaaatttctttgtttatccagtgaattacaagtagaataaagatctggttctaaattgtcttttggtggtgaagtgccatagaccatttcggaccatttctatgatgtaccagcagcccccacatcacacctcctcttccttggcttgtctcttccccaattcttagagttagcagtgtttcttactgcattcatctcctcagtcataagtgtctgtcaacctccgttgtgaagtcatgagtctcttgagactgaaactccaagaatgtattgtgctcacagtggcgatggtgttcctgtgctggatggtcagtggttgttgacatgtagttagaaaataggtagcaagttccacgcagcctcactctttggaacctagtttctcctatggcctccctttctactgttgttaataacattctattaatgatccatgcctctcttcacaggaggaatattagaatctatggagcagttagtattctttgtcacctaaatttgtctacttctgtacatttccaataaggcaccaccagggcaagggaagattccccacatgtatatccccagctgtttctgtcataaaacttgcatgtgtataaaccactattgactttttgcaccaaaggagatattcaaggacagacatccaagtccccagccctttattgccctt

SEQ ID NO: 27875 - protein, 172 aa, Homo sapiens; identical to SEQ ID NO: 27873

SEQ ID NO: 27876 - DNA, 799 bp, Homo sapiens
agttgtttcagaagaaatgagtttggcttggattgctccaagaacaaagaaatgaacttggcttggattgctccaaatactggtttgaacacagtacagcagtggagcagaaacagaggagatgacaccatggggtgtgatcccctgggcccgtttgttgtcgggggagaagacttagacccttttgggcctcggagaggtggcatgattgtggatcccctgagatctggcttcccaagagcacttattgacccttcctcaggcctcccgaaccgacttcctccaggcgctgtgcccccaggagctcgctttgacccctttggacccattgggaccagcccacccggacctaacccagaccatctccccccgccgggctacgatgacatgtacctgtgaaggcctcaagaatgtaacatcccaggcttccctccattctcctggagctgccaccgctgtccccatcagcaaccatgttcttgcaggctgggggcaagggattctgctcatgtgtttgcagaccggctgggatagcctccccaccccttatcagagccaagacacctgctgcagctctccacctagctgcagatagctcccaaagagaaatcagtgtgtctctttcaccatcagctcctcccctttcaccaccagctcctctccacttcccaagggagactccggcaaccttcagcaacatatatcctcgaccagatgcagtgctataagaacagaacgcattttggatgttattattaagaaccaaatgtcaatacagaattcatgttgccggtttccc

SEQ ID NO: 27877 - protein, 115 aa, Homo sapiens
MNLAWIAPNTGLNTVQQWSRNRGDDTMGCDPLGPFVVGGEDLDPFGPRRGGMIVDPLRSGFPRALIDPSSGLPNRLPPGAVPPGARFDPFGPIGTSPPGPNPDHLPPPGYDDMYL

SEQ ID NO: 27878 - DNA, 2647 bp, Homo sapiens
agttgtttcagaagaaatgagtttggcttggattgctccaagaacaaagaaatgaacttggcttggattgctccaaatactggtttgaacacagtacagcagtggagcagaaacagaggagatgacaccatggggtgtgatcccctgggcccgtttgttgtcgggggagaagacttagacccttttgggcctcggagaggtggcatgattgtggatcccctgagatctggcttcccaagagcacttattgacccttcctcaggcctcccgaaccgacttcctccaggcgctgtgcccccaggagctcgctttgacccctttggacccattgggaccagcccacccggacctaacccagaccatctccccccgccgggctacgatgacatgtacctgtgaaggcctcaagaatgtaacatcccaggcttccctccattctcctggagctgccaccgctgtccccatcagcaaccatgttcttgcaggctgggggcaagggattctgctcatgtgtttgcagaccggctgggatagcctccccaccccttatcagagccaagacacctgctgcagctctccacctagctgcagatagctcccaaagagaaatcagtgtgtctctttcaccatcagctcctcccctttcaccaccagctcctctccacttcccaagggagactccggcaaccttcagcaacatatatcctcgaccagatgcagtgctataagaacagaacgcattttggatgttattattaagaaccaaatgtcaatacagaattcatgttgccggtttcccacttttctttttacattaatgcatagctgcttccatttatgagactttagagtttgagtttctgtagggctgaatgactctttttcctgcccagggcccattcttgcttctcaggcaccttccgtttattaattgccattgctcctgacatcactaagatgggtccccttctggctgcatgaatggaaatgagtgactggaaatcccataggccacaagaatgactttcacaagggcaggaacattgtggaaagactgcatcattctgatgaggcaaaatcctccagctattcctgtctgggccagttttgtaggtccatctgtgcatgggcagcagtagtcaaaaagccaaggaaaaaacagagcagacctgaaggctaatcttatttttgccactaacttagtgaatgaccctaagcaagttccttctcctcttagggccttgtgccaagcctatgaaattggaggtggctttcctgctctaaagcattttgatgtctcattctgtgtttggtaacccctataaactggggcagaggaaaagaatgatggttcaaggccatacttcccttgaaccttgtgtggttcttgcctaactctgtggtttttggaccccatggggcccagacagagcacaggagcatgggctgcctctgagtgtggtgttgaacttcgggaggagcagggagccctgcaccttgtgtcctggcccacctgacctttggtgttctccggatccttttcagcccgaggcctgacagacgcgggcagtgatgagccctgttctggagtggaaagagcacgatagagcaccaggctaagaggcacgagatcaaggcggtagtcacttccgctctgcagctagcatttcaaccatatgtggatcctttcatttctcagctccctggattccttcccctaaattaggacctattatttacctgtaggtaagcaagctactgtagctcttctgaggtatctgccaggctgttttctgtagcctcagattgcctatctgcttagcctgagaacaggtagatgaaaactaaactgatgcctaggcccagggtcagtctcagatggaagctgggcctgggtggggaggctagcatgcgtggctccctgggtatttctgtcagtccccatggcaagcagtgatttagtaaaacaccccagagtcagggaagccaaccaccttgaaacctttagaacatctctgctttggagaaagacccagagatcaggcagaggtgcagattcaatcattactcataacctttgagagatggcaaatgggaggagtgttagtctttgttttggaattggaccattcttgcaaccaaaaggacttagagcagtttgctcataaagacatcctttattataaaaggaagtatttaaaggatgatagagaccatcagatagaagcagggaaggtagataacttttaggaccttgatgtgaggaaaagataaaatttaaacaataaatttgccacttagattttctagcagcaaagtccgaaaagatagttatatacaaaattctgttttctgaaaacaaaattgtgattcaccttcagaattggccattttttttgtgagtttccttgcatcaaggacactgagaaacacagtcattgtcttaggtgttctatgggaggaagtgaatagagcctttaggaacttcctggtcaagcttatggtgcttattttgatctgggccacttccctccttccagtcatgagtaatcatcaaggagcaagttggagtgtttcaggtgtatattttgtagaacccaaaagattggagccttaacaataaacatcagcactaagtgacctgttc

SEQ ID NO: 27879 - protein, 115 aa, Homo sapiens; identical to SEQ ID NO: 27877

SEQ ID NO: 27880 - DNA, 4313 bp, Homo sapiens
agttgtttcagaagaaatgagtttggcttggattgctccaagaacaaagaaatgaacttggcttggattgctccaaatactggtttgaacacagtacagcagtggagcagaaacagaggagatgacaccatggggtgtgatcccctgggcccgtttgttgtcgggggagaagacttagacccttttgggcctcggagaggtggcatgattgtggatcccctgagatctggcttcccaagagcacttattgacccttcctcaggcctcccgaaccgacttcctccaggcgctgtgcccccaggagctcgctttgacccctttggacccattgggaccagcccacccggacctaacccagaccatctccccccgccgggctacgatgacatgtacctgtgaaggcctcaagaatgtaacatcccaggcttccctccattctcctggagctgccaccgctgtccccatcagcaaccatgttcttgcaggctgggggcaagggattctgctcatgtgtttgcagaccggctgggatagcctccccaccccttatcagagccaagacacctgctgcagctctccacctagctgcagatagctcccaaagagaaatcagtgtgtctctttcaccatcagctcctcccctttcaccaccagctcctctccacttcccaagggagactccggcaaccttcagcaacatatatcctcgaccagatgcagtgctataagaacagaacgcattttggatgttattattaagaaccaaatgtcaatacagaattcatgttgccggtttcccacttttctttttacattaatgcatagctgcttccatttatgagactttagagtttgagtttctgtagggctgaatgactctttttcctgcccagggcccattcttgcttctcaggcaccttccgtttattaattgccattgctcctgacatcactaagatgggtccccttctggctgcatgaatggaaatgagtgactggaaatcccataggccacaagaatgactttcacaagggcaggaacattgtggaaagactgcatcattctgatgaggcaaaatcctccagctattcctgtctgggccagttttgtaggtccatctgtgcatgggcagcagtagtcaaaaagccaaggaaaaaacagagcagacctgaaggctaatcttatttttgccactaacttagtgaatgaccctaagcaagttccttctcctcttagggccttgtgccaagcctatgaaattggaggtggctttcctgctctaaagcattttgatgtctcattctgtgtttggtaacccctataaactggggcagaggaaaagaatgatggttcaaggccatacttcccttgaaccttgtgtggttcttgcctaactctgtggtttttggaccccatggggcccagacagagcacaggagcatgggctgcctctgagtgtggtgttgaacttcgggaggagcagggagccctgcaccttgtgtcctggcccacctgacctttggtgttctccggatccttttcagcccgaggcctgacagacgcgggcagtgatgagccctgttctggagtggaaagagcacgatagagcaccaggctaagaggcacgagatcaaggcggtagtcacttccgctctgcagctagcatttcaaccatatgtggatcctttcatttctcagctccctggattccttcccctaaattaggacctattatttacctgtaggtaagcaagctactgtagctcttctgaggtatctgccaggctgttttctgtagcctcagattgcctatctgcttagcctgagaacaggtagatgaaaactaaactgatgcctaggcccagggtcagtctcagatggaagctgggcctgggtggggaggctagcatgcgtggctccctgggtatttctgtcagtccccatggcaagcagtgatttagtaaaacaccccagagtcagggaagccaaccaccttgaaacctttagaacatctctgctttggagaaagacccagagatcaggcagaggtgcagattcaatcattactcataacctttgagagatggcaaatgggaggagtgttagtctttgttttggaattggaccattcttgcaaccaaaaggacttagagcagtttgctcataaagacatcctttattataaaaggaagtatttaaaggatgatagagaccatcagatagaagcagggaaggtagataacttttaggaccttgatgtgaggaaaagataaaatttaaacaataaatttgccacttagattttctagcagcaaagtccgaaaagatagttatatacaaaattctgttttctgaaaacaaaattgtgattcaccttcagaattggccattttttttgtgagtttccttgcatcaaggacactgagaaacacagtcattgtcttaggtgttctatgggaggaagtgaatagagcctttaggaacttcctggtcaagcttatggtgcttattttgatctgggccacttccctccttccagtcatgagtaatcatcaaggagcaagttggagtgtttcaggtgtatattttgtagaacccaaaagattggagccttaacaataaacatcagcactaagtgacctgttcctccttttttaaatagcagctttattgagatataatttacatacccataatttacatacctgtttaaagtatacaattcagtggatttagtatgttcacagtgttgcacatccaccaccatttctaattcctgaacattttcaccacctcaaaaagaaaccacacacccattggcatgactccccattcccttgctcccagccccaggcaaccactaacatctgtctctaaagattttttttttttttctggacagttctcataagtggaatcactcagtattatggccttttgtgtctggcttctttcatttcatgtgatgttttcaagattcattcatgctgtagcatgtatccatggtatggatatatcacattttgcttatccttttatcagttgatggacagttgggttgtttctacaaaaaggctattatgagtaatgcagccaagaacatttgtgtaccagtttttgagttttcagttgtttgagtttcagatgttttcagttcatttgggtatataccaaggagtggaattgctggttcacatggtagctctatattctactttgtgaggaattgtcagactgttttccacggaagctgcaccattttacatttccactggtaatttatgagggttccagtttccccacatcttcaccaactcttgttatttttcatgcttatggccatcctagttagcgtgaagtagcatctcattgtggtcttctcttccattttttaaaaaagaattttgacctacaccaagcaaggcagagaccagagtcagtcccccttggggagcaatctgtggttttgataatcaccaccttgggatgaacatggctggtgagctgcagagcagttgatttgacttttggggatggttctaggctggatgtgatacagggcaggttttgtctctagagaaagttctcatgaccttcaggtctaatgagattcagatcatcactttggtttggtttgaaatttctttgtttatccagtgaattacaagtagaataaagatctggttctaaattgtcttttggtggtgaagtgccatagaccatttcggaccatttctatgatgtaccagcagcccccacatcacacctcctcttccttggcttgtctcttccccaattcttagagttagcagtgtttcttactgcattcatctcctcagtcataagtgtctgtcaacctccgttgtgaagtcatgagtctcttgagactgaaactccaagaatgtattgtgctcacagtggcgatggtgttcctgtgctggatggtcagtggttgttgacatgtagttagaaaataggtagcaagttccacgcagcctcactctttggaacctagtttctcctatggcctccctttctactgttgttaataacattctattaatgatccatgcctctcttcacaggaggaatattagaatctatggagcagttagtattctttgtcacctaaatttgtctacttctgtacatttccaataaggcaccaccagggcaagggaagattccccacatgtatatccccagctgtttctgtcataaaacttgcatgtgtataaaccactattgactttttgcaccaaaggagatattcaaggacagacatccaagtccccagccctttattgccctt

SEQ ID NO: 27881 - protein, 115 aa, Homo sapiens; identical to SEQ ID NO: 27877

SEQ ID NO: 27882 - DNA, 873 bp, Homo sapiens
cagaaacagaattccactcttaaccccctcagtttgcagaatgtctaagtgtagtgactctagactcaatgtgagatgaaaagggaaaaaagaaactgcgtataaatagtactagagatttgggttataggattggtaattcagcgtgaagttcacggatgcctcttcaagaaacagaagcttcactcaatctggctttcaaaatggtgagaaaagaagtggactcacataattgaagaggcttgagttctggaagcttagaagtccatgactggggtcccagcatgcttggattcaggtggccttcagacacttcttccacaaggaaattgggcagcttcctgaaatgaacaacccgtaaagccatgggaattatggatcagctcccagaccttccgcttcatgactgcaagcctttgtgaaagtttctgacctctttatgcttcaggaatcttagcaatgaaacaaggataatggcacttgctgtgacgatcatgcttccaacagttcaaaaagccaagggaagatcagaagcttatcttccagccaactggggtgggttggtgggggttggtggaatttgacagaagcttgtaatcagccacattggaggatgaggggaaggcctgtcatctgttttgaaacgtgttacgacaagatgttacatttctggaaacctgggtgcagaaaaagatgcacttttctgagagtttgtgcggattgagtgaatctgcttcatttcagcccgaagttgctggagggtccttcgtcaggagacagtatatatagacttgccagaagtgcaataattattcagtctctttctcagtattaagccaatgtacaaaataattacacatctgcttctatagt

SEQ ID NO: 27883 - protein, 36 aa, Homo sapiens
MRGRPVICFETCYDKMLHFWKPGCRKRCTFLRVCAD

SEQ ID NO: 27884 - DNA, 387 bp, Homo sapiens
catagagtcccccttgatacggctgttcagcagaccaactttgttgtaaatatttagataaaaatgggctttagagcagccacatctgaagacccacaaggctgaatgttacacaggcaatcagaatctgattgaagataaactcatcctatttggatcagagcattagaagaaagaaagaactgacacttctcaaccttctctagttgaagacttctctttgctataactacttgaagagttcagcagaaaaattttactgaagaatccctgatcctcctttaagtagctgtagagaatattcactaagtgtaatgggacacgtctctctcatgcccacttcttttctcttatccctgcaagaaaatgaagttttgttggagtcag

SEQ ID NO: 27885 - protein, 35 aa, Homo sapiens
KWALEQPHLKTHKAECYTGNQNLIEDKLILFGSEH

SEQ ID NO: 27886 - DNA, 1737 bp, Homo sapiens
tcgggtgatcctggatcgtcaagccatgttgatgttgattggatgtcaggagcagacgatgtccagcactaacagaatgaatctaccaggagcacagactttgggatcaccattgtgtctgttttaagtgtgcgtgtgtgtgtgtgcacgtgcgcatgcgtgcgtgtgtcttccattttgaaacaataagctagtggttttctaacctggcttctcattagaattcatgcagagtttagcttataaaaagtacaccagttttggcccccacccaccaggactgaactgaagtctctagtgattaaaactgacagataaaatacaagatactgaattaaatttggattctacataaacagtgaaaaaaaatacaagtatgttccataatatttagaacgtacacttaaaaattatttttatctaaaatttaaatgtatccgggcatctcagttttttgttctattttatttttgtcttcttctttcctgtctagtaaattaactctaccaagggtccaaattgggaatctctattttcagcaattcccatgctaattatattaaatctaggtctttttttcccaaattttcttctttatttattcttcttttttaaattcatatttcagacttaaaccgaagcactatcacacaatatacatgtttttaaaattgaggagttaaatatttcttatataagtaaccatctcaaaagtgtattcatgattccaggtaagcgtttttattttaataaaatgcttgtttcaaatgtcttattatttacattgtatccatcattgtattcaaaaatatttctacactatatttactgttacatgagatcatggcgatccagtttgggatttttaaatgatattaaacccctagtcaagaaaataagatgaaaagcatgcaaggtggtcttttcctgcaagataataaagttctatcttttctccagtagaagtagtgcagtttcaaaagttttatcacaattatttagaatgaggaaaataataactagagcttctttcaaaattaccctaaaggggaggaaaaataaaaatcaacccagagaagaacaaatgggcaattaaggcaagtgcaaccaggtctcagggaggaatttcttaatccccacagcttgtaatcgggggttaggacccaagagtgtgaaaattgtcagtgcagcaacacaaaatcctggaaagactcagtaggtgcagagactcgagatggtatatgagcagttgctgagaacctagagtctgggaaacacagcacattccaacacaaatcccggagcccaggtaccatgggaacagctgatcctccacaaacatctattgatatgtggagatgagatgggccctgacatgctgtctggatattatgagcaaggtggagggtaaccaaggggaccaggccaacagcatggagctgcataaatcccagctgtgaattcaaaagggatgcctaggcttgaatattccttttgcccccagctaatgtgtgtactgacctctgcttaaagagcttggaaatatttttaagtaatttggttcccataaatagaatgtcctcttcaggtgttacgtgaggaagaactaaaaataattagtgcaaatgatcctcagaccttccaccacctgaaagagctttaaaaaaaaagggaggtggcggggaaaggaataaagtttggtgctttaaaaagaaaataaaaagtgttttgtactgg

SEQ ID NO: 27887 - protein, 33 aa, Homo sapiens
MLMLIGCQEQTMSSTNRMNLPGAQTLGSPLCLF

SEQ ID NO: 27888 - DNA, 1613 bp, Homo sapiens
gaatcaggccaagacacagaaatatactgcatgccaaaatgtaaaggtgacatgagtgatcaaaagagagggaaagtgaaaggtcaagggagaaactctcagcatgtaggtacagaaccatttccatgaggtcagctacattccaaagtggctgcggcactggatgggagctgttgggacatgctgcacagcccaagacagtctttgaagatggctggatgcatgaccttgtcatatacgtaaaacatccacagactaactggaaaaggacttcacctcagccaaagtgagtgcattgcagaataagtgcagagagcttaccttggtttttaaagatattgcaatccgttttaattggggatctcattgcaatgtgctcctatgtcttgagacagggccttcaagaggatcaatatttccaggatgttggtattagcatccattgttcgctggctagatcttttccaacagagcatgtgactctcatcattacagcagaggaatgcatttatcaaagttaaggaagtcgtttgccattcggatggcccaagaagcataaatatttatcattgagccttgtgagaactctctattataaaaagattggctaatttcttaaaactactccttcaataaggacccaggttatgtgccatggtatctgtagctttctggctgggtcagggtgacccgcacacaaccctggcaggacgcccttggacacagtatttgcatccctttggtgtgccaaggtatcaagcattcacagttcacattgaaaccactaaacgaagagctgtgcaaacaggtcatcagtttctccagaggggaataatcttacaactgttacgaagggtcaaaggtaactttcattttgagatgctaattactccaagaatttgatgcaggaggcagctggttaaaatgaatgagtgctgaagcgttgaaggggaaaatcaaatagatggttataataaaagtgcaatatgcaacctaataagtatgcagagaataagggacaatattgttaataaacatctattagtcaagatgatctttgtagagctgggctctttaatattataactgctaatcacatgcaattaaatttaaatttaaggtggttgagattagaaattcaggtcctcagccacagaggccacatacaacatgttcaatagccacatgtggccattggctaccatattggagagcccagatatagaacagtttcattactgcagaaatttctataggacagcaatgacctggagtgttttgctattggaggggttttggacttagtgcttttatataggaaacatgatttttttaaagaagccatcccatggaatgcttctctcattccagtgctgtagtaagggttgccctgaaatttggacctagaaaattcacttatcataaacgaaaaaactgttactactatcaataatatttttgtcctggtgaatatttacattgtaccacacactgtgctagttgctttatacatattgtgtcatttaattcttaccttagagactaagatctatctgtgaattactttgagataaatcaggttaagagaaaaataaaaactgactttagaccac

SEQ ID NO: 27889 - protein, 54 aa, Homo sapiens
MRSATFQSGCGTGWELLGHAAQPKTVFEDGWMHDLVIYVKHPQTNWKRTSPQPK

SEQ ID NO: 27890 - DNA, 5260 bp, Homo sapiens
gcaggtggggctgccgcggaactccaggtccggccgggagcagaggggcgggggcgagagggaagtgggcgggagccgcgatctgagtagccagcgtcgccggcgaccgcggagttctgggctagtgggaccccgcgcgggctggttcgggatgagcgatggcatcggtcaaggtggccgtgagggtccggcccatgaatcgcagggaaaaggacttggaggccaagttcattattcagatggagaaaagcaaaacgacaatcacaaacttaaagataccagaaggaggcactggggactcaggaagagaacggaccaagaccttcacctatgacttttctttttattctgctgatacaaaaagcccagattacgtttcacaagaaatggttttcaaaaccctcggcacagatgtcgtgaagtctgcatttgaaggttataatgcttgtgtctttgcatatgggcaaactggatctggaaagtcatacactatgatgggaaattctggagattctggcttaatacctcggatctgtgaaggactcttcagtcggataaatgaaaccaccagatgggatgaagcttcttttcgaactgaagtcagctacttagaaatttataacgaacgtgtgagagatctacttcggcggaagtcatctaaaaccttcaatttgagagtccgtgagcatcccaaagaaggcccttatgttgaggatttatccaaacatttagtacagaattatggtgacgtagaagaacttatggatgcgggcaatatcaaccggaccaccgcagcgactgggatgaacgacgtcagtagcaggtctcatgccatcttcaccatcaagttcactcaggctaaatttgattctgaaatgccatgtgaaaccgtcagtaagatccacttggttgatcttgccggaagtgagcgtgcagatgccaccggagccaccggggttaggctaaaggaagggggaaatattaacaagtccctcgtgactctggggaacgtcatttctgccttagctgatttatctcaggatgctgcaaatactcttgcaaagaagaagcaagttttcgtgccttacagggattctgtgttgacttggttgttaaaagatagccttggaggaaactctaaaactatcatgattgccaccatttcacctgctgatgtcaattatggagaaaccctaagtactcttcgctatgcaaatagagccaaaaacatcatcaacaagcctaccattaatgaggatgccaacgtcaaacttatccgtgagctgcgagctgaaatagccagactgaaaacgctgcttgctcaagggaatcagattgccctcttagactcccccacagctttaagtatggaggaaaaacttcagcagaatgaagcaagagttcaagaattgaccaaggaatggacaaataagtggaatgaaacccaaaatattttgaaagaacaaactctagccctcaggaaagaagggattggagttgttttggattctgaactgcctcatttgattggcatcgatgatgaccttttgagtactggaatcatcttatatcatttaaaggaaggtcagacatacgttggtagagacgatgcttccacggagcaagatattgttcttcatggccttgacttggagagtgagcattgcatctttgaaaatatcggggggacagtgactctgatacccctgagtgggtcccagtgctctgtgaatggtgttcagatcgtggaggccacacatctaaatcaaggtgctgtgattctcttgggaagaaccaatatgtttcgctttaaccatccaaaggaagccgccaagctcagggagaagaggaagagtggccttctgtcctccttcagcttgtccatgaccgacctctcgaagtcccgtgagaacctgtctgcagtcatgttgtataaccccggacttgaatttgagaggcaacagcgtgaagaacttgaaaaattagaaagtaaaaggaaactcatagaagaaatggaggaaaagcagaaatcagacaaggctgaactggagcggatgcagcaggaggtggagacccagcgcaaggagacagaaatcgtgcagctccagattcgcaagcaggaggagagcctcaaacgccgcagcttccacatcgagaacaagctaaaggatttacttgcggagaaggaaaaatttgaagaggagaggctgagggaacagcaggaaatcgagctgcagaagaagagacaagaagaagagacctttctccgcgtccaagaagaactccaacgactcaaagaactcaacaacaacgagaaggctgagaagtttcagatatttcaagaactggaccagctccaaaaggaaaaagatgaacagtatgccaagcttgaactggaaaaaaagagactagaggagcaggagaaggagcaggtcatgctcgtggcccatctggaagagcagctccgagagaagcaggagatgatccagctcctgcggcgtggggaggtacagtgggtggaagaggagaagagggacctggaaggcattcgggaatccctcctgcgggtgaaggaggctcgtgccggaggggatgaagatggcgaggagttagaaaaggctcaactgcgtttcttcgaattcaagagaaggcagcttgtcaagctagtgaacttggagaaggacctggttcagcagaaagacatcctgaaaaaagaagtccaagaagaacaggagatcctagagtgtttaaaatgtgaacatgacaaagaatctagattgttggaaaaacatgatgagagtgtcacagatgtcacggaagtgcctcaagatttcgagaaaataaagccagtggagtacaggctgcaatataaagaacgccagctacagtacctcctgcagaatcacttgccaactctgttggaagaaaagcagagagcatttgaaattcttgacagaggccctctcagcttagacaacactctttatcaagtagaaaaggaaatggaagaaaaagaagaacagcttgcacagtaccaggccaatgcaaaccagctgcaaaagctccaagccacctttgaattcactgccaacattgcacgtcaggaggaaaaagtgaggaaaaaggaaaaggagattttggagtccagagagaagcagcagagagaggcgctggagcgggccctggccaggctggagaggagacattctgcgctgcagaggcactccaccctgggcatggagattgaagagcagaggcagaaacttgccagtctgaacagtggcagcagagagcagtcagggctccaggctagcctggaggctgagcaggaagccctggagaaggaccaggagaggttagaatatgaaatccagcagctgaaacagaagatttatgaggtcgatggtgttcaaaaagatcatcatgggaccctggaagggaaggtggcttcttccagcttgccagtcagtgctgaaaaatcacacctggttcccctcatggatgccaggatcaatgcttacattgaagaagaagtccaaagacgccttcaggatttgcatcgtgtgattagtgaaggctgcagtacatctgcagacacgatgaaggataatgagaaacttcacaatggcaccattcaacgtaaactaaaatatgagcggatggtttctcgctctttgggcgcaaatccagatgacctgaaggacccaattaaaattagtatcccacgctacgtcctctgcgggcaaggaaaggatgcacacttcgagtttgaggtcaagattactgtcctagatgagacatggactgtattcaggcgttacagtcgttttcgagaaatgcataaaacattgaagttaaagtatgcagagcttgctgcccttgaatttcctccaaagaaactatttggaaataaggatgaacgtgtgattgctgagagacgaagtcacttagagaaatacctcagggactttttcagcgtgatgctccagtccgcaacatctcccctccacatcaacaaagtgggactgactctctcgaaacataccatttgtgagttttcaccattcttcaagaaaggagtctttgactacagcagccacgggacggggtagagccaggggtgatggaggaaccaccacagcagtgccttctcgtcgaagcgggctccgatgcagggcagctcccccatgcgaggatccgggtctgcctcctcctgctgaagacagacatgcagcagcgggcccgggccacctcacgtttccatacctagtgcctgagtttggggatgggatgctctgcctgctgatgtggccctgacaggcagccgttaccgttccattgcggttgaacgtggccttttcccacagtgcttccttctcactgcgcagcaaagttcgtcccctgtggcaagatagatgtggttgggccatcgtgggttccctgagcccagccagcctgggacctcccaaagtgggtggcttaccagaccacccttaaatgactttcatctggtttcctctttcaccaaaatatactcgtattttttatatttcttccatgtggctggctatattccaagaaaagcattttaaattatttcattgtatttttttctttttttccctcatttgaatcagaacttttatataaaacccaaacactgatgtttacacagaatttcatattctgcaaaagggattttttgatccaatcatgactgtagtcttccatgcttgacaaattggatgtagacaacattacttaaaacttctataaatccctacaattaggatatttatttaaccttgaatattcaagaacattctcccaaatctaaatggctactgtgcattcttgagctttttctgctaagcacaaaatgaacgcaaagctaaatgcatatttttaagtattattcacattttttgttacagaatctattggatctttggctggaaaactagaatttatagcagtttattaatgataccttaaattactcaggacttaatgtagcattgcacttctgtgtacagtaaaactgctttgttttactaaagagaaaaatgtgagtggaaaaaatatgtatgtggtatatactcaaatgtatataattctatctatagatttatatatgtatacattctgtacagtagttccatcaaaatatgtaataattcacaccaattttattaaatgtatttgctttttcaaaatttaaattgagctgctatcaatattaaatgaagttatggcatct

SEQ ID NO: 27891 - protein, 1317 aa, Homo sapiens; identical to SEQ ID NO: 3825

SEQ ID NO: 27892 - DNA, 5108 bp, Homo sapiens
ggcaggtggggctgccgcggaactccaggtccggccgggagcagaggggcgggggcgagagggaagtgggcgggagccgcgatctgagtagccagcgtcgccggcgaccgcggagttctgggctagtgggaccccgcgcgggctggttcgggatgagcgatggcatcggtcaaggtggccgtgagggtccggcccatgaatcgcagggaaaaggacttggaggccaagttcattattcagatggagaaaagcaaaacgacaatcacaaacttaaagataccagaaggaggcactggggactcaggaagagaacggaccaagaccttcacctatgacttttctttttattctgctgatacaaaaagcccagattacgtttcacaagaaatggttttcaaaaccctcggcacagatgtcgtgaagtctgcatttgaaggttataatgcttgtgtctttgcatatgggcaaactggatctggaaagtcatacactatgatgggaaattctggagattctggcttaatacctcggatctgtgaaggactcttcagtcggataaatgaaaccaccagatgggatgaagcttcttttcgaactgaagtcagctacttagaaatttataacgaacgtgtgagagatctacttcggcggaagtcatctaaaaccttcaatttgagagtccgtgagcatcccaaagaaggcccttatgttgaggatttatccaaacatttagtacagaattatggtgacgtagaagaacttatggatgcgggcaatatcaaccggaccaccgcagcgactgggatgaacgacgtcagtagcaggtctcatgccatcttcaccatcaagttcactcaggctaaatttgattctgaaatgccatgtgaaaccgtcagtaagatccacttggttgatcttgccggaagtgagcgtgcagatgccaccggagccaccggggttaggctaaaggaagggggaaatattaacaagtccctcgtgactctggggaacgtcatttctgccttagctgatttatctcaggatgctgcaaatactcttgcaaagaagaagcaagttttcgtgccttacagggattctgtgttgacttggttgttaaaagatagccttggaggaaactctaaaactatcatgattgccaccatttcacctgctgatgtcaattatggagaaaccctaagtactcttcgctatgcaaatagagccaaaaacatcatcaacaagcctaccattaatgaggatgccaacgtcaaacttatccgtgagctgcgagctgaaatagccagactgaaaacgctgcttgctcaagggaatcagattgccctcttagactcccccacagctttaagtatggaggaaaaacttcagcagaatgaagcaagagttcaagaattgaccaaggaatggacaaataagtggaatgaaacccaaaatattttgaaagaacaaactctagccctcaggaaagaagggattggagttgttttggattctgaactgcctcatttgattggcatcgatgatgaccttttgagtactggaatcatcttatatcatttaaaggaaggtcagacatacgttggtagagacgatgcttccacggagcaagatattgttcttcatggccttgacttggagagtgagcattgcatctttgaaaatatcggggggacagtgactctgatacccctgagtgggtcccagtgctctgtgaatggtgttcagatcgtggaggccacacatctaaatcaaggtgctgtgattctcttgggaagaaccaatatgtttcgctttaaccatccaaaggaagccgccaagctcagggagaagaggaagagtggccttctgtcctccttcagcttgtccatgaccgacctctcgaagtcccgtgagaacctgtctgcagtcatgttgtataaccccggacttgaatttgagaggcaacagcgtgaagaacttgaaaaattagaaagtaaaaggaaactcatagaagaaatggaggaaaagcagaaatcagacaaggctgaactggagcggatgcagcaggaggtggagacccagcgcaaggagacagaaatcgtgcagctccagattcgcaagcaggaggagagcctcaaacgccgcagcttccacatcgagaacaagctaaaggatttacttgcggagaaggaaaaatttgaagaggagaggctgagggaacagcaggaaatcgagctgcagaagaagagacaagaagaagagacctttctccgcgtccaagaagaactccaacgactcaaagaactcaacaacaacgagaaggctgagaagtttcagatatttcaagaactggaccagctccaaaaggaaaaagatgaacagtatgccaagcttgaactggaaaaaaagagactagaggagcaggagaaggagcaggtcatgctcgtggcccatctggaagagcagctccgagagaagcaggagatgatccagctcctgcggcgtggggaggtacagtgggtggaagaggagaagagggacctggaaggcattcgggaatccctcctgcgggtgaaggaggctcgtgccggaggggatgaagatggcgaggagttagaaaaggctcaactgcgtttcttcgaattcaagagaaggcagcttgtcaagctagtgaacttggagaaggacctggttcagcagaaagacatcctgaaaaaagaagtccaagaagaacaggagatcctagagtgtttaaaatgtgaacatgacaaagaatctagattgttggaaaaacatgatgagagtgtcacagatgtcacggaagtgcctcaagatttcgagaaaataaagccagtggagtacaggctgcaatataaagaacgccagctacagtacctcctgcagaatcacttgccaactctgttggaagaaaagcagagagcatttgaaattcttgacagaggccctctcagcttagacaacactctttatcaagtagaaaaggaaatggaagaaaaagaagaacagcttgcacagtaccaggccaatgcaaaccagctgcaaaagctccaagccacctttgaattcactgccaacattgcacgtcaggaggaaaaagtgaggaaaaaggaaaaggagattttggagtccagagagaagcagcagagagaggcgctggagcgggccctggccaggctggagaggagacattctgcgctgcagaggcactccaccctgggcatggagattgaagagcagaggcagaaacttgccagtctgaacagtggcagcagagagcagtcagggctccaggctagcctggaggctgagcaggaagccctggagaaggaccaggagaggatcaatgcttacattgaagaagaagtccaaagacgccttcaggatttgcatcgtgtgattagtgaaggctgcagtacatctgcagacacgatgaaggataatgagaaacttcacaatggcaccattcaacgtaaactaaaatatgagcggatggtttctcgctctttgggcgcaaatccagatgacctgaaggacccaattaaaattagtatcccacgctacgtcctctgcgggcaaggaaaggatgcacacttcgagtttgaggtcaagattactgtcctagatgagacatggactgtattcaggcgttacagtcgttttcgagaaatgcataaaacattgaagttaaagtatgcagagcttgctgcccttgaatttcctccaaagaaactatttggaaataaggatgaacgtgtgattgctgagagacgaagtcacttagagaaatacctcagggactttttcagcgtgatgctccagtccgcaacatctcccctccacatcaacaaagtgggactgactctctcgaaacataccatttgtgagttttcaccattcttcaagaaaggagtctttgactacagcagccacgggacggggtagagccaggggtgatggaggaaccaccacagcagtgccttctcgtcgaagcgggctccgatgcagggcagctcccccatgcgaggatccgggtctgcctcctcctgctgaagacagacatgcagcagcgggcccgggccacctcacgtttccatacctagtgcctgagtttggggatgggatgctctgcctgctgatgtggccctgacaggcagccgttaccgttccattgcggttgaacgtggccttttcccacagtgcttccttctcactgcgcagcaaagttcgtcccctgtggcaagatagatgtggttgggccatcgtgggttccctgagcccagccagcctgggacctcccaaagtgggtggcttaccagaccacccttaaatgactttcatctggtttcctctttcaccaaaatatactcgtattttttatatttcttccatgtggctggctatattccaagaaaagcattttaaattatttcattgtatttttttctttttttccctcatttgaatcagaacttttatataaaacccaaacactgatgtttacacagaatttcatattctgcaaaagggattttttgatccaatcatgactgtagtcttccatgcttgacaaattggatgtagacaacattacttaaaacttctataaatccctacaattaggatatttatttaaccttgaatattcaagaacattctcccaaatctaaatggctactgtgcattcttgagctttttctgctaagcacaaaatgaacgcaaagctaaatgcatatttttaagtattattcacattttttgttacagaatctattggatctttggctggaaaactagaatttatagcagtttattaatgataccttaaattactcaggacttaatgtagcattgcacttctgtgtacagtaaaactgctttgttttactaaagagaaaaatgtgagtggaaaaaatatgtatgtggtatatactcaaatgtatataattctatctatagatttatatatgtatacattctgtacagtagttccatcaaaatatgtaataattcacaccaattttattaaatgtatttgctttttcaaaatttaaattgagctgctatcaatattaaatgaagttatggcatct

SEQ ID NO: 27893 - protein, 1266 aa, Homo sapiens
MASVKVAVRVRPMNRREKDLEAKFIIQMEKSKTTITNLKIPEGGTGDSGRERTKTFTYDFSFYSADTKSPDYVSQEMVFKTLGTDVVKSAFEGYNACVFAYGQTGSGKSYTMMGNSGDSGLIPRICEGLFSRINETTRWDEASFRTEVSYLEIYNERVRDLLRRKSSKTFNLRVREHPKEGPYVEDLSKHLVQNYGDVEELMDAGNINRTTAATGMNDVSSRSHAIFTIKFTQAKFDSEMPCETVSKIHLVDLAGSERADATGATGVRLKEGGNINKSLVTLGNVISALADLSQDAANTLAKKKQVFVPYRDSVLTWLLKDSLGGNSKTIMIATISPADVNYGETLSTLRYANRAKNIINKPTINEDANVKLIRELRAEIARLKTLLAQGNQIALLDSPTALSMEEKLQQNEARVQELTKEWTNKWNETQNILKEQTLALRKEGIGVVLDSELPHLIGIDDDLLSTGIILYHLKEGQTYVGRDDASTEQDIVLHGLDLESEHCIFENIGGTVTLIPLSGSQCSVNGVQIVEATHLNQGAVILLGRTNMFRFNHPKEAAKLREKRKSGLLSSFSLSMTDLSKSRENLSAVMLYNPGLEFERQQREELEKLESKRKLIEEMEEKQKSDKAELERMQQEVETQRKETEIVQLQIRKQEESLKRRSFHIENKLKDLLAEKEKFEEERLREQQEIELQKKRQEEETFLRVQEELQRLKELNNNEKAEKFQIFQELDQLQKEKDEQYAKLELEKKRLEEQEKEQVMLVAHLEEQLREKQEMIQLLRRGEVQWVEEEKRDLEGIRESLLRVKEARAGGDEDGEELEKAQLRFFEFKRRQLVKLVNLEKDLVQQKDILKKEVQEEQEILECLKCEHDKESRLLEKHDESVTDVTEVPQDFEKIKPVEYRLQYKERQLQYLLQNHLPTLLEEKQRAFEILDRGPLSLDNTLYQVEKEMEEKEEQLAQYQANANQLQKLQATFEFTANIARQEEKVRKKEKEILESREKQQREALERALARLERRHSALQRHSTLGMEIEEQRQKLASLNSGSREQSGLQASLEAEQEALEKDQERINAYIEEEVQRRLQDLHRVISEGCSTSADTMKDNEKLHNGTIQRKLKYERMVSRSLGANPDDLKDPIKISIPRYVLCGQGKDAHFEFEVKITVLDETWTVFRRYSRFREMHKTLKLKYAELAALEFPPKKLFGNKDERVIAERRSHLEKYLRDFFSVMLQSATSPLHINKVGLTLSKHTICEFSPFFKKGVFDYSSHGTG

SEQ ID NO: 27894 - DNA, 4640 bp, Homo sapiens
gcaggtggggctgccgcggaactccaggtccggccgggagcagaggggcgggggcgagagggaagtgggcgggagccgcgatctgagtagccagcgtcgccggcgaccgcggagttctgggctagtgggaccccgcgcgggctggttcgggatgagcgatggcatcggtcaaggtggccgtgagggtccggcccatgaatcgcagggaaaaggacttggaggccaagttcattattcagatggagaaaagcaaaacgacaatcacaaacttaaagataccagaaggaggcactggggactcaggaagagaacggaccaagaccttcacctatgacttttctttttattctgctgatacaaaaagcccagattacgtttcacaagaaatggttttcaaaaccctcggcacagatgtcgtgaagtctgcatttgaaggttataatgcttgtgtctttgcatatgggcaaactggatctggaaagtcatacactatgatgggaaattctggagattctggcttaatacctcggatctgtgaaggactcttcagtcggataaatgaaaccaccagatgggatgaagcttcttttcgaactgaagtcagctacttagaaatttataacgaacgtgtgagagatctacttcggcggaagtcatctaaaaccttcaatttgagagtccgtgagcatcccaaagaaggcccttatgttgaggatttatccaaacatttagtacagaattatggtgacgtagaagaacttatggatgcgggcaatatcaaccggaccaccgcagcgactgggatgaacgacgtcagtagcaggtctcatgccatcttcaccatcaagttcactcaggctaaatttgattctgaaatgccatgtgaaaccgtcagtaagatccacttggttgatcttgccggaagtgagcgtgcagatgccaccggagccaccggggttaggctaaaggaagggggaaatattaacaagtccctcgtgactctggggaacgtcatttctgccttagctgatttatctcaggatgctgcaaatactcttgcaaagaagaagcaagttttcgtgccttacagggattctgtgttgacttggttgttaaaagatagccttggaggaaactctaaaactatcatgattgccaccatttcacctgctgatgtcaattatggagaaaccctaagtactcttcgctatgcaaatagagccaaaaacatcatcaacaagcctaccattaatgaggatgccaacgtcaaacttatccgtgagctgcgagctgaaatagccagactgaaaacgctgcttgctcaagggaatcagattgccctcttagactcccccacagctttaagtatggaggaaaaacttcagcagaatgaagcaagagttcaagaattgaccaaggaatggacaaataagtggaatgaaacccaaaatattttgaaagaacaaactctagccctcaggaaagaagggattggagttgttttggattctgaactgcctcatttgattggcatcgatgatgaccttttgagtactggaatcatcttatatcatttaaaggaaggtcagacatacgttggtagagacgatgcttccacggagcaagatattgttcttcatggccttgacttggagagtgagcattgcatctttgaaaatatcggggggacagtgactctgatacccctgagtgggtcccagtgctctgtgaatggtgttcagatcgtggaggccacacatctaaatcaaggtgctgtgattctcttgggaagaaccaatatgtttcgctttaaccatccaaaggaagccgccaagctcagggagaagaggaagagtggccttctgtcctccttcagcttgtccatgaccgacctctcgaagtcccgtgagaacctgtctgcagtcatgttgtataaccccggacttgaatttgagaggcaacagcgtgaagaacttgaaaaattagaaagtaaaaggaaactcatagaagaaatggaggaaaagcagaaatcagacaaggctgaactggagcggatgcagcaggaggtggagacccagcgcaaggagacagaaatcgtgcagctccagattcgcaagcaggaggagagcctcaaacgccgcagcttccacatcgagaacaagctaaaggatttacttgcggagaaggaaaaatttgaagaggagaggctgagggaacagcaggaaatcgagctgcagaagaagagacaagaagaagagacctttctccgcgtccaagaagaactccaacgactcaaagaactcaacaacaacgagaaggctgagaagtttcagatatttcaagaactggaccagctccaaaaggaaaaagatgaacagtatgccaagcttgaactggaaaaaaagagactagaggagcaggagaaggagcaggtcatgctcgtggcccatctggaagagcagctccgagagaagcaggagatgatccagctcctgcggcgtggggaggtacagtgggtggaagaggagaagagggacctggaaggcattcgggaatccctcctgcgggtgaaggaggctcgtgccggaggggatgaagatggcgaggagttagaaaaggctcaactgcgtttcttcgaattcaagagaaggcagcttgtcaagctagtgaacttggagaaggacctggttcagcagaaagacatcctgaaaaaagaagtccaagaagaacaggagatcctagagtgtttaaaatgtgaacatgacaaagaatctagattgttggaaaaacatgatgagagtgtcacagatgtcacggaagtgcctcaagatttcgagaaaataaagccagtggagtacaggctgcaatataaagaacgccagctacagtacctcctgcagaatcacttgccaactctgttggaagaaaagcagagagcatttgaaattcttgacagaggccctctcagcttagacaacactctttatcaagtagaaaaggaaatggaagaaaaagaagaacagcttgcacagtaccaggccaatgcaaaccagctgcaaaagctccaagccacctttgaattcactgccaacattgcacgtcaggaggaaaaagtgaggaaaaaggaaaaggagattttggagtccagagagaagcagcagagagaggcgctggagcgggccctggccaggctggagaggagacattctgcgctgcagaggcactccaccctgggcatggagattgaagagcagaggcagaaacttgccagtctgaacagtggcagcagagagcagtcagggctccaggctagcctggaggctgagcaggaagccctggagaaggaccaggagaggttagaatatgaaatccagcagctgaaacagaagatttatgaggtcgatggtgttcaaaaagatcatcatgggaccctggaagggaaggtggcttcttccagcttgccagtcagtgctgaaaaatcacacctggttcccctcatggatgccaggatcaatgcttacattgaagaagaagtccaaagacgccttcaggatttgcatcgtgtgattagtgaaggctgcagtacatctgcagacacgatgaaggataatgagaaacttcacaatggcaccattcaacgtaaactaaaatatgagctgtgtcgtgacctcctgtgtgtcctgatgccagagcctgatgccgctgcctgcgctaatcatcccttgctccagcaagatctggttcagctttctcttgattggaaaacagaaatccctgatttagttttgccaaatggagttcaggtgtcatccaaattccagactaccttggttgacatgatttactttcttcatggaaatatggaagtcaatgtcccttccctggcagaagttcagttactgctctacacaacagtgaaagtcatgggtgactctggccatgaccagtgccagtcgctagtccttctgaacacccacattgcactggtgaaggaagactgtgttttttatccacgcattcgatctcgaaacatacctcctccgggtgcacaatttgatgtgatcaaatgccatgctttaagtgaattcaggtgtgttgttgttccagaaaagaaaaatgtgtcaacagtagaactagtcttcttacagaaactcaaaccttcagtgggttccagaaatagtccacctgagcaccttcaggaagccccaaatgtccagttgttcaccaccccattgtatcttcaaggcagtcagaatgtcgcacctgaggtctggaaacttactttcaattctcaagatgaggctctttggctaatctcacatttgacaagactctaaggaggagacttttaaagatgcactacatgttttttgagatcattaataaaataagcattgtgaaaacagtcaaggcaatatgaatatctccgtgtagctaattgaattggaactggaaaaatgcagacctctaaaattgaaaatgtaaatattttaaatatctacaataaaataaaaacagctaatagcagagccccaataaaatatctttatcatcaccttgcttcattttcttgaaactcaggcttgtaaatttgtgcctgcttcattatttgtgaggtgattaaagcatttctgattgtt

SEQ ID NO: 27895 - protein, 1392 aa, Homo sapiens
MASVKVAVRVRPMNRREKDLEAKFIIQMEKSKTTITNLKIPEGGTGDSGRERTKTFTYDFSFYSADTKSPDYVSQEMVFKTLGTDVVKSAFEGYNACVFAYGQTGSGKSYTMMGNSGDSGLIPRICEGLFSRINETTRWDEASFRTEVSYLEIYNERVRDLLRRKSSKTFNLRVREHPKEGPYVEDLSKHLVQNYGDVEELMDAGNINRTTAATGMNDVSSRSHAIFTIKFTQAKFDSEMPCETVSKIHLVDLAGSERADATGATGVRLKEGGNINKSLVTLGNVISALADLSQDAANTLAKKKQVFVPYRDSVLTWLLKDSLGGNSKTIMIATISPADVNYGETLSTLRYANRAKNIINKPTINEDANVKLIRELRAEIARLKTLLAQGNQIALLDSPTALSMEEKLQQNEARVQELTKEWTNKWNETQNILKEQTLALRKEGIGVVLDSELPHLIGIDDDLLSTGIILYHLKEGQTYVGRDDASTEQDIVLHGLDLESEHCIFENIGGTVTLIPLSGSQCSVNGVQIVEATHLNQGAVILLGRTNMFRFNHPKEAAKLREKRKSGLLSSFSLSMTDLSKSRENLSAVMLYNPGLEFERQQREELEKLESKRKLIEEMEEKQKSDKAELERMQQEVETQRKETEIVQLQIRKQEESLKRRSFHIENKLKDLLAEKEKFEEERLREQQEIELQKKRQEEETFLRVQEELQRLKELNNNEKAEKFQIFQELDQLQKEKDEQYAKLELEKKRLEEQEKEQVMLVAHLEEQLREKQEMIQLLRRGEVQWVEEEKRDLEGIRESLLRVKEARAGGDEDGEELEKAQLRFFEFKRRQLVKLVNLEKDLVQQKDILKKEVQEEQEILECLKCEHDKESRLLEKHDESVTDVTEVPQDFEKIKPVEYRLQYKERQLQYLLQNHLPTLLEEKQRAFEILDRGPLSLDNTLYQVEKEMEEKEEQLAQYQANANQLQKLQATFEFTANIARQEEKVRKKEKEILESREKQQREALERALARLERRHSALQRHSTLGMEIEEQRQKLASLNSGSREQSGLQASLEAEQEALEKDQERLEYEIQQLKQKIYEVDGVQKDHHGTLEGKVASSSLPVSAEKSHLVPLMDARINAYIEEEVQRRLQDLHRVISEGCSTSADTMKDNEKLHNGTIQRKLKYELCRDLLCVLMPEPDAAACANHPLLQQDLVQLSLDWKTEIPDLVLPNGVQVSSKFQTTLVDMIYFLHGNMEVNVPSLAEVQLLLYTTVKVMGDSGHDQCQSLVLLNTHIALVKEDCVFYPRIRSRNIPPPGAQFDVIKCHALSEFRCVVVPEKKNVSTVELVFLQKLKPSVGSRNSPPEHLQEAPNVQLFTTPLYLQGSQNVAPEVWKLTFNSQDEALWLISHLTRL

SEQ ID NO: 27896 - DNA, 682 bp, Homo sapiens
caagcctaccattaatgaggatgccaacgtcaaacttatccgtgagctgcgagctgaaatagccagactgaaaacgctgcttgctcaagggaatcagagtggtcccgttggagcagtgctttccacgtgggattatgtggcacttgaagctcttggcatcccataaatgttttgaaaatactgatgggatgaaaacctcactgaatttcctgtgtcctgaaatgtacctggcagttctttcccacaagatggtggacagcagttgaataggaattgttcattgtgcttaaaaatatctccacatgcattttgctctatggtggaagttgtcagaatgaagagtccagctccacgtgatgaggcccttataacatgaaccacaatagtcatttttatttatacaccttgttattggaatctttttcttttcttttctttttgagatagagtctcactgtgttgcccaggctggagtgcagtgatgcaatctgggctcactgcaacctccacctccagggttcaagtaattctcatgcctcagcctcctgagtagctgggaggtgcctgccaccatgcctggctaatttttttgtatttttggtagagacggggtttcacgacgtgaccagtctggtctggaactcctgacctcaagtgatctgcccgccttggcctcccaaag

SEQ ID NO: 27897 - protein, 43 aa, Homo sapiens
MWHLKLLASHKCFENTDGMKTSLNFLCPEMYLAVLSHKMVDSS

SEQ ID NO: 27898 - DNA, 598 bp, Homo sapiens
ctggggccacttgagggggtcttgtagaagaggaaaacttgtggcgcaatgggatgtccagggacacagatagccaggtgctgggcctcaggatggaatccagccacccctgctgggtgacacacagtgaccttcctcaggagagtggaagctctgcagggtgagaatgaaacatgggtggtcagtggggataataggacctacctagctgggctgttatgaaggctaaacgaggaaacacttgtaaagttctcagaactgtgcctcgaacaagtgggagatgtcagtcaccatcacccccattcaccaggacagaggggctacagaaaaagctgaactgtgctgagccatctgctgcctcttcccagtgacagcatctgaatctgaaagaaaaaaagaatgtcacatccatttgtcatggctcttgggaccctgactttatgcaggggtgctgggagctaagtaaaacacctcaagccagtaagtccccccgcaacacaccttagaaatataaaattgacttgctacagacttgtttctagacctgaactcacctgcagttcttggaaaagaaaattaaatgggtatgttattattt

SEQ ID NO: 27899 - protein, 50 aa, Homo sapiens
MKAKRGNTCKVLRTVPRTSGRCQSPSPPFTRTEGLQKKLNCAEPSAASSQ

SEQ ID NO: 27900 - DNA, 2442 bp, Homo sapiens
agacactggccgcgggccaccatctggacgcgatcccccgctagggcctccctggtctgggccaaagttggtggccaccttcgcgcgggctgcgccctccttctcttccctgccctcctcccccggggcccgcgcccgctgcctccagcacgcgcgtcggcaggctcggcaagcgaagaggagcggctcgccccagggcgcccctcgcccagcctgccggccaggcgagcgcgacgagagtctccccgcaccccttcctctcccgggggccgagagggttgggctccgccccggcgccgcagctcccgactccccgccgctcgggctgccgccgctgccccgcgcccggcgctcggggcagccgggggcgcaggcggagagcgcagggcggggagaggcgtggggagcagagcggcgctgaggggagggcagaggaggagagagcctggcagcggaggagcagaggcgggcgccgcaccgccccgcacgctcgctcgctcgggagagtcgcgggcggccgcttgggcgcacttgccgggtcaccttgtcccggaggagaaatggcttccctgaggcaagtgtaacctacattcccagcccaccagcctgacgcccagccagggagagagtaccatggatggcatcattgaacagaagagcatgctggtgcacagtaaaatcagtgatgctggcaagaggaatggtttaattaacaccagaaacttgatggccgagagcagagatggtctggtgtctgtttacccagcgccccagtaccagagccaccgggtgggggccagcacagtgccggccagcctggacagcagcaggagtgagccgatgcagcagctgctggaccccaacaccctgcagcagtcagtggagtcccgctaccggcccaacatcatcctctattcagagggcgtgctgcgctcctggggggacggtgtggccgccgactgctgcgagaccaccttcatcgaggaccggtcgcccaccaaagacagcctcgagtacccggatgggaagttcattgacctctcagctgatgacataaaaatccacaccctgtcctacgatgtggaggaggaggaggagttccaggagctggagagcgactactcaagcgacacagagagtgaggacaatttcctcatgatgcccccgcgggaccacctgggcctcagtgtcttctccatgctctgctgcttctggcctctgggcatcgcagccttctacttgtcccatgagaccaacaaagccgtggccaagggggacttgcaccaggccagcaccagctcccggcgggccctattcctggcagtgctgtccatcaccattgggactggcgtctatgtgggcgtggccgtggccctcatcgcctacctctccaagaacaaccacctgtgagcttcctgcgaatggagggggagcacccggggccaggtctgtgtggacgtggaggaagcaggcataccgcatgatgctgtacagtacaaatgattgccaaatgatgccacgaagccctgggatttcctacccatggatttattttgtttttatcctttaatttcatgttcacagcactgtgtagagcaccagacagacgggcactgctaatccttccaaaggaaagctccaaagatcccagcccgcaaggctgtctctggatggattctggtggatgaatggcaacgcggctctctgcagcctgccagtgcccagagtgccaccgcattagcaatatacaaacagtccaaaaaagtgtttattttttatggaatacggtgcaataggcagaggacaagggacacatcactcttctgtctgtggccctgctggagtcctttgtgccccccggagtccacacgccttccctgcaagacgagaatggggctgggaagaaagaggcaacaccacggctggcaggagccccgctgcactgctctgcagacccattggcctgaccctgagaagcagagccagcaaagcccgggacctgcccctctttctttcccttcacaccaccccagcctcaggatgtcaagccacctccggaacgtgtctacactccacagctaccccgcagcaatacgcactcttgggacctcgctgatctaggatggggaggcaggccaccgcccctcccaagactcctcaagaaagagccccgcggttgctccggaaactcgaggcactgcagctatgggcactgcctcagcctaaagacacaggggcgcctcccaatcaccgcgctggcggatgctcaccccgtcataagcagaaactagtgatcctggaaatgagatgggccttactctgtcgactaaatgaatagctattttcttgtcattttttaaagtgcaactcttgcttcatgctgcttaagttaccagatgaatgctgagaaataagtaatcacagacattttaataccatttc

SEQ ID NO: 27901 - protein, 258 aa, Homo sapiens; identical to SEQ ID NO: 3827

SEQ ID NO: 27902 - DNA, 2520 bp, Homo sapiens
agacactggccgcgggccaccatctggacgcgatcccccgctagggcctccctggtctgggccaaagttggtggccaccttcgcgcgggctgcgccctccttctcttccctgccctcctcccccggggcccgcgcccgctgcctccagcacgcgcgtcggcaggctcggcaagcgaagaggagcggctcgccccagggcgcccctcgcccagcctgccggccaggcgagcgcgacgagagtctccccgcaccccttcctctcccgggggccgagagggttgggctccgccccggcgccgcagctcccgactccccgccgctcgggctgccgccgctgccccgcgcccggcgctcggggcagccgggggcgcaggcggagagcgcagggcggggagaggcgtggggagcagagcggcgctgaggggagggcagaggaggagagagcctggcagcggaggagcagaggcgggcgccgcaccgccccgcacgctcgctcgctcgggagagtcgcgggcggccgcttgggcgcacttgccgggtcaccttgtcccggaggagaaatggcttccctgaggcaagtgtaacctacattcccagcccaccagcctgacgcccagccagggagagagtaccatggatggcatcattgaacagaagagcatgctggtgcacagtaaaatcagtgatgctggcaagaggaatggtttaattaacaccagaaacttgatggccgagagcagagatggtctggtgtctgtttacccagcgccccagtaccagagccaccgggtgggggccagcacagtgccggccagcctggacagcagcaggagtgagccgatgcagcagctgctggaccccaacaccctgcagcagtcagtggagtcccgctaccggcccaacatcatcctctattcagagggcgtgctgcgctcctggggggacggtgtggccgccgactgctgcgagaccaccttcatcgaggaccggtcgcccaccaaagacagcctcgagtacccggatgggaagttcattgacctctcagctgatgacataaaaatccacaccctgtcctacgatgtggaggaggaggaggagttccaggagctggagagcgactactcaagcgacacagagagtgaggacaatttcctcatgatgcccccgcgggaccacctgggcctcagtgtcttctccatgctctgctgcttctggcctctgggcatcgcagccttctacttgtcccatgagaccaacaaagccgtggccaagggggacttgcaccaggccagcaccagctcccggcgggccctattcctggcagtgctgtccatcaccattgggactggcgtctatgtgggcgtggccgtggccctcatcgcctacctctccaagaacaaccacctgtgagcttcctgcgaatggagggggagcacccggggccaggtctgtgtggacgtggaggaagcaggcataccgcatgatgctgtacagtacaaatgattgccaaatgatgccacgaagccctgggatttcctacccatggatttattttgtttttatcctttaatttcatgttcacagcactgtgtagagcaccagacagacgggcactgctaatccttccaaaggaaagctccaaagatcccagcccgcaaggctgtctctggatggattctggtggatgaatggcaacgcggctctctgcagcctgccagtgcccagagtgccaccgcattagcaatatacaaacagtccaaaaaagtgtttattttttatggaatacggtgcaataggcagaggacaagggacacatcactcttctgtctgtggccctgctggagtcctttgtgccccccggagtccacacgccttccctgcaagacgagaatggggctgggaagaaagaggcaacaccacggctggcaggagccccgctgcactgctctgcagacccattggcctgaccctgagaagcagagccagcaaagcccgggacctgcccctctttctttcccttcacaccaccccagcctcaggatgtcaagccacctccggaacgtgtctacactccacagctaccccgcagcaatacgcactcttgggacctcgctgatctaggatggggaggcaggccaccgcccctcccaagactcctcaagaaagagccccgcggttgctccggaaactcgaggcactgcagctatgggcactgcctcagcctaaagacacaggggcgcctcccaatcaccgcgctggcggatgctcaccccgtcataagcagaaactagtgatcctggaaatgagatgggccttactctgtcgactaaatgaatagctattttcttgtcattttttaaagtgcaactcttgcttcatgctgcttaagttaccagatgaatgctgagaaataagtaatcacagacattttaataccatttcattgctgttttacgagtgttcattacttaacaaaaaattatcttttagctttttcgcttaagacttttctttctgatg

SEQ ID NO: 27903 - protein, 258 aa, Homo sapiens; identical to SEQ ID NO: 3827

SEQ ID NO: 27904 - DNA, 675 bp, Homo sapiens
ggattcacttagtgatggggagaaagcagatgacgcagaacaggcctgctgcttccacaaggctatgactcctgcatccaggatgatgcccaagacctcccagaagctggccctgcgacgaggatctgagtgcacttgggaggtggttccagaaagcactgggtaggggcaagaaaggcagttctctttgcccagcatttggccagggcgttggcccacctcaccaatgtgatcccatctatgcacattgctgctggaggctgggttgcgagtcagcatctcagggaaaggtggatcagcacagccgccctcctggccccagaccacaggctacattcccagactcgctgccattgcatgacagagaatccgtcagctcggggaactggatgaagcgggctgggactgatactccaaagtgctgtcaagctagtgtcctttgctggtgttacagttggattttctactttgccatttgactgtaaggtcagtgtcagtgttgggtctgcacctggaagccactgagggaggtacatgtcacatcccctggcatcaggaacgtgacggaccttgtcctgggtctgctatggggatggtgacaaggcaaatccctcctgcagcagggcatgctgctcaccctgtgcgcagctgtgccctgggccaggccctgcgctg

SEQ ID NO: 27905 - protein, 50 aa, Homo sapiens
MHIAAGGWVASQHLRERWISTAALLAPDHRLHSQTRCHCMTENPSARGTG

SEQ ID NO: 27906 - DNA, 1226 bp, Homo sapiens
ccagctcccggcgggccctattcctggcagtgctgtccatcaccattgggactggcgtctatgtgggcgtggccgtggccctcatcgcctacctctccaagaacaaccacctgtgagcttcctgcgaatggagggggagcacccggggccaggtctgtgtggacgtggaggaagcaggcataccgcatgatgctgtacagtacaaatgattgccaaatgatgccacgaagccctgggatttcctacccatggatttattttgtttttatcctttaatttcatgttcacagcactgtgtagagcaccagacagacgggcactgctaatccttccaaaggaaagctccaaagatcccagcccgcaaggctgtctctggatggattctggtggatgaatggcaacgcggctctctgcagcctgccagtgcccagagtgccaccgcattagcaatatacaaacagtccaaaaaagtgtttattttttatggaatacggtgcaataggcagaggacaagggacacatcactcttctgtctgtggccctgctggagtcctttgtgccccccggagtccacacgccttccctgcaagacgagaatggggctgggaagaaagaggcaacaccacggctggcaggagccccgctgcactgctctgcagacccattggcctgaccctgagaagcagagccagcaaagcccgggacctgcccctctttctttcccttcacaccaccccagcctcaggatgtcaagccacctccggaacgtgtctacactccacagctaccccgcagcaatacgcactcttgggacctcgctgatctaggatggggaggcaggccaccgcccctcccaagactcctcaagaaagagccccgcggttgctccggaaactcgaggcactgcagctatgggcactgcctcagcctaaagacacaggggcgcctcccaatcaccgcgctggcggatgctcaccccgtcataagcagaaactagtgatcctggaaatgagatgggccttactctgtcgactaaatgaatagctattttcttgtcattttttaaagtgcaactcttgcttcatgctgcttaagttaccagatgaatgctgagaaataagtaatcacagacattttaataccatttcattgctgttttacgagtgttcattacttaacaaaaaattatcttttagctttttcgcttaagacttttctttttgatg

SEQ ID NO: 27907 - protein, 112 aa, Homo sapiens [sequence omitted]

SEQ ID NO: 27908 - DNA, 742 bp, Homo sapiens
aggcatgattgcatttgttacctctggataaatgctcatggattgaagcacctgtttaaatcgcaccctacttctagccctgcctccagactcgcctctttgcattcagggagcacagaaatgtggaaccccatctaatgggttcactggcacacagacctcagacaagggggagctgaggactggactctgaccactgttttggttctaaatttcttcctgaggcccaagaggaggtcacgtccaccagctaaacctagcattcttttctgctggctacaaaatttttagacaaggctttgcctccttaaacaatcgcaagtttaaaaatctttgaatccagccatctatgacctgtgggcccccacttggagatgttccacgtttttaggtcaagccaatgtacagcctccacctattgatttatgactttgcctgtgacctctgcctccctccctttaaaaactcctacctgtaagccattgaggccaggtctaaatcatgagctgccctgcaatcggtgcctcaatttctctcgccgcaaccctgaggtcagccttggctttgctctgctgcactggtggacccaagctctgttcactgttgtcagcctagggtcctgcctccagccctgatttctcagagattggacttggaccctccaagccccctgattacaaaaggaagtgagcttgttccaagactgcagggaagggatttccattttgagctccataggcgg

SEQ ID NO: 27909 - protein, 69 aa, Homo sapiens
MTLPVTSASLPLKTPTCKPLRPGLNHELPCNRCLNFSRRNPEVSLGFALLHWWTQALFTVVSLGSCLQP

SEQ ID NO: 27910 - DNA, 762 bp, Homo sapiens
atgccccagcagcttctcacttcaagtgagaagtgtcggcaccgcccacacagcaaaagcagcactaagagaaagaattgcaaaccaccccaaaaacactgctcccttcagctgcgaggctcctactcctccacgctgctggtggttggagaaaggaccaggagtgggaaggcctccgaaatgcgggcctccaacagcagcagcttcctccccacattcggagccaagggagcaagtacagcagtcaagaacatcaagccaaaagaatttttctttgaaaagcaaacctcagacatcaaacgtctggccaggtctcgctggttcaaacgacggagtgaaggaaacacctggggcatgcactgcttccctgtcgcccttactgaccacgggaatgggaagccgcccagcacacgctcgtggagcactgcccagagcagcagcctcttgtctccttcattagccacagtgcccatcacccactcagagccctggactctcctgatgacaaaggacacaaatgatgacagggtctgttctgggggacttagcacaagatcctccctggggaatgaggatgaaggctacctggggaatgaggatgaaggctacctggggaatgacgatgaaggctacctggggaatgaggatgaaggctacctggggaatgaggatgaaggctacctggggaatgaagatgaaggctacctggggaatgacgatgaaggctacctgggaatgaggatgaaggctacctgggaatga

SEQ ID NO: 27911 - protein, 253 aa, Homo sapiens
MPQQLLTSSEKCRHRPHSKSSTKRKNCKPPQKHCSLQLRGSYSSTLLVVGERTRSGKASEMRASNSSSFLPTFGAKGASTAVKNIKPKEFFFEKQTSDIKRLARSRWFKRRSEGNTWGMHCFPVALTDHGNGKPPSTRSWSTAQSSSLLSPSLATVPITHSEPWTLLMTKDTNDDRVCSGGLSTRSSLGNEDEGYLGNEDEGYLGNDDEGYLGNEDEGYLGNEDEGYLGNEDEGYLGNDDEGYLGMRMKATWE

SEQ ID NO: 27912 - DNA, 930 bp, Homo sapiens
gctgtggccctggcacctgcccctgggctgggacagcccactgttccatgctgcccaagaaggctcagcacaggcacaaaccattgcccggcactggcccgtgctgcctgagaaggattggcacgggcacagaccactgcccccacctgccctgcgccatctacccaagaaggctcggcacgggcaccaaccactgcctccaactgccccatgctgcctgagaaggcactgcacggccacccccaactgccccgcactgtccctacccgggcagccatgcgagcggctggaactctgctggccttctgctgcctggtcttgagcaccactgggggcccttccccagatacttgttcccaggaccttaactcacgtgtgaagccaggatttcctaaaacaataaagaccaatgacccaggagtcctccaagcagccagatacagtgttgaaaagttcaacaactgcacgaacgacatgttcttgttcaaggagtcccgcatcacaagggccctagttcagatagtgaaaggcctgaaatatatgctggaggtggaaattggcagaactacctgcaagaaaaaccagcacctgcgtctggatgactgtgacttccaaaccaaccacaccttgaagcagactctgagctgctactctgaagtctgggtcgtgccctggctccagcacttcgaggtgcctgttctccgttgtcactgacccccgcctcttcagcaagaccacagccatgacaaacaccaggatgcatgctccttgtcccctcccacccgcctcatgacccagcctcacagaccctctcaggcctctgacgagtgagcgggtgaagtgccactgggtcaccgcagggcagctggaatggcagcatggtagcacctcctaacagattaaatagatcacatttgcttctaaaattaa

SEQ ID NO: 27913 - protein, 167 aa, Homo sapiens; identical to SEQ ID NO: 3829

SEQ ID NO: 27914 - DNA, 1032 bp, Homo sapiens
ggacagcccactgttccatgctgcccaagaaggctcagcacaggcacaaaccattgcccggcactggcccgtgctgcctgagaaggattggcacgggcacagaccactgcccccacctgccctgcgccatctacccaagaaggctcggcacgggcaccaaccactgcctccaactgccccatgctgcctgagaaggcactgcacggccacccccaactgccccgcactgtccctacccgggcagccatgcgagcggctggaactctgctggccttctgctgcctggtcttgagcaccactgggggcccttccccagatacttgttcccaggaccttaactcacgtgtgaagccaggatttcctaaaacaataaagaccaatgacccaggagtcctccaagcagccagatacagtgttgaaaagttcaacaactgcacgaacgacatgttcttgttcaaggagtcccgcatcacaagggccctagttcagatagtgaaaggcctgaaatatatgctggaggtggaaattggcagaactacctgcaagaaaaaccagcacctgcgtctggatgactgtgacttccaaaccaaccacaccttgaagcaggtaaagcagcaggcccttctctcagatgtgccctctcttccccagcccactccctcccaggactgtgaaaaacaccgtcaccacgtctctaacgcagcgccccaaacctcacccctgaggaagccaggcctcccagactcccgcacgactgaggatccgggagaacaggaggtagagcctgtgccaggagctcctcagatgacatcctcccgtcccagaggcggagacacagctctggaagagcgtcctggggtgcgagtggagagggttagagtaagaaaagctttcaaacaatccagaaattatatatgtatcatatacatacatatgatatgtatcatatgtatatcatatatagcatatctctgcagagagagcaagagaacgggaacacagcaacatttagcaattacagaggtgaaaagc

SEQ ID NO: 27915 - protein, 283 aa, Homo sapiens
MLPEKALHGHPQLPRTVPTRAAMRAAGTLLAFCCLVLSTTGGPSPDTCSQDLNSRVKPGFPKTIKTNDPGVLQAARYSVEKFNNCTNDMFLFKESRITRALVQIVKGLKYMLEVEIGRTTCKKNQHLRLDDCDFQTNHTLKQVKQQALLSDVPSLPQPTPSQDCEKHRHHVSNAAPQTSPLRKPGLPDSRTTEDPGEQEVEPVPGAPQMTSSRPRGGDTALEERPGVRVERVRVRKAFKQSRNYICIIYIHMICIICISYIAYLCRESKRTGTQQHLAITEVK

SEQ ID NO: 27916 - DNA, 410 bp, Homo sapiens
cgctccccagagccctccagagaggacgccccactgaagatgactctgttgggggtgcacgaggagggagaggccaccgagggctggagggcaccaggattggaagaagactggaagaatcagtgccctgccatgatccacaggctgcaggggccactgcccagtcaggcactgtcacccttgctcccagcttcacctgcgctttctccagtcacatccctgggaggctggctcggctgtgccagctgtgactctggcagtcactaacctaaccccttggagcctcagttcccattggtgcaatgaggccatgtcttctggaatcattaagagtcagcgtatgtgaacaactttcagaactacaggccactctgcaagtgtagtaagctgatgataaaaatctcaaactg

SEQ ID NO: 27917 - protein, 75 aa, Homo sapiens [sequence omitted]

SEQ ID NO: 27918 - DNA, 2028 bp, Homo sapiens
tcagtgactggggagaggcggcagggcagggcccaggccagggacacacacaacagatggcaagactggcagctgggcttgtagggcacagagagactgggatcaagggaaggctggggtcctggccctgtctccagagctggggaggctgttgaatttgaagtgctattagaaaggccaggcagacatgggtcccagacagtgagaaacttagcactggtgttggagatggcgatttgagagctttctgggaaagtgactagttgtaatagtgagagaggatgagatctcttagggggaagagagaagagaggagagtgggaaggatccacggccgaacagcaggagatggcatttcctaggtagtgggaagccttgggaattttttgagctgtaatgcagttgatctatcgctgttgaacctagagtctagtcagcttgtctgtctgcttgaacatttccagtgactgggagacattattcgttggacacttgtttgggtattttcccttgtattaaaagctagaaatctgtctgttaatttccattccttggtcttaggcagtggagtgctttgtcataatttccgaccaggtgtccttctgctctgccagaaatcacgcctctcgccatctgttctctgcttaatactcttcaacagtcccgtgtgaccacagagtccaggtctaagctcttttgcctccgtccctgtaggcgtccctcaggatctgcacgccccgctttgaggaaagcagtgggattttgctttttgttttggaagccatgttgtgtggtctgtggacctgcttgctttttttgaatgtgagctgctctcaaatctccatcatttgcaccttgcctatttgaaatgttttaaatctaaacagaagacttgtgtattccagggaagctgcgctggttgtgatctgctctttagtcaagagacggtgatgaagtttgtgccgcggtacagcctcgtcctagaactcagcgacagcggtgccttccggagaagcctgcatgatcccgatgggctggtggccacctacatcagcgaggtgcacgaacacgatgggcacctgtacctgggctctttcaggtcccccttcctctgcagactcagcctccaggctgtttagccctcccagatagctgcccctgccacgcaggccaggagtcttcacactcaggcaccaggcctggtccaggaggagctgtggacacagtcgtggttcaagtgtccacatgcacctgttagtccctgagaggtggtgggaatggctgcttcattcctcgaggatgcccgggccccacctgggcttgtctttctgtttagagggaagtgtaacatatctgccatgaggaacataaattcatgtaaagccattttctcttaaacaaaacaaaactttctaagtacagtcattctctaggatttgggaagctccttgcacttggaacagggctcaggtgggtggagcagtaaggcactacccagagagcttgctgctgcggccctgtcctgcggcctcaaagttcttctttactatatataacgtgcggtcatacctttcttcgttgtggtggggatggaagagcagagggagcatggcccaggggtgttgaggccagcggtgagagccgtgttagccaagacatggaactgtgttctcaagggttatgtggggcgtgggctctccatagtgtgtatgaaaagcttgttgactctagcggctcagagaggactttgctgggtttctttctgtgaatatctccgtgctgaccatgctggaattggatgattctgcaattcgggacctactgcaggggtccgtttagtaacgtcttgtctgtgatctttgttcttgacctctagaccccaagatgtgaacagtgcacgtgttaatgtcatctttgctcatgtgttataagccccaagttgctgtatattttcacaagtatgtctacacactggtcatgattttgataataaataacgataaatcgacttctgctgattaacctttt

SEQ ID NO: 27919 - protein, 70 aa, Homo sapiens [sequence omitted]

SEQ ID NO: 27920 - DNA, 1034 bp, Homo sapiens
gctgtctcagtgactggggagaggcggcagggcagggcccaggccagggacacacacaacagatggcaagactggcagctgggcttgtagggcacagagagactgggatcaagggaaggctggggtcctggccctgtctccagagctggggaggctgttgaatttgaagtgctattagaaaggccaggcagacatgggtcccagacagtgagaaacttagcactggtgttggagatggcgatttgagagctttctgggaaagtgactagttgtaatagtgagagaggatgagatctcttagggggaagagagaagagaggagagtgggaaggatccacggccgaacagcaggagatggcatttcctaggtagtgggaagccttgggaattttttgagctgtaatgcagttgatctatcgctgttgaacctagagtctagtcagcttgtctgtctgcttgaacatttccagtgactgggagacattattcgttggacacttgtttgggtattttcccttgtattaaaagctagaaatctgtctgttaatttccattccttggtcttaggcagtggagtgctttgtcataatttccgaccaggtgtccttctgctctgccagaaatcacgcctctcgccatctgttctctgcttaatactcttcaacagtcctgtgttctcaagggttatgtggggcgtgggctctccatagtgtgtatgaaaagcttgttgactctagcggctcagagaggactttgctgggtttctttctgtgaatatctccgtgctgaccatgctggaattggatgattctgcaattcgggacctactgcaggggtccgtttagtaacgtcttgtctgtgatctttgttcttgacctctagaccccaagatgtgaacagtgcacgtgttaatgtcatctttgctcatgtgttataagccccaagttgctgtatattttcacaagtatgtctacacactggtcatgattttgataataaataacgataaatcgacttctgctgattaacctttt

SEQ ID NO: 27921 - protein, 38 aa, Homo sapiens
MSSLLMCYKPQVAVYFHKYVYTLVMILIINNDKSTSAD

SEQ ID NO: 27922 - DNA, 2234 bp, Homo sapiens
gctgtctcagtgactggggagaggcggcagggcagggcccaggccagggacacacacaacagatggcaagactggcagctgggcttgtagggcacagagagactgggatcaagggaaggctggggtcctggccctgtctccagagctggggaggctgttgaatttgaagtgctattagaaaggccaggcagacatgggtcccagacagtgagaaacttagcactggtgttggagatggcgatttgagagctttctgggaaagtgactagttgtaatagtgagagaggatgagatctcttagggggaagagagaagagaggagagtgggaaggatccacggccgaacagcaggagatggcatttcctaggtagtgggaagccttgggaattttttgagctgtaatgcagttgatctatcgctgttgaacctagagtctagtcagcttgtctgtctgcttgaacatttccagtgactgggagacattattcgttggacacttgtttgggtattttcccttgtattaaaagctagaaatctgtctgttaatttccattccttggtcttaggcagtggagtgctttgtcataatttccgaccaggtgtccttctgctctgccagaaatcacgcctctcgccatctgttctctgcttaatactcttcaacagtcccgtgtgaccacagagtccaggtctaagctcttttgcctccgtccctgtaggcgtccctcaggatctgcacgccccgttgtgtattccagggaagctgcgctggttgtgatctggtgagtggaggtcattctgagccttggctgcagtgctgtgaccacgtcggatgtgatatgtctctctcagttcagccaggccatccagagatgtgcttgcgttgctgtccttgtgctggggagcctctttggcctgatcttcacagggacaggggtggggtggggcctgctttggggcccctgggctgggagtgggagctggattagctgtcctgtggggcactgccctgtggggctgccctgtcatgggaaggagtcagaccgttcctggatggtgggggcggcacggttgatctgcgcacagtgttcttggccagctggtgaactttccctgcactgtgcttccctctagctctttagtcaagagacggtgatgaagtttgtgccgcggtacagcctcgtcctagaactcagcgacagcggtgccttccggagaagcctgcatgatcccgatgggctggtggccacctacatcagcgaggtgcacgaacacgatgggcacctgtacctgggctctttcaggtcccccttcctctgcagactcagcctccaggctgtttagccctcccagatagctgcccctgccacgcaggccaggagtcttcacactcaggcaccaggcctggtccaggaggagctgtggacacagtcgtggttcaagtgtccacatgcacctgttagtccctgagaggtggtgggaatggctgcttcattcctcgaggatgcccgggccccacctgggcttgtctttctgtttagagggaagtgtaacatatctgccatgaggaacataaattcatgtaaagccattttctcttaaacaaaacaaaactttctaagtacagtcattctctaggatttgggaagctccttgcacttggaacagggctcaggtgggtggagcagtaaggcactacccagagagcttgctgctgcggccctgtcctgcggcctcaaagttcttctttactatatataacgtgcggtcatacctttcttcgttgtggtggggatggaagagcagagggagcatggcccaggggtgttgaggccagcggtgagagccgtgttagccaagacatggaactgtgttctcaagggttatgtggggcgtgggctctccatagtgtgtatgaaaagcttgttgactctagcggctcagagaggactttgctgggtttctttctgtgaatatctccgtgctgaccatgctggaattggatgattctgcaattcgggacctactgcaggggtccgtttagtaacgtcttgtctgtgatctttgttcttgacctctagaccccaagatgtgaacagtgcacgtgttaatgtcatctttgctcatgtgttataagccccaagttgctgtatattttcacaagtatgtctacacactggtcatgattttgataataaataacgataaatcgacttctgctgattaacctttt

SEQ ID NO: 27923 - protein, 70 aa, Homo sapiens [sequence omitted]

SEQ ID NO: 27924 - DNA, 2431 bp, Homo sapiens
tcgcgttctgggccccggagtccgagacaggcggggaccccggcagctcccggtgctatctctgagcgggttccgagccccacttccgggcggtcagaattagcctcagagcgccgagcaacgacgcgccggggacctcccgcccatgaggccggaaggggcggggagaacgctgcggaatggtccctgggcgcaacgtcatttccgcgtacgggggagggcgggcctggagtctgagccggcgccgctcagtgtgaggtggtttctgcgggtgaggctggcgcccgtaccatgagcgaggcggacgggctgcgacagcgccggcccctgcggccgcaggtcgtcacagacgatgatggccaggccccggaggctaaggacggcagctcctttagcggcagagttttccgagtgaccttcttgatgctggctgtttctctcaccgttcccctgcttggagccatgatgctgctggaatctcctatagatccacagcctctcagcttcaaagaacccccgctcttgcttggtgttctgcatccaaatacgaagctgcgacaggcagaaaggctgtttgaaaatcaacttgttggaccggagtccatagcacatattggggatgtgatgtttactgggacagcagatggccgggtcgtaaaacttgaaaatggtgaaatagagaccattgcccggtttggttcgggcccttgcaaaacccgagatgatgagcctgtgtgtgggagacccctgggtatccgtgcagggcccaatgggactctctttgtggccgatgcatacaagggactatttgaagtaaatccctggaaacgtgaagtgaaactgctgctgtcctccgagacacccattgaggggaagaacatgtcctttgtgaatgatcttacagtcactcaggatgggaggaagatttatttcaccgattctagcagcaaatggcaaagacgagactacctgcttctggtgatggagggcacagatgacgggcgcctgctggagtatgatactgtgaccagggaagtaaaagttttattggaccagctgcggttcccgaatggagtccagctgtctcctgcagaagactttgtcctggtggcagaaacaaccatggccaggatacgaagagtctacgtttctggcctgatgaagggcggggctgatctgtttgtggagaacatgcctggatttccagacaacatccggcccagcagctctggggggtactgggtgggcatgtcgaccatccgccctaaccctgggttttccatgctggatttcttatctgagagaccctggattaaaaggatgatttttaagctctttagtcaagagacggtgatgaagtttgtgccgcggtacagcctcgtcctagaactcagcgacagcggtgccttccggagaagcctgcatgatcccgatgggctggtggccacctacatcagcgaggtgcacgaacacgatgggcacctgtacctgggctctttcaggtcccccttcctctgcagactcagcctccaggctgtttagccctcccagatagctgcccctgccacgcaggccaggagtcttcacactcaggcaccaggcctggtccaggaggagctgtggacacagtcgtggttcaagtgtccacatgcacctgttagtccctgagaggtggtgggaatggctgcttcattcctcgaggatgcccgggccccacctgggcttgtctttctgtttagagggaagtgtaacatatctgccatgaggaacataaattcatgtaaagccattttctcttaaacaaaacaaaactttctaagtacagtcattctctaggatttgggaagctccttgcacttggaacagggctcaggtgggtggagcagtaaggcactacccagagagcttgctgctgcggccctgtcctgcggcctcaaagttcttctttactatatataacgtgcggtcatacctttcttcgttgtggtggggatggaagagcagagggagcatggcccaggggtgttgaggccagcggtgagagccgtgttagccaagacatggaactgtgttctcaagggttatgtggggcgtgggctctccatagtgtgtatgaaaagcttgttgactctagcggctcagagaggactttgctgggtttctttctgtgaatatctccgtgctgaccatgctggaattggatgattctgcaattcgggacctactgcaggggtccgtttagtaacgtcttgtctgtgatctttgttcttgacctctagaccccaagatgtgaacagtgcacgtgttaatgtcatctttgctcatgtgttataagccccaagttgctgtatattttcacaagtatgtctacacactggtcatgattttgataataaataacgataaatcgacttctgctgattaacctttt

SEQ ID NO: 27925 - protein, 416 aa, Homo sapiens; identical to SEQ ID NO: 3831

SEQ ID NO: 27926 - DNA, 1259 bp, Homo sapiens
accccacacatgacccacaccgccctcacgtgaagctgggctgagagccctttctcccatccattggaggtcccaggagtgtcacccatggagaggctatgcgacatggctagggctggttctgccatctgagtttggtttcctggaatgaaaaggcattgccatctccattcctctgccctcttgagccagcacaggaaggtgaggccctgggatagcgcgcctgctcagataacacagagctagttagctagtagcaaccgtgttttctccagatctgtctagatacaaaggtcagaaatcttatttttatacttttatattgtggaagaacagcatgcaacactcacatgtagtgtgtggatttacttgaacatgttctttttaacatgtagttatgaaaatctcctgtgcttggttgtgtataatggagctaactcctaagcggtggggtgaatgtggccgccttagttctgaagctactccagttatgttctgtttcttcaagctgtgatccagaaagatttttgtgcccccagatgcctcttgataggagaggcaacatactccaaatagttgggttcttcagggaagctattagaaactcaggtgacttgttagagcactaacttggtcagagccaaatcctggcaaacgctgcctgaccttcactctgtggttggggcggtgagaaccactgaggtccaatgatgagacttggaggtctggatccagtctctctttgttttaatgtgacttaggtgctgtcaacattagcaagataatggaaatcacgacgccagtgggtgcttacctccctgctaggcatgcaggggctggcggttggcaggggaaggaggcccagtgagccgggtcccttaggggagggagagtttgtcctctttgccccacagtctacccttcagggccttgtggcagtgccagtgttcggggggtgtctgggccactgagtacccactcggtcgtggttgtgctggcctcttgggtgagtgaacctgtgaagcccaggaggtggtgttggctgcagggtacacaaatactgagtggtggtcttttgttacaggcttagcaacaaagctgtgccctgggcatggggggctgtagtgtagctacagttgtgcgtttgtgaaatggcttagctttccatgttgctgagaggaacctggacatggtcccgggcatctgaatgatctgtaggggagggagttcaaataaagctttattttgttcattttctc

SEQ ID NO: 27927 - protein, 38 aa, Homo sapiens [sequence omitted]

SEQ ID NO: 27928 - DNA, 4769 bp, Homo sapiens
tttccccttctgtccatggtgtatctggtggggacaccgtccagccccattacagagagtttatgagaaaatgtccagcctcatgtatcctcacgggcttggtcatagcactcaagccagctctgcagccgccacgcgtgtgtgccagagtgtgctctggagtgtgcaggctgtgtgctgcgctgggactctttggacgaatctgacctgtggttcccactgcacagcgacatgctgggggaatgcagaatgagggactagaatggcctttaccaaggccacgctttgtttcgagtctgccagcttcttggtggctgggtctgggaaggggcgggagcacctaggtgttgcaatgccaggtccatccaggcacactgcctggcctggcgtgacctggacacacactgaccccatgccagggcactgctgggcagactggcttctcctgccctgcccagtggcttggggtcaggcttgccctcccgctgggaggccaccctgtgtcacagtgtgtcccagatgtcaccttcctccctgcacttctatgtgccgttattccattatttacttaaatgctctctttaaattgacgcattgcaagattgagaatttgtttcagtgctttacaaacagcattttcagttgccatggaaaggctatgctggtaaggctgggatgtgggagagagctggtagggacccctgcccggtgacatgtccagatgtgatcaggagggtcagagaggacggagacgaggacagtttctcaggtgtgactagggtaacttagtgcccccctgaggttacctcgctctggcaggagcctgggcccctcctctgaggactcctgcatttcacatctctgggctgggggtccacagggcactgacgtgtcctgggatttgaaagccccatctatgtctgagtccagtggctgagccagtactccctggggccactgagaggggtccgggcatggtccactgtgtctggggattcagcagcccctggattgaactccataaagcaagtgcaagatcaaggaaaggacaatggaagtgacctttagacaaacgtttgggcatcacaatcactgtctttcatagggtggcctagccttaggtctgttggggtggtgttggggcatggtctgctgtggacgctgctgcccagggcacgttctgcgtgtgtggagctattgcaagtctggtgttgccaggcttcttaatgtctgccagatgtgtggggataatttgtctatcatgtgtatgatgatgtgcattttcctgatttctaatgaatttgagtatccattctataattatgaagagctgatgaacagctcttggttggctctaaagctgcctgtgaatatcgtatatttgtccccactctctctgttttgcagcagctctgaaaaagggcagcccctggaccttgtctaggacctagacccagcaagcctctggtgctgctggccaggctcttgtctctcttgtctccagtgtcctgagccttgcctgcctcgtcctggctcttaactggctcctccacccatgtggaaggtttcctccctccagctccatcctcagaactcaacagtccaggcccacttctgatcccatatcaacgaccaagatgagaaaaacggtgttctttccctcaaagatctaacagcctagtggggtggcagcagggggactgacagctgttcccacatagcatgtgccataaactagattcatgggtggagtcaggaaaggcttcacagagcaggaggtggctgaactgagtcttgagggatgaataggagttcgccacatggatataggaaggcctttcaggcaaaggctgtaggtctttacagatcatagcttgttcagaaaaccaatcatccattcatgcacttaacaaccatgtgttgagcacctcctgtgttccaggcatggttctagatgctggggacacagcagtgagtgagaaggtctctgaccccatagaggggtcaagagtagaggagagagacagacaaagagcaagaaagatgatcaccaaggaaacgacacagtcagttaggtgctacatgccagggaagaatgggtgaaggtggcatggggctggggcagatgagcagtaggagagccacacatatatagaagcttcgagggagagacagagcacctcacaggccagtggggacgggcaggctatcagggatggcaccgggatgagcaactccttatatggacaacaatcaaattagatccctcttcacagtgtgaactcttcctggaacatgccagggtactgaaaaacgaaagctagtatttatgctataatgtgggctggcccgtgctgcccagcagaactctcagctgcctctcagctgtctgtgttgtccagggtggcagcctctggctgctcatggtgctgaatggcacttgaagtgtggctcatgcagccagggagctgctgatttaattgaactgaaatagctaccctggcccatggcaccatgttgcacacacacccccaaaggctggtggtgcccatttgctgtgcatctgtgcaccttctcatggaagtctcattccatcaaaccacattatgggttatttcacagatgtgtacacagagaggggaggtcccatgtcccaggtcacacgcagccagtcagcattagagctgagatgccaagctctcagccacacatgtgcactcacctggaacatctgtggagctgttagaatcgctgccacttttcatgaaactgaagtgcatctttgggtttgcaactaaagaaaccagctgctacaatgtcactaacataggattcaaaagcccttcggatttctggcagtctgtgcatagcaccctgcctcgggagttggctccttgtctagtatttaatacatccccaaacttggctttattttcagctgcctttgccttcattgtggtgaaagatagtgcgggtgactcagatgtggtggtgcaggagctcaagtccatggtggccaccaagatcgccaaatatgctgtgcctgatgagatcctggtggtgaaacgtcttccaaaaaccaggtctgggaaggtcatgcggcggctcctgaggaagatcatcactagtgaggcccaggagctgggagacactaccaccttggaggaccccagcatcatcgcagagatcctgagtgtctaccagaagtgcaaggacaagcaggctgctgctaagtgagctggcaccttgtggggctcttgggatgggcgggcacccaagccctggcttgtccttcccagaaggtacccctgaggttggcgtcttcctacgtcccagaagcagcccccaccccacacatgacccacaccgccctcacgtgaagctgggctgagagccctttctcccatccattggaggtcccaggagtgtcacccatggagaggctatgcgacatggctagggctggttctgccatctgagtttggtttcctggaatgaaaaggcattgccatctccattcctctgccctcttgagccagcacaggaaggtgaggccctgggatagcgcgcctgctcagataacacagagctagttagctagtagcaaccgtgttttctccagatctgtctagatacaaaggtcagaaatcttatttttatacttttatattgtggaagaacagcatgcaacactcacatgtagtgtgtggatttacttgaacatgttctttttaacatgtagttatgaaaatctccttttttgcctctactggtgaggaaacatgaggatcagaggccacatttttaattattgttagtgtatttggaagtctgaattggagatgtttgtacctctgtctaaacagttcccttgagaacttccaagcctccggcatcttttcctggtgagtgtttctcctgtgcttggttgtgtataatggagctaactcctaagcggtggggtgaatgtggccgccttagttctgaagctactccagttatgttctgtttcttcaagctgtgatccagaaagatttttgtgcccccagatgcctcttgataggagaggcaacatactccaaatagttgggttcttcagggaagctattagaaactcaggtgacttgttagagcactaacttggtcagagccaaatcctggcaaacgctgcctgaccttcactctgtggttggggcggtgagaaccactgaggtccaatgatgagacttggaggtctggatccagtctctctttgttttaatgtgacttaggtgctgtcaacattagcaagataatggaaatcacgacgccagtgggtgcttacctccctgctaggcatgcaggggctggcggttggcaggggaaggaggcccagtgagccgggtcccttaggggagggagagtttgtcctctttgccccacagtctacccttcagggccttgtggcagtgccagtgttcggggggtgtctgggccactgagtacccactcggtcgtggttgtgctggcctcttgggtgagtgaacctgtgaagcccaggaggtggtgttggctgcagggtacacaaatactgagtggtggtcttttgttacaggcttagcaacaaagctgtgccctgggcatggggggctgtagtgtagctacagttgtgcgtttgtgaaatggcttagctttccatgttgctgagaggaacctggacatggtcccgggcatctgaatgatctgtaggggagggagttcaaataaagctttattttgttcattttctc

SEQ ID NO: 27929 - protein, 157 aa, Homo sapiens
MKLKCIFGFATKETSCYNVTNIGFKSPSDFWQSVHSTLPRELAPCLVFNTSPNLALFSAAFAFIVVKDSAGDSDVVVQELKSMVATKIAKYAVPDEILVVKRLPKTRSGKVMRRLLRKIITSEAQELGDTTTLEDPSIIAEILSVYQKCKDKQAAAK

SEQ ID NO: 27930 - DNA, 4885 bp, Homo sapiens
agctatgcaaacacgctgcgagcggccttgagagcccgaggagggtctgctttctgggcccctgcagagggcaggggtcgcgggctggtggtctgccccgcccagagagaaagggccttggcttcccctcattcttcgttctgtgttagctctttttattgcaaataattaattaaagtcagtacagcaagagtgggaaagtggttaatgcaattgccaggtccagattcagagggatgaggcgccgaaaggaaagacaaccttgggatcgcttccacttcctccacttcgcaccgcatggccggcaagttggcggctctcgcctgctcccagttttcccggagttgagtatggttgactctgactggaccaggttgggtcacgtgtcggccctgagccaatcagcttgcccagagagatgatgcgccctgagtggtgggtgaacctggtgataggccccagagtggccagagaggaagggcatgcgcacaccatagacataggcaacgtggtggacgacatgggggctgggcgggggtgctgctcacccaccttgtgcccagtgctttcccttccccttgtccatggtcccctagcttggggagaaagcagggtgcttgctctacccgccagtgctgtctcggggctgcagggagttgtggctgccctgcttgcggtcttcactcccaactcactgtggctttgcagagctggagtccgccctatctgggcttgggggtctgctccctgagagcattatttggtgcccctcgactgtgttgattcagaaatctgggacctgttgtttctcgactaaatgtcttatgagatcagtctttcttttggaggcaaacattttcggaagttttggaaccatgatgatctatgcctcagacacttgtggtccctgagaagctgctgctggaaaaaggggtccccatccggatcccaggagagggttcttggatcatgccgggaaggaatccaaggcgagtggcagagcgcagtgaaaagagatagtttattgaaagcttctcagttacatagtagggcatcctcagcaagaggaggaatgcctctgttttgtttctttcttatataggggtcttatctatgtaaaagctaagctatgtctccctgcgggtaggctgacgaagtgacatttattactttgttgattgaaagaaagctatccttggcattttagtgcataagtacatcaaagcatgcctataatcatcttaaaagcatatattatgcaatattggggcatctggacattctgttgttgcaagagtttgtctttgcaggtattaagctacttcgtcagctgtaaacatcttatgactgtgggtcatgactggcaaggaatgtgccttgctagttttaagatggaattgattctaaaatggtgtcaccatggctcccctacgctcctgttcccctaaaaaaaccctgccgtaagcggacttaaggatagccttgtcaccctagcaatgtggcagtgaatctctgccaatagcaatctacaaatgttaaaaacttttctttttctggaaaagtactttccatgcattaagtattcaagtgcctgttttcctggcactgggctggatgtatatgacataaaatttgcagtattgctccacccccaaactgctctgcattttggccctcctccatctctgatggctttctcttccctgtgctgcagggaactactggagaccacgtgccgcctggccaacacgctgaagaggcatggagtccaccgtggggaccgtgttgccatctacatgcccgtgtccccattggctgtggcagcaatgctggcctgtgccaggatcggagctgtccacacagtcatctttgctggcttcagtgcagagtccttggctgggaggatcaatgatgccaagtgcaaggtggttatcaccttcaaccaaggactccggggtgggcgcgtggtggagctgaagaaaatagtggatgaggctgtgaagcactgccccaccgtgcagcatgtcctggtggctcacaggacagacaacaaggtccacatgggggatctggacgtcccgctggagcaggaaatggccaaggaggaccctgtttgcgccccagagagcatgggcagtgaggacatgctcttcatgctgtacacctcagggagcaccggaatgcccaagggcatcgtccatacccaggcaggctacctgctctatgccgccctgactcacaagcttgtgtttgaccaccagccaggtgacatctttggctgtgtggccgacatcggttggattacaggacacagctacgtggtgtatgggcctctctgcaatggtgccaccagcgtcctttttgagagcaccccagtttatcccaatgctggtcggtactgggagacagtagagaggttgaagatcaatcagttctatggcgccccaacggctgtccggctgttgctgaaatacggtgatgcctgggtgaagaagtatgatcgctcctccctgcggaccctggggtcagtgggagagcccatcaactgtgaggcctgggagtggcttcacagggtggtgggggacagcaggtgcacgctggtggacacctggtggcagacagaaacaggtggcatctgcatcgcaccacggccctcggaagaaggggcggaaatcctccctgccatggcgatgaggcccttctttggcatcgtccccgtcctcatggatgagaagggcagcgtcgtggagggcagcaacgtctccggggccctgtgcatctcccaggcctggccgggcatggccaggaccatctatggcgaccaccagcgatttgtggacgcctacttcaaggcctacccaggctattacttcactggagacggggcttaccgaactgagggcggctattaccagatcacagggcggatggatgatgtcatcaacatcagtggccaccggctggggaccgcagagattgaggacgccatcgccgaccaccctgcagtaccagaaagtgctgtcattggctacccccacgacatcaaaggagaagctgcctttgccttcattgtggtgaaagatagtgcgggtgactcagatgtggtggtgcaggagctcaagtccatggtggccaccaagatcgccaaatatgctgtgcctgatgagatcctggtggtgaaacgtcttccaaaaaccaggtctgggaaggtcatgcggcggctcctgaggaagatcatcactagtgaggcccaggagctgggagacactaccaccttggaggaccccagcatcatcgcagagatcctgagtgtctaccagaagtgcaaggacaagcaggctgctgctaagtgagctggcaccttgtggggctcttgggatgggcgggcacccaagccctggcttgtccttcccagaaggtacccctgaggttggcgtcttcctacgtcccagaagcagcccccaccccacacatgacccacaccgccctcacgtgaagctgggctgagagccctttctcccatccattggaggtcccaggagtgtcacccatggagaggctatgcgacatggctagggctggttctgccatctgagtttggtttcctggaatgaaaaggcattgccatctccattcctctgccctcttgagccagcacaggaaggtgaggccctgggatagcgcgcctgctcagataacacagagctagttagctagtagcaaccgtgttttctccagatctgtctagatacaaaggtcagaaatcttatttttatacttttatattgtggaagaacagcatgcaacactcacatgtagtgtgtggatttacttgaacatgttctttttaacatgtagttatgaaaatctccttttttgcctctactggtgaggaaacatgaggatcagaggccacatttttaattattgttagtgtatttggaagtctgaattggagatgtttgtacctctgtctaaacagttcccttgagaacttccaagcctccggcatcttttcctggtgagtgtttctcctgtgcttggttgtgtataatggagctaactcctaagcggtggggtgaatgtggccgccttagttctgaagctactccagttatgttctgtttcttcaagctgtgatccagaaagatttttgtgcccccagatgcctcttgataggagaggcaacatactccaaatagttgggttcttcagggaagctattagaaactcaggtgacttgttagagcactaacttggtcagagccaaatcctggcaaacgctgcctgaccttcactctgtggttggggcggtgagaaccactgaggtccaatgatgagacttggaggtctggatccagtctctctttgttttaatgtgacttaggtgctgtcaacattagcaagataatggaaatcacgacgccagtgggtgcttacctccctgctaggcatgcaggggctggcggttggcaggggaaggaggcccagtgagccgggtcccttaggggagggagagtttgtcctctttgccccacagtctacccttcagggccttgtggcagtgccagtgttcggggggtgtctgggccactgagtacccactcggtcgtggttgtgctggcctcttgggtgagtgaacctgtgaagcccaggaggtggtgttggctgcagggtacacaaatactgagtggtggtcttttgttacaggcttagcaacaaagctgtgccctgggcatggggggctgtagtgtagctacagttgtgcgtttgtgaaatggcttagctttccatgttgctgagaggaacctggacatggtcccgggcatctgaatgatctgtaggggagggagttcaaataaagctttattttgttcattttctc

SEQ ID NO: 27931 - protein, 606 aa, Homo sapiens
MLKTFLFLEKYFPCIKYSSACFPGTGLDVYDIKFAVLLHPQTALHFGPPPSLMAFSSLCCRELLETTCRLANTLKRHGVHRGDRVAIYMPVSPLAVAAMLACARIGAVHTVIFAGFSAESLAGRINDAKCKVVITFNQGLRGGRVVELKKIVDEAVKHCPTVQHVLVAHRTDNKVHMGDLDVPLEQEMAKEDPVCAPESMGSEDMLFMLYTSGSTGMPKGIVHTQAGYLLYAALTHKLVFDHQPGDIFGCVADIGWITGHSYVVYGPLCNGATSVLFESTPVYPNAGRYWETVERLKINQFYGAPTAVRLLLKYGDAWVKKYDRSSLRTLGSVGEPINCEAWEWLHRVVGDSRCTLVDTWWQTETGGICIAPRPSEEGAEILPAMAMRPFFGIVPVLMDEKGSVVEGSNVSGALCISQAWPGMARTIYGDHQRFVDAYFKAYPGYYFTGDGAYRTEGGYYQITGRMDDVINISGHRLGTAEIEDAIADHPAVPESAVIGYPHDIKGEAAFAFIVVKDSAGDSDVVVQELKSMVATKIAKYAVPDEILVVKRLPKTRSGKVMRRLLRKIITSEAQELGDTTTLEDPSIIAEILSVYQKCKDKQAAAK

SEQ ID NO: 27932 - DNA, 2850 bp, Homo sapiens
tgcaccagcccccttaacgttggtgccggctccctcccggctcctccccatcccagagggtcccctcgccccaggccctgagcctgcgtcctggggtcctgggccgcacgtgcctctggcagctcgaagaagctgtcggggcttgcaggagagcgtgcaaactgaaaccaaaacaggccgactcgaggaacatccgggtgggaccgcagactcaccggagcgcagcgcctgggccagggcctgggaccctgctccgccccgcgctcccctgcaccccttccccacgctgctcccctcttcctaagcggccccccctctcccgggcagcagaagaaggggtgggacccgggcgggctccgggagggggccctggaggaatggatggtggcggaagggcggagcaggggcggggcccgcggagactccacggggcgccccgggcgtgaggcacccactctgggagcacagagagctcaggtagcctgcctagatggcggcgcgcaccctgggccgcggcgtcgggaggctgctgggcagcctgcgagggctctcggggcagcccgcgcggccgccgtgcggggtgagcgcgccgcgcagggcggcctcgggaccctcgggcagcgctcccgcagttgcagcagcagcagcacagccaggctcgtatcccgcgctgagtgcacaggcagcccgggagccggccgccttctgggggcctctggcgcgggacactctcgtgtgggacaccccctaccacaccgtctgggactgcgacttcagcactggcaagatcggctggttcctgggaggccagttaaatgtctctgtcaactgcttggaccagcatgttcggaagtcccccgagagcgttgctttgatctgggagcgcgatgagcctggaacggaagtgaggatcacctacagggaactactggagaccacgtgccgcctggccaacacgctgaagaggcatggagtccaccgtggggaccgtgttgccatctacatgcccgtgtccccattggctgtggcagcaatgctggcctgtgccaggatcggagctgtccacacagtcatctttgctggcttcagtgcagagtccttggctgggaggatcaatgatgccaagtgcaaggtggttatcaccttcaaccaaggactccggggtgggcgcgtggtggagctgaagaaaatagtggatgaggctgtgaagcactgccccaccgtgcagcatgtcctggtggctcacaggacagacaacaaggtccacatgggggatctggacgtcccgctggagcaggaaatggccaaggaggaccctgtttgcgccccagagagcatgggcagtgaggacatgctcttcatgctgtacacctcagggagcaccggaatgcccaagggcatcgtccatacccaggcaggctacctgctctatgccgccctgactcacaagcttgtgtttgaccaccagccaggtgacatctttggctgtgtggccgacatcggttggattacaggacacagctacgtggtgtatgggcctctctgcaatggtgccaccagcgtcctttttgagagcaccccagtttatcccaatgctggtcggtactgggagacagtagagaggttgaagatcaatcagttctatggcgccccaacggctgtccggctgttgctgaaatacggtgatgcctgggtgaagaagtatgatcgctcctccctgcggaccctggggtcagtgggagagcccatcaactgtgaggcctgggagtggcttcacagggtggtgggggacagcaggtgcacgctggtggacacctggtggcagacagaaacaggtggcatctgcatcgcaccacggccctcggaagaaggggcggaaatcctccctgccatggcgatgaggcccttctttggcatcgtccccgtcctcatggatgagaagggcagcgtcgtggagggcagcaacgtctccggggccctgtgcatctcccaggcctggccgggcatggccaggaccatctatggcgaccaccagcgatttgtggacgcctacttcaaggcctacccaggctattacttcactggagacggggcttaccgaactgagggcggctattaccagatcacagggcggatggatgatgtcatcaacatcaactccaaatagttgggttcttcagggaagctattagaaactcaggtgacttgttagagcactaacttggtcagagccaaatcctggcaaacgctgcctgaccttcactctgtggttggggcggtgagaaccactgaggtccaatgatgagacttggaggtctggatccagtctctctttgttttaatgtgacttaggtgctgtcaacattagcaagataatggaaatcacgacgccagtgggtgcttacctccctgctaggcatgcaggggctggcggttggcaggggaaggaggcccagtgagccgggtcccttaggggagggagagtttgtcctctttgccccacagtctacccttcagggccttgtggcagtgccagtgttcggggggtgtctgggccactgagtacccactcggtcgtggttgtgctggcctcttgggtgagtgaacctgtgaagcccaggaggtggtgttggctgcagggtacacaaatactgagtggtggtcttttgttacaggcttagcaacaaagctgtgccctgggcatggggggctgtagtgtagctacagttgtgcgtttgtgaaatggcttagctttccatgttgctgagaggaacctggacatggtcccgggcatctgaatgatctgtaggggagggagttcaaataaagctttattttgttcattttctc

SEQ ID NO: 27933 - protein, 558 aa, Homo sapiens
MAARTLGRGVGRLLGSLRGLSGQPARPPCGVSAPRRAASGPSGSAPAVAAAAAQPGSYPALSAQAAREPAAFWGPLARDTLVWDTPYHTVWDCDFSTGKIGWFLGGQLNVSVNCLDQHVRKSPESVALIWERDEPGTEVRITYRELLETTCRLANTLKRHGVHRGDRVAIYMPVSPLAVAAMLACARIGAVHTVIFAGFSAESLAGRINDAKCKVVITFNQGLRGGRVVELKKIVDEAVKHCPTVQHVLVAHRTDNKVHMGDLDVPLEQEMAKEDPVCAPESMGSEDMLFMLYTSGSTGMPKGIVHTQAGYLLYAALTHKLVFDHQPGDIFGCVADIGWITGHSYVVYGPLCNGATSVLFESTPVYPNAGRYWETVERLKINQFYGAPTAVRLLLKYGDAWVKKYDRSSLRTLGSVGEPINCEAWEWLHRVVGDSRCTLVDTWWQTETGGICIAPRPSEEGAEILPAMAMRPFFGIVPVLMDEKGSVVEGSNVSGALCISQAWPGMARTIYGDHQRFVDAYFKAYPGYYFTGDGAYRTEGGYYQITGRMDDVININSK

SEQ ID NO: 27934 - DNA, 4482 bp, Homo sapiens
ccaaaaggaaaacgaggcaccgagaagttaaggaacttgctcaaggtcacagagtttgaactcaggctacagatgctgcagcaactggagaaagtcctcatcgccccatatcacccaccaccgacccccagcaggacgtgacccccgccaggacggaggccggcagctggggggctggagcatgggacccagaacacggactcaggcttgcgcagcctcctggcttctaggcgggagcctagaaaggcgccagcccctttcgcgtgctgctgagactccaggggtggggttcactctcaggggcgcacaaaggcatgaaaaccttggcttcagcctctgagatgcggaactgaccgacctattgtcttgggacccaccagtgcgcttgggtgcaccagcccccttaacgttggtgccggctccctcccggctcctccccatcccagagggtcccctcgccccaggccctgagcctgcgtcctggggtcctgggccgcacgtgcctctggcagctcgaagaagctgtcggggcttgcaggagagcgtgcaaactgaaaccaaaacaggccgactcgaggaacatccgggtgggaccgcagactcaccggagcgcagcgcctgggccagggcctgggaccctgctccgccccgcgctcccctgcaccccttccccacgctgctcccctcttcctaagcggccccccctctcccgggcagcagaagaaggggtgggacccgggcgggctccgggagggggccctggaggaatggatggtggcggaagggcggagcaggggcggggcccgcggagactccacggggcgccccgggcgtgaggcacccactctgggagcacagagagctcaggtagcctgcctagatggcggcgcgcaccctgggccgcggcgtcgggaggctgctgggcagcctgcgagggctctcggggcagcccgcgcggccgccgtgcggggtgagcgcgccgcgcagggcggcctcgggaccctcgggcagcgctcccgcagttgcagcagcagcagcacagccaggctcgtatcccgcgctgagtgcacaggcagcccgggagccggccgccttctgggggcctctggcgcgggacactctcgtgtgggacaccccctaccacaccgtctgggactgcgacttcagcactggcaagatcggctggttcctgggaggccagttaaatgtctctgtcaactgcttggaccagcatgttcggaagtcccccgagagcgttgctttgatctgggagcgcgatgagcctggaacggaagtgaggatcacctacagggaactactggagaccacgtgccgcctggccaacacgctgaagaggcatggagtccaccgtggggaccgtgttgccatctacatgcccgtgtccccattggctgtggcagcaatgctggcctgtgccaggatcggagctgtccacacagtcatctttgctggcttcagtgcagagtccttggctgggaggatcaatgatgccaagtgcaaggtggttatcaccttcaaccaaggactccggggtgggcgcgtggtggagctgaagaaaatagtggatgaggctgtgaagcactgccccaccgtgcagcatgtcctggtggctcacaggacagacaacaaggtccacatgggggatctggacgtcccgctggagcaggaaatggccaaggaggaccctgtttgcgccccagagagcatgggcagtgaggacatgctcttcatgctgtacacctcagggagcaccggaatgcccaagggcatcgtccatacccaggcaggctacctgctctatgccgccctgactcacaagcttgtgtttgaccaccagccaggtgacatctttggctgtgtggccgacatcggttggattacaggacacagctacgtggtgtatgggcctctctgcaatggtgccaccagcgtcctttttgagagcaccccagtttatcccaatgctggtcggtactgggagacagtagagaggttgaagatcaatcagttctatggcgccccaacggctgtccggctgttgctgaaatacggtgatgcctgggtgaagaagtatgatcgctcctccctgcggaccctggggtcagtgggagagcccatcaactgtgaggcctgggagtggcttcacagggtggtgggggacagcaggtgcacgctggtggacacctggtggcagacagaaacaggtggcatctgcatcgcaccacggccctcggaagaaggggcggaaatcctccctgccatggcgatgaggcccttctttggcatcgtccccgtcctcatggatgagaagggcagcgtcgtggagggcagcaacgtctccggggccctgtgcatctcccaggcctggccgggcatggccaggaccatctatggcgaccaccagcgatttgtggacgcctacttcaaggcctacccaggctattacttcactggagacggggcttaccgaactgagggcggctattaccagatcacagggcggatggatgatgtcatcaacatcagtggccaccggctggggaccgcagagattgaggacgccatcgccgaccaccctgcagtaccagaaagtgctgtcattggctacccccacgacatcaaaggagaagctgcctttgccttcattgtggtgaaagatagtgcgggtgactcagatgtggtggtgcaggagctcaagtccatggtggccaccaagatcgccaaatatgctgtgcctgatgagatcctggtggtgaaacgtcttccaaaaaccaggtctgggaaggtcatgcggcggctcctgaggaagatcatcactagtgaggcccaggagctgggagacactaccaccttggaggaccccagcatcatcgcagagatcctgagtgtctaccagaagtgcaaggacaagcaggctgctgctaagtgagctggcaccttgtggggctcttgggatgggcgggcacccaagccctggcttgtccttcccagaaggtacccctgaggttggcgtcttcctacgtcccagaagcagcccccaccccacacatgacccacaccgccctcacgtgaagctgggctgagagccctttctcccatccattggaggtcccaggagtgtcacccatggagaggctatgcgacatggctagggctggttctgccatctgagtttggtttcctggaatgaaaaggcattgccatctccattcctctgccctcttgagccagcacaggaaggtgaggccctgggatagcgcgcctgctcagataacacagagctagttagctagtagcaaccgtgttttctccagatctgtctagatacaaaggtcagaaatcttatttttatacttttatattgtggaagaacagcatgcaacactcacatgtagtgtgtggatttacttgaacatgttctttttaacatgtagttatgaaaatctccttttttgcctctactggtgaggaaacatgaggatcagaggccacatttttaattattgttagtgtatttggaagtctgaattggagatgtttgtacctctgtctaaacagttcccttgagaacttccaagcctccggcatcttttcctggtgagtgtttctcctgtgcttggttgtgtataatggagctaactcctaagcggtggggtgaatgtggccgccttagttctgaagctactccagttatgttctgtttcttcaagctgtgatccagaaagatttttgtgcccccagatgcctcttgataggagaggcaacatactccaaatagttgggttcttcagggaagctattagaaactcaggtgacttgttagagcactaacttggtcagagccaaatcctggcaaacgctgcctgaccttcactctgtggttggggcggtgagaaccactgaggtccaatgatgagacttggaggtctggatccagtctctctttgttttaatgtgacttaggtgctgtcaacattagcaagataatggaaatcacgacgccagtgggtgcttacctccctgctaggcatgcaggggctggcggttggcaggggaaggaggcccagtgagccgggtcccttaggggagggagagtttgtcctctttgccccacagtctacccttcagggccttgtggcagtgccagtgttcggggggtgtctgggccactgagtacccactcggtcgtggttgtgctggcctcttgggtgagtgaacctgtgaagcccaggaggtggtgttggctgcagggtacacaaatactgagtggtggtcttttgttacaggcttagcaacaaagctgtgccctgggcatggggggctgtagtgtagctacagttgtgcgtttgtgaaatggcttagctttccatgttgctgagaggaacctggacatggtcccgggcatctgaatgatctgtaggggagggagttcaaataaagctttattttgttcattttctc

SEQ ID NO: 27935 - protein, 689 aa, Homo sapiens [sequence omitted]

SEQ ID NO: 27936 - DNA, 1278 bp, Homo sapiens
cccaggagtgtcacccatggagaggctatgcgacatggctagggctggttctgccatctgagtttggtttcctggaatgaaaaggcattgccatctccattcctctgccctcttgagccagcacaggaaggtgaggccctgggatagcgcgcctgctcagataacacagagctagttagctagtagcaaccgtgttttctccagatctgtctagatacaaaggtcagaaatcttatttttatacttttatattgtggaagaacagcatgcaacactcacatgtagtgtgtggatttacttgaacatgttctttttaacatgtagttatgaaaatctccttttttgcctctactggtgaggaaacatgaggatcagaggccacatttttaattattgttagtgtatttggaagtctgaattggagatgtttgtacctctgtctaaacagttcccttgagaacttccaagcctccggcatcttttcctggtgagtgtttctcctgtgcttggttgtgtataatggagctaactcctaagcggtggggtgaatgtggccgccttagttctgaagctactccagttatgttctgtttcttcaagctgtgatccagaaagatttttgtgcccccagatgcctcttgataggagaggcaacatactccaaatagttgggttcttcagggaagctattagaaactcaggtgacttgttagagcactaacttggtcagagccaaatcctggcaaacgctgcctgaccttcactctgtggttggggcggtgagaaccactgaggtccaatgatgagacttggaggtctggatccagtctctctttgttttaatgtgacttaggtgctgtcaacattagcaagataatggaaatcacgacgccagtgggtgcttacctccctgctaggcatgcaggggctggcggttggcaggggaaggaggcccagtgagccgggtcccttaggggagggagagtttgtcctctttgccccacagtctacccttcagggccttgtggcagtgccagtgttcggggggtgtctgggccactgagtacccactcggtcgtggttgtgctggcctcttgggtgagtgaacctgtgaagcccaggaggtggtgttggctgcagggtacacaaatactgagtggtggtcttttgttacaggttagctttccatgttgctgagaggaacctggacatggtcccgggcatctgaatgatctgtaggggagggagttcaaataaagctttattttgttcattttc

SEQ ID NO: 27937 - protein, 47 aa, Homo sapiens
MQGLAVGRGRRPSEPGPLGEGEFVLFAPQSTLQGLVAVPVFGGCLGH

SEQ ID NO: 27938 - DNA, 1107 bp, Homo sapiens
tgtttgagcatgctccatgttagcttttcaaacactaagacaaaatttttctcttaagtagttctcacctctgatgtaagacaaaacctgccaagtcccaggccagagaatggagatgaggcacccagtgggtgcttggatctgctgccacctgggtgcctgcacgtggcacagtggcaggacagacggacggcagtacggggtgaacccggcctgggtggaccctgcctggcggagagcatcggggtggatttcagcttaggtccagacagtaggaggataaagccaagacctcgggcctcaccgttctctggggtggaggcttagacatccactgtggatccccgggagggcatcccccctgagcagagcccttctgatcttaatgcagtccacgctagcacagaggctgggcaccatccacgctctaacactgtgcctgttccttgccaggtggtgaaacgtcttccaaaaaccaggtctgggaaggtcatgcggcggctcctgaggaagatcatcactagtgaggcccaggagctgggagacactaccaccttggaggaccccagcatcatcgcagagatcctgagtgtctaccagaagtgcaaggacaagcaggctgctgctaagtgagctggcaccttgtggggctcttgggatgggcgggcacccaagccctggcttgtccttcccagaaggtacccctgaggttggcgtcttcctacgtcccagaagcagcccccaccccacacatgacccacacctctacccttcagggccttgtggcagtgccagtgttcggggggtgtctgggccactgagtacccactcggtcgtggttgtgctggcctcttgggtgagtgaacctgtgaagcccaggaggtggtgttggctgcagggtacacaaatactgagtggtggtcttttgttacaggcttagcaacaaagctgtgccctgggcatggggggctgtagtgtagctacagttgtgcgtttgtgaaatggcttagctttccatgttgctgagaggaacctggacatggtcccgggcatctgaatgatctgtaggggagggagttcaaataaagctttattttgttcattttc

SEQ ID NO: 27939 - protein, 93 aa, Homo sapiens [sequence omitted]

SEQ ID NO: 27940 - DNA, 5137 bp, Homo sapiens
catggagtctcactctgttgtccaggttagagtgcagtggtgtgatctcagatcactgcaacctttgcctcctgggttcaagtgactctcctgtctcagctttctgagtagctgggattacaggcacctgccaccacaccctgctaatttttttttgtatttttagtagagacagggttttgccatgttggtcaggctggtcttgaacttctgacctcaagtgatctgcccgccttggcctctccaagtgctggaattacaggtgtgagccaccgtgtccggcctaaaatattgttgatatgtgttttaagtctttttaagcctatgctcccccatttccttacacttggccatagtcacatccagccatttttctctggtgtcctttggtctgggttgtgcctgttgtccctctgcctctgtgtttcctgcacgtgggcagttagatcctgagatgggatcaggctccactcagttgctgtggaagaataaaggggattcggatgtctgtcctctcatgctcctcgaagctgatgatgcttgatgccattcttggccttttttgcttttattttttgtagttcttaaggggtttaaaaaatcgtggcataaggtaatgcaaaaaggtgtccatgtgttaaacgtacaactagacggactctgcagtgtgcccacctgtcctgctgctggaggccatttgaggagccagctgcctctcacagctatggactgcagcctatgcatgcctatttcctagtgacctggtgtgaacatggtggagtggggggacaagctcctgatgctcctttcctgtctctgcagcttgtgtttgaccaccagccaggtgacatctttggctgtgtggccgacatcggttggattacaggacacagctacgtggtgtatgggcctctctgcaatggtgccaccagcgtcctttttgagagcaccccagtttatcccaatgctggtaaggatggtgaaccctgtttgggaccccatgctggtgtcaggggagagagcctgaggctcgaggcttgtggagaggttcatggaagggggacgcctgggttctggtgagggtgtggctctccaggtcctgctgtcgaaatgcccggtggggccaggccccaggtcttcagaaagatctgacaggcagcagcagggagtctgacttggtgctggaggacatctcaaggcccctgctcctgcactcctgccctctgacttaaactgccggcctcaggccatcgctttggcatccttctcacctctaggctgcttgcccagatccagccctttctcaaagccagggccagctgcccgccacttctgtgtccccagccctgcccctgagccttcagggctgtccctcaaaccatgttaggcatggcctagaaccatctccattaaattgagatcactttgaagacaaggtgatgactggctcccttgggcatcgtcctcccacacagcacagtgtcttcaaatattttctttaatgtaagcagatcatggtggctctgcccaaaggctgctgctccagtgttccatggcactgacaactgtgcatggactgtgttatcacctcccagtgctccatccctgcctttgggggctgggtgtgctcaaggaagaagttgtaggggcaagaccagggattaagggccatggcccaggtgctgtctcaggccaccacttcagcccttagaagctcagtgttccatgtggaggggatggtgtgggtagtgggtttacaggaaccaggggtgtgcatgccgggcacatggccctgctccctgggacacacgcagtggcagctgtactgtcaccaggggaagcaccagtcaccactttagagcccatgtgagtgtgatcgagtgaaagctctgtgttaatgctccatgggttattaaatccacgtagtatcaccttgaactaggccatcaccctaagcctggtgaagactgttcctgaatgtgccgcccatggatctggggagtgcttggaggagagcggccattggggacctgtcccatggggcttctttccatctttcactggcgggggtggggggttggggggatccctttcatatggacatatgcgcgtctgcacatgcccagcactcaggaagtcttggctgatctctgagtttaaagtaaaccatgtcagctctcctgctgacagtgaatttcggcctttctgtaggtcggtactgggagacagtagagaggttgaagatcaatcagttctatggcgccccaacggctgtccggctgttgctgaaatacggtgatgcctgggtgaagaagtatgatcgctcctccctgcggaccctggggtcaggtgagcggcctgccctgcagcaggagaggttgtgcttgccctagaccctcagagccaatacgggcttcagcaggacttcagtcatgaagctgcccggctttgtatgtgtgaattcacgcaatgccagaccggatctggtagaaagcaccagcacctcttcccacctgtaagctcctccccagagctggcagcagttacctgtctggggaacaacgttccagacattttctgtgccgttgtttctgtgcccaatttctgtagcttaatcttcattaggaatacttacccactcaataagttaagggtcaggtcagttctttagtggctgcatgggatttaactgtataacttagctgggtgtggtggcaaaggctgaggtgggaggattgcttgagcccaggagtttcaggctgcagtgaactaggattgcaccactgcgctccagcctggtgacagagtgagactcagtcgtctaaataatagtaataatagtataactacagtttgctaaacactgccccatagttggaccttttgattgtctccaagtctgtggagtggataccatcctgcacttttgccctgctgttactgtagacatttccaggcagacagttcaaagcttaggcctattggtaatgttgatggatattgccaaatcacatggaaacattttggaaatgtgatggtggcatggtttcgacagtatcagcagtgtctgtctttcgggctggtgctgggagggactgggtgctggtgactgctgttctctctcctgtccctgccacatttcatgtctgccttgacgtgtggtcacgcgtggtcagccacctgcttggtggcttttcactggggaagcatgcagggcagtgaccatggaagagtgtcccattctgccacatacatccttgggaagggagcatgtacctcccagtgaacatgtgattccactactactgggtgaccatgaggccatgcgggcatccgggccacaggctgagaggcacagcagctggggctgtgccctgcagagctcaccacttgttcccaaatgtgagatggggatgagacctacctacagggtggcgaggatgccacagagggtcagatgtgagccttagtataatgttcagcatggagatgattaatggagagagctcctgaggaatagcaggcatccaatgactcctcctcctcttttcccttattttccccattaacagtaaaaaccttctgtttctcaaccagctttctagattaaaaagcaggaggagtttgaatactattaataagagcaaatatgtattaaatgcctttatcttcacatcagtcctttgagcaaacagcagatgttgtttcacattacagagaaggaagaggaggcacagagaggtcagagaaccggcctgaggtcactcagcaagtagggcagcctgtgttgaacgcagcacttggttctagagtctgtaaaactcactctgccccccacctgattgatgggctctgtgcccccaccctgtaccctcaacaggtcccttgccatactgtcccctccacctctcagaaagagtatggggttcctttctagatggtgaatcttagtttgctttgtgctgctgtaatagaataccctgaaactgggtgatttataatgaaatttcagcgtgagatttggaggggacaaacattcaaaccataataagtggtgagtttgggtggtctctcttggcatgctggagctgggcttgagaggcccgtgtgattctgactgcctgggccatgtagtgcttgtggactgggaacaaacagcggggtggccagggccatagaaactcgcccagatcctctaggtgttgtcagcagggccacctgagtgggccctaggcattaggtggggacagggctgaagggcaagatttggttttccagatacactcatgggatttgtctcctgaaggaaggttcacggggtccaatgacaaggggtaccgccctaagtgcatttcaggaaggggtgtgctctggcagctgcattagagtgggatgtgtatcccagcagcctctgcctcacctaggggtccccacagacttggaacacctctgagccagggggccagcccccagcagaggctcagctgggttttgtgtatttagctggttgataggcacattcctattcctgttgcataaccggttctagccgcagagccctgcgggaggccaggtgctaatcacacacctcgctgttctgttctcggtatacagtgttggcaggcagcgtggcgtcttgtgatgtcttgcacctggggctcccagcacctcggagcagtgctgggagtcagtgtgttccacaccttggccagggccagcgctgtgctggcacacctgtcggtgcaattccacagcccagacccattccaggcagctgggatcagccctcatgacatttaatccgttgagtcgtcagaatcccactcactcaagacattccccctagatttgtatttctcaaagcttttttaaactttcaatttcataagtaatacatggatacactcttgtgaaaagaagaaattggagcattgtacttaaagctgatgtccttaggagctgggcgtggtggtacgtgcctgtagtccctcggctacttgggaggctgagatgggaggatccttgagccccagaagtcgaggttgcagtgagccatgatcatgccactgcactccagtccaggcaacagagcaagatccttgtctctctctctcaaaaaaaaagaaaaaaaaaaaaa

SEQ ID NO: 27941 - protein, 113 aa, Homo sapiens [sequence omitted]

SEQ ID NO: 27942 - DNA, 2240 bp, Homo sapiens
ccaaaaggaaaacgaggcaccgagaagttaaggaacttgctcaaggtcacagagtttgaactcaggctacagatgctgcagcaactggagaaagtcctcatcgccccatatcacccaccaccgacccccagcaggacgtgacccccgccaggacggaggccggcagctggggggctggagcatgggacccagaacacggactcaggcttgcgcagcctcctggcttctaggcgggagcctagaaaggcgccagcccctttcgcgtgctgctgagactccaggggtggggttcactctcaggggcgcacaaaggcatgaaaaccttggcttcagcctctgagatgcggaactgaccgacctattgtcttgggacccaccagtgcgcttgggtgcaccagcccccttaacgttggtgccggctccctcccggctcctccccatcccagagggtcccctcgccccaggccctgagcctgcgtcctggggtcctgggccgcacgtgcctctggcagctcgaagaagctgtcggggcttgcaggagagcgtgcaaactgaaaccaaaacaggccgactcgaggaacatccgggtgggaccgcagactcaccggagcgcagcgcctgggccagggcctgggaccctgctccgccccgcgctcccctgcaccccttccccacgctgctcccctcttcctaagcggccccccctctcccgggcagcagaagaaggggtgggacccgggcgggctccgggagggggccctggaggaatggatggtggcggaagggcggagcaggggcggggcccgcggagactccacggggcgccccgggcgtgaggcacccactctgggagcacagagagctcaggtagcctgcctagatggcggcgcgcaccctgggccgcggcgtcgggaggctgctgggcagcctgcgagggctctcggggcagcccgcgcggccgccgtgcggggtgagcgcgccgcgcagggcggcctcgggaccctcgggcagcgctcccgcagttgcagcagcagcagcacagccaggctcgtatcccgcgctgagtgcacaggcagcccgggagccggccgccttctgggggcctctggcgcgggacactctcgtgtgggacaccccctaccacaccgtctgggactgcgacttcagcactggcaagatcggctggttcctgggaggccagttaaatgtctctgtcaactgcttggaccagcatgttcggaagtcccccgagagcgttgctttgatctgggagcgcgatgagcctggaacggaagtgaggatcacctacagtccctggttgcagatgccgtgtggcccataggccagcagcattcttctgccctggatcctcgggccccactggacaactgagcggccccccaggtggcccctgcacactggagtgtgcttggctctgaagacccaagctgctgcagctgcccctcgccacggtgggcccagctccatctgcctgcgaacaaagccccttctgagaaggaacttgaggctgctgcccctggagtagttcttcagtaaaagatgaaaaccctctgttgggggtcgggggctaaggagctaactggacacctggaggtccggcagggagggcccagccatggcactccccgaagggccagtttctctccatcagtctctcaggtgtgcctggaccctggggcaggcaggttgtgtgccacgccccctcggctggacgctgcccgtgggagcactgagtgtgtgctaagtagcggttcggtctgtgagcggggctggagccctgtggagacgtgtggttaaacataaaccatgtgagaattctcaggaccacagccagcctgtggaagctaaggacagcttcaggtccatgacactgaaatggccctggcaaagtacttattactctgtctctaaaaataaacaggggccggtcgcagtggctcatgccggtaatcccagcactttgggatggtgaggatcacttgaggacggtgggtggatcgcttgaggtcaggagtttgagaccaacctggccaacatggtgaaaccccgtctctactaaaaatacaaaaattagttgggtgtggtgatgtgcgcctgtagtcccagctacttgggaggctgaagcaggagaactgcttgaaactgggaggtggatgttgcagtgagccaagattgtgccactgcactccatcctgggtgacagagtcagactccatctc

SEQ ID NO: 27943 - protein, 169 aa, Homo sapiens
MVAEGRSRGGARGDSTGRPGREAPTLGAQRAQVACLDGGAHPGPRRREAAGQPARALGAARAAAVRGERAAQGGLGTLGQRSRSCSSSSTARLVSRAECTGSPGAGRLLGASGAGHSRVGHPLPHRLGLRLQHWQDRLVPGRPVKCLCQLLGPACSEVPRERCFDLGAR

SEQ ID NO: 27944 - DNA, 746 bp, Homo sapiens
atggccgagtacgggctgtacggggccatggtgcgccactgcatcccgctgccagactccgtgctcaactccgccgagggcggcctgctgggctcctgcgcgccctggctcctggagggtgagacattgggctgcagagaaatgaagtgaacctgctaagccgattgtcaaatggatgagaaactcagagccaaggatcgggaaaacacccttaaagaacgagtgcaaacttctgctcctggaggctcccgttcactggactttgcaggagacacacaggctccccagaccccgtggtggtgcctgatgaccttcagctgaaccctgtaatgctgctaaagtctgcccctctggagaagtgctcaggtagcattgttctgcctcaggaagcatgccgattttcctgtgtcatccttgatgatcactgctaccagacttgccccctgcagggcaccccatgtgcaaggaattcaacaacctaggagttgaaagcattggtctcccaagttcagtgtgttcttttccgtatctattaccagctgatgagaataaacctgcagtcatgacagctaggtcctagtgacaggtgcagaaagctgctcttacagaaactcccctccttattaagaggctttgtctatcactcggaactgcttctactcaagattatctgttgaaagggaactgtccataccagggcattgttctgacttttctggacttcctcaacccaaaatgccttgaag

SEQ ID NO: 27945 - protein, 49 aa, Homo sapiens
MAEYGLYGAMVRHCIPLPDSVLNSAEGGLLGSCAPWLLEGETLGCREMK

SEQ ID NO: 27946 - DNA, 2178 bp, Homo sapiens
cctagaatgggggtggggtggggtggggtgggctggacagaagagaggaggagaaggaggtgactgaggggactgcagctgggtgggcggtaaccgaggggaggggaactggtggcgtccccatctcgcggggtccggaacggcgacgcgcccgcgcccagctgattggagcccttcaggcctcccgcgcccgaccggcagcccaatcctataaagcttcctctaagctgggccctccgcaaacgggatccagagaggctcgcgccttgcttgctaaggaaccatgaccggccgggactcgctttccgacgggcgcactagcagcagggcgctggtgcctggcggttcccctaggggctcgcgcccccggggcttcgccatcacggacctgctgggcttggaggccgagctgccggcgcccgctggcccaggacagggatctggctgcgagggtccggcagtcgcgccgtgcccgggcccggggcttgacggctccagcctggcgcgtggggccctaccgctgggactcggcctcctctgtggcttcggcacgcagccgccggcggccgctcgagcaccctgcctgctcctagcggacgtgccgttcctgccgcccaggggccccgagcccgctgccccgctggctcccagccgtccgccgcctgcgctcggccgccagaagcgcagcgacagcgtctccacgtccgatgaggacagccagtctgaagacaggaatgacctaaaggcatcccccaccttgggcaagaggaagaagcggcggcacaggacagttttcactgctcaccagctggaagagttggagaaggcattcagcgaggcccactaccctgatgtgtatgcccgagaaatgctggctgtgaaaactgagctccccgaagaccggatacaggtctggtttcaaaaccgcagggccaaatggcgcaagcgggagaagcgctggggcggcagcagcgtgatggccgagtacgggctgtacggggccatggtgcgccactgcatcccgctgccagactccgtgctcaactccgccgagggcggcctgctgggctcctgcgcgccctggctcctggggatgcataaaaaatccatggggatgataaggaagccaggaagtgaagataagttggcaggactctggggctctgaccacttcaaagaaggttctagccagagtgagtcaggatcacagagaggctcagataaagtgagccctgagaatggcttggaagatgtggctattgacctctccagctctgcccggcaggagaccaagaaagtgcaccctggggctggtgctcaaggaggctccaactccacggcactggaggggccccagccagggaaggtgggagccacatgagacccacaggtcccactgtcaaaggctgaaaatgtgcatattcctcactggcattttccaaaagacaaaaattgtccaagacatatactctcagtttgattttcttctgacaatgtcaagataaaatgcaatgccacttgctttaagaggacagatgagtgacctagggaaaattctatttcattctagaatggaaacggttccttaatggcactttaaccagttaacttggtgcaaaacttttgattctcttttgtagcttgagcagggaggatccgaagttcaaaaatgatttcactgctgggcatcatttgagatgtgtggttcaatgtactgtatagatgaataggttaggtctgatgtcctcattctcaattaggaaatataaaattgtttaatatccagaagaatctgatatcatcatagtgaagactccatacagacacatgaatgaattatattgtctttaccttgaacttggccttggatatttcaattttcttgttagggagtaattttgtgttttcttgagtgtcacttgataggctatgcatattggaattcaaagaaacccatactctagtcgtttctgcatttcctttaaaaatagcatgggatcatatttaaacaattgttggatagctggaaacagtgtttttaggtcagaccaggcttttggtctttcaaaatttgtgattgaaagcactttagtgacttggattttgtaaatctttcctttcctgcgtttcctttgccatttatttattctttaaaaataaacattttgtggtgtgttt

SEQ ID NO: 27947 - protein, 365 aa, Homo sapiens; identical to SEQ ID NO: 3835

SEQ ID NO: 27948 - DNA, 943 bp, Homo sapiens; identical to SEQ ID NO: 3836

SEQ ID NO: 27949 - protein, 239 aa, Homo sapiens; identical to SEQ ID NO: 3837

SEQ ID NO: 27950 - DNA, 3141 bp, Homo sapiens
aggaaaagctcgaaaatcagcgtaacgctgttggagatgagagggcacagcacaattttgagagccaaacaaaggcggggcacagagctgttgcctcgagatgtgtggcctcagaaggtcttgtcgaggcgagtgatgaaagggaggaggttcccgaggatactggagccggaagacgcggcgagggtccgggttagcaaaccgggcagagtcagaggcccaggacgccgggccctgggggcgctgtcgcagggcggcggcggaggccggggtggtgggcgccccggggtggggggaggcgggagtgctctcccaggtgggcttggaggggccccggcccagacacccagggccagccggcgcacccgcatgatgttctgaaagcgtccccgcagcctggtcggtggctgggggaagctgggcgtggttagcctggcagcctggctttgcggactcacctccgggcctcgtcctccagtgccttccctccccaactgaggggcttggctgcacccgcacgcggttttccaggaacagcgatcccggagtggactctcccgcatccagggggacgtcagcactctcggcttccccatggggacacactcactgaggtcacgcgacccaaaaccaaatgacccaccaccacgacagccgcatcgtttttagtggtttgtccgggaggttttagagtgagagaatgaagggggtgaggcctgagggagggaggcgcatggaagccgccgcatctgactgtcccagggtgtgcccaggcccagagatgatgtccagacccctgaagggagtgaagcggaggccctgctggaggcaaaggattcaaggagattcaaaacccgtgtcactgctgccatcttcctagaatccctttaaatcctcatggatttgctgacattgggagcatcctgaaagagtccccatgctagggtggctgcagtaacaggttctccccactccagaaaaaatcaaatcagattgtgaatttattccctgacattaacacacggcattacaggagcatgtacatcacatggtcaatttattggcatgaggattatgtcatcggggaataaatgggaaattctcaaggtggcccaggcctgtaggcttccagtgagaaaactggagaccacactcacccgtcccactgccgtttctttggggctgcctgtgatactgggttattccccttgccgagttccactgtgcttaccctgttggaatatgatggtggacttgccagaggagatgaccatgattttcaggaacagcagcccctccttcctggttgaggcagccagcaggcactcctatccatgagccacagctcagctaaggcaatccagtccagctgcatgccctctctctgcttctggggaggtaggaaggaccaggggcattcatgcttgtttctagggggccctaactggatctctggatcaagacctactcaggggagaaagactactctgggttccatgttaggactgacgggtgcatcttaactgagatgcagacagtggacaattcgaactctgacctgagagcaagccccagccttggtgctcataaatgctccgcttggtccttcacatttgtgttccacacaggagaagccaagttgtgagcagtgcaccttcacaagcaaagcctcgactgaaatcttctctaacaattggctggtcactcctgagcgtaatctaccccttcagaacactggggatgaatttagagacatcgaagcctcctgatgagaaatacgtgtccactcaccgggagaactgaaataccaggagatttctacacaaatctcacagagtccttctggcgtcctaggggtttgctcacatataagggactttctggtaggaagagagtctctttacattctttattatatgatcctggtggctttgtagagagatggtacagctgacagatcatgtcctgtggggccagggagttgtgtgtgtgtgaatgctctgtgaacttgggcaaactacttagcctctctgagccttagctgcatcagctttgaaaaacaggatgataaaatggagtcaccttatttgacttttataaatacacttacacaattacacaagttgtggggatgggaagagagagttggggaaagagaaatgagagagagagagagagagaatgaatgataaacaatttaaacaacagtggggtgtagaccaacgcccagcctggcaagggtgagcccagagagccttccctcctggctattggcagcctccgcatggaagcctgtcgttgacttcttaatgatgagagatgttctgggggcactccaggattcttggacatgggatcgtcttcacagctgtgtctattgaaagctgaagtttcagtctcccctgccccctgccccctggagtggcttcccaggggaaattcaagggcacctgtgactgcatggctgctttcctttcctttactcaatgccgtcctttggtgacagccgtgtctcatgccaggatacatgaggtgctctatagtagtatgttttccctcctgggaggtaattttatttaaatgtgaagtcaaaaggatcactaaatagaaccatgaggcaaccactctgggcacctgcctggtgatatccacaagagctgaccacaggtgccccctgtgcccagcaagtccttggctgggcagtcacacaacaggcatggggatgtgtggccaccaagccctccagggcagtgctatttgtaatagtcccaaatgggagagatggcaaacgcccgccaatggggcagcatggataaatggatgctgcacagcaacggcgatgagtgagccccagcacccgtgagctcaccagtgtaatattgggtggaagaagccaggaggaagggcattcacattctgtgattccagctacactatgtttaaatatgggcagagctaggctgtggtgctggaagccaggacagtgggatccttgcatgggggtgatggtgctggtaggttctggtaatttcctcttcttgatctgggtgtaaacattttgtgaaaattcaatgagctgtacatttatgactggtacatttatgactttgtatgaatattatactttcataaaactacttt

SEQ ID NO: 27951 - protein, 90 aa, Homo sapiens
MRIMSSGNKWEILKVAQACRLPVRKLETTLTRPTAVSLGLPVILGYSPCRVPLCLPCWNMMVDLPEEMTMIFRNSSPSFLVEAASRHSYP

SEQ ID NO: 27952 - DNA, 516 bp, Homo sapiens
gcttccgagatttgaaaaacggtggctaatgatgacaacagcaacagcactgagcacagaaaactccacaggcctgggctcggctcatcgcacagcctccatctctggatgccctgattcaaggagattcaaaacccgtgtcactgctgccatcttcctagaatccctttaaatcctcatggatttgctgacattgggagcatcctgaaagagtccccatgctagggtggctgcagtaacaggttctccccactccagaaaaaatcaaatcagattgtgaatttattccctgacattaacacacggcattacaggagcatgtacatcacatggtcaatttattggcatgaggattatgtcatcggggaataaatgggaaattctcaaggtactttgctccagtaatcaggactttatttatctctaagctaaaagaggggattgacttctttaatgatgatcagaaaatgcttttaggaagattcctttcctattaaacaatttcttaaagttgca

SEQ ID NO: 27953 - protein, 47 aa, Homo sapiens
MMTTATALSTENSTGLGSAHRTASISGCPDSRRFKTRVTAAIFLESL

SEQ ID NO: 27954 - DNA, 313 bp, Homo sapiens
ttttattcttccttagacaatatcttctgtttgggaaaataattttagtgttaaatttgcaataacatattgttttttaatgcatatgcccaacagtgatttttatatagacagttttcaatatttcattgtttctccgcataccccaactcattaagtcgttcccagtcttcctcctgggcatgcatatatgtcaacaccagttcattttcccatccagggtacacactgagccttgtgtttcaggaacctttgacctgaacttcttcagaaacttcattttatgtcatccaggtctgagttaattaaaggg

SEQ ID NO: 27955 - protein, 40 aa, Homo sapiens
MHICQHQFIFPSRVHTEPCVSGTFDLNFFRNFILCHPGLS

SEQ ID NO: 27956 - DNA, 2160 bp, Homo sapiens
actagccagccactctctccaaggcaaggggagggggacaaaaagcaattttgagatttgtacagtgcttgccaggtccttcaaaaatgactaccggccgcccatggctcttgcacagcgggtgggaggaagagtccttgtaatccacctctcccaaggaactcctgcgcgaggtttcagattccccgcctgcaggctatggctgacttccccgtatcctgtgtgacgtgggatgtgtggcttcgcgcagcttcccgatggatgatccaacagatgtcatcttgcactgtagtgatagtcttgttgggaccacatgaagtgcagctgtaaaacagcccagcacctcacgctcaggaagggtgtttctgaagactgataaagccccttcagtgaatggcgccagggcacagctgtccacgacaaagtgaggatggccagataagaatagctccagtctgcagctcccagcatgatccacgcagaagatgggtgatttctgcatttccaactgaggtcttagcaaatggcacaccaggagattatatcccgcacatggctcggtggatcccacgcctatggagtcttgctcactgctagtgcagcagtctgagatcaacctgtgaggcagcagcctagcaggggaaggggcgtctgccattgctgcagcttgacctccgctggtgatacccaggcaaacagggtctggcatggaccttcagcaaactccaaccgacctgcagctgagggacctgttagaaggaaaactaacaaacagaaaggaatagcatcaacatcaacagaaaggacatccacaccaaaaccccatctgtaggtcactaacatcaaagaccaaagagagataaaaccacaaaggtggggagaaaccagagcagaaaagctgaaaattctaaaaaccagagcacctcttctccttcaaaggatcgcagctcctcaccagcaatggaacaaagctggatggagaatgattttgatgagctgaaggcttcagaaggttggtaataacaaacttctctgagctaaaggaggaggatgtttgaaaccattacaaggaagctaaacaccttgaaaaaagattagacgaagggctaactagaataagcagtgtagagaagaccttaaatgacgtgatggagctgaaaaccatggcatgagaactatgtgttgcatgcacaagtttcaatagccaattcgatcaagtggaacaaagggtatcagtgattgatgatcaaattaatgaaataaagggtgaagagaagtttagagaaaaaagagtaaaaagaaatgaacaaagcctccaagaaatacaagactacgtgaaaagaccaaatctacatttgattggtatacctgaaagtgatggggagaatggaaccaagttggaaaacactcttcaggatattatccaggagaacttccccaacctagcaaggcaggtcaacattcaaattcaggaaatacagagaacaccacaaagatactccttgagaagagcagcctcaagacacataatcatcagattcaccaaggttgaaatgaaggaaaaaatgttaaggccagccagagagaaaggtcgggttacccacaaagggaagcccatcagattaacaggagatctctcagcagaaactctacaagccagaagagagtgggggccgatatttaacattcttaaagaaaagaattttcaacccagaatcacatatccagccaaactaagtttcataagtgaaggagaaataaaatcctttacagacaagcaaatgctgagagattttgtcaccaccaggcctaccttacaagagctcctgaaagaagcactaaacatggaaaggaacaaccagtaccagccactgcaaaatcatgccaaattgtaaagaccatcgatgctaggaagaaactatatcaactaacgggcaaaataaccagttaacatcataatgacaggatcaaattcacatataataatattaaccttaaaagtaaatgggctaaatgcgcgaattaaaagacacagactggcaaattggataaagagtcaagacccattagtgtgctgtattcaggagacccatctcatgtgcagagacacacataggctcaaaataaagggatggagggagatctaccaagcaaattgaa

SEQ ID NO: 27957 - protein, 67 aa, Homo sapiens
MAPGHSCPRQSEDGQIRIAPVCSSQHDPRRRWVISAFPTEVLANGTPGDYIPHMARWIPRLWSLAHC

SEQ ID NO: 27958 - DNA, 2708 bp, Homo sapiens
gtgacgccacgtgcatggggcggagcccaggccctagggaatcgtggggtcgtatcccgcgggtggaggccggggtggcgccggccggggcgggggagcccaaaagaccggctgccgcctgctccccggaaaagggcactcgtctccgtgggtgtggcggagcgcgcggtgcatgcagccgcagcacggtccttggcaaacaaggatgagaaaaatatccaaccacgggagcctgcgggtggcgaaggtggcataccccctggggctgtgtgtgggcgtgttcatctatgttgcctacatcaagtggcaccgggccaccgccacccaggccttcttcagcatcaccagggcagccccgggggcccggtggggtcagcaggcccacagccccctggggacagctgcagacgggcacgaggtcttctacgggatcatgtttgatgcaggaagcactggcacccgagtacacgtcttccagttcacccggccccccagagaaactcccacgttaacccacgaaaccttcaaagcactgaagccaggtctttctgcctatgctgatgatgttgaaaagagcgctcagggaatccgggaactactggatgttgctaaacaggacattccgttcgacttctggaaggccacccctctggtcctcaaggccacagctggcttacgcctgttacctggagaaaaggcccagaagttactgcagaaggtgaaaaaagtatttaaagcatcgcctttccttgtaggggatgactgtgtttccatcatgaacggaacagatgaaggcgtttcggcgtggatcaccatcaacttcctgacaggcagcttgaaaactccaggagggagcagcgtgggcatgctggacttgggcggaggatccactcagatcgccttcctgccacgcgtggagggcaccctgcaggcctccccacccggctacctgacggcactgcggatgtttaacaggacctacaagctctattcctacagctacctcgggctcgggctgatgtcggcacgcctggcgatcctgggcggcgtggaggggcagcctgctaaggatggaaaggagttggtcagcccttgcttgtctcccagtttcaaaggagagtgggaacacgcagaagtcacgtacagggtttcagggcagaaagcagcggcaagcctgcacgagctgtgtgctgccagagtgtcagaggtccttcaaaacagagtgcacaggacggaggaagtgaagcatgtggacttctatgctttctcctactattacgaccttgcagctggtgtgggcctcatagatgcggagaagggaggcagcctggtggtgggggacttcgagatcgcagccaagtacgtgtgtcggaccctggagacacagccgcagagcagccccttctcatgcatggacctcacctacgtcagcctgctactccaggagttcggctttcccaggagcaaagtgctgaagctcactcggaaaattgacaatgttgagaccagctgggctctgggggccatttttcattacatcgactccctgaacagacagaagagtccagcctcatagtggccgagccatccctgtccccgtcagcagtgtctgtgtgtctgcataaaccctcctgtcctggacgtgacttcatcctgaggagccacagcacaggccgtgctggcactttctgcacactggctctgggacttgcagaaggcctggtgctgccctggcatcagcctcttccagtcacatctggccagagggctgtctggacctgggccctgctcaatgccacctgtctgcctgggctccaagtgggcaggaccaggacagaaccacaggcacacactgagggggcagtgtggctccctgcctgtcccatccccatgccccgtccgcggggctgtggctgctgctgtgcatgtccctgcgatgggagtcttgtctcccagcctgtcagtttcctccccagggcagagctccccttcctgcaagagtctgggaggcggtgcaggctgtcctggctgctctggggaagccgagggacagccataacacccccgggacagtaggtctgggcggcaccactgggaactctggacttgagtgtgtttgcctcttccttgggtatgaatgtgtgagttcacccagaggcctgctctcctcacacattgtgtggtttggggttaatgatggagggagacacctcctcatagacggcaggtgcccacctttcagggagtctcccagcatgggcggatgccgggcatgagctgctgtaaactatttgtggctgtgctgcttgagtgacgtctctgtcgtgtgggtgccaagtgcttgtgtagaaactgtgttctgagcccccttttctggacaccaactgtgtcctgtgaatgtatcgctactgtgagctgttcccgcctagccagggccatgtcttaggtgcagctgtgccacgggtcagctgagccacagtcccagaaccaagctctcggtgtctcgggccaccatccgcccacctcgggctgaccccacctcctccatggacagtgtgagccccgggccgtgcatcctgctcagtgtggcgtcagtgtcggggctgagccccttgagctgcttcagtgaatgtacagtgcccggcacgagctgaacctcatgtgttccactcccaataaaaggttgacaggggcttctccttctctgg

SEQ ID NO: 27959 - protein, 467 aa, Homo sapiens
MQPQHGPWQTRMRKISNHGSLRVAKVAYPLGLCVGVFIYVAYIKWHRATATQAFFSITRAAPGARWGQQAHSPLGTAADGHEVFYGIMFDAGSTGTRVHVFQFTRPPRETPTLTHETFKALKPGLSAYADDVEKSAQGIRELLDVAKQDIPFDFWKATPLVLKATAGLRLLPGEKAQKLLQKVKKVFKASPFLVGDDCVSIMNGTDEGVSAWITINFLTGSLKTPGGSSVGMLDLGGGSTQIAFLPRVEGTLQASPPGYLTALRMFNRTYKLYSYSYLGLGLMSARLAILGGVEGQPAKDGKELVSPCLSPSFKGEWEHAEVTYRVSGQKAAASLHELCAARVSEVLQNRVHRTEEVKHVDFYAFSYYYDLAAGVGLIDAEKGGSLVVGDFEIAAKYVCRTLETQPQSSPFSCMDLTYVSLLLQEFGFPRSKVLKLTRKIDNVETSWALGAIFHYIDSLNRQKSPAS

SEQ ID NO: 27960 - DNA, 2767 bp, Homo sapiens
gtgcatggggcggagcccaggccctagggaatcgtggggtcgtatcccgcgggtggaggccggggtggcgccggccggggcgggggagcccaaaagaccggctgccgcctgctccccggaaaagggcactcgtctccgtgggtgtggcggagcgcgcggtgcatggaatgggctatgtgaatgaaaaaaggtatccgttatgaaacttccagaaaaacgagctacatttttcagcagccgcagcacggtccttggcaaacaaggatgagaaaaatatccaaccacgggagcctgcgggtggcgaaggtggcataccccctggggctgtgtgtgggcgtgttcatctatgttgcctacatcaagtggcaccgggccaccgccacccaggccttcttcagcatcaccagggcagccccgggggcccggtggggtcagcaggcccacagccccctggggacagctgcagacgggcacgaggtcttctacgggatcatgtttgatgcaggaagcactggcacccgagtacacgtcttccagttcacccggccccccagagaaactcccacgttaacccacgaaaccttcaaagcactgaagccaggtctttctgcctatgctgatgatgttgaaaagagcgctcagggaatccgggaactactggatgttgctaaacaggacattccgttcgacttctggaaggccacccctctggtcctcaaggccacagctggcttacgcctgttacctggagaaaaggcccagaagttactgcagaaggtgaaaaaagtatttaaagcatcgcctttccttgtaggggatgactgtgtttccatcatgaacggaacagatgaaggcgtttcggcgtggatcaccatcaacttcctgacaggcagcttgaaaactccaggagggagcagcgtgggcatgctggacttgggcggaggatccactcagatcgccttcctgccacgcgtggagggcaccctgcaggcctccccacccggctacctgacggcactgcggatgtttaacaggacctacaagctctattcctacagctacctcgggctcgggctgatgtcggcacgcctggcgatcctgggcggcgtggaggggcagcctgctaaggatggaaaggagttggtcagcccttgcttgtctcccagtttcaaaggagagtgggaacacgcagaagtcacgtacagggtttcagggcagaaagcagcggcaagcctgcacgagctgtgtgctgccagagtgtcagaggtccttcaaaacagagtgcacaggacggaggaagtgaagcatgtggacttctatgctttctcctactattacgaccttgcagctggtgtgggcctcatagatgcggagaagggaggcagcctggtggtgggggacttcgagatcgcagccaagtacgtgtgtcggaccctggagacacagccgcagagcagccccttctcatgcatggacctcacctacgtcagcctgctactccaggagttcggctttcccaggagcaaagtgctgaagctcactcggaaaattgacaatgttgagaccagctgggctctgggggccatttttcattacatcgactccctgaacagacagaagagtccagcctcatagtggccgagccatccctgtccccgtcagcagtgtctgtgtgtctgcataaaccctcctgtcctggacgtgacttcatcctgaggagccacagcacaggccgtgctggcactttctgcacactggctctgggacttgcagaaggcctggtgctgccctggcatcagcctcttccagtcacatctggccagagggctgtctggacctgggccctgctcaatgccacctgtctgcctgggctccaagtgggcaggaccaggacagaaccacaggcacacactgagggggcagtgtggctccctgcctgtcccatccccatgccccgtccgcggggctgtggctgctgctgtgcatgtccctgcgatgggagtcttgtctcccagcctgtcagtttcctccccagggcagagctccccttcctgcaagagtctgggaggcggtgcaggctgtcctggctgctctggggaagccgagggacagccataacacccccgggacagtaggtctgggcggcaccactgggaactctggacttgagtgtgtttgcctcttccttgggtatgaatgtgtgagttcacccagaggcctgctctcctcacacattgtgtggtttggggttaatgatggagggagacacctcctcatagacggcaggtgcccacctttcagggagtctcccagcatgggcggatgccgggcatgagctgctgtaaactatttgtggctgtgctgcttgagtgacgtctctgtcgtgtgggtgccaagtgcttgtgtagaaactgtgttctgagcccccttttctggacaccaactgtgtcctgtgaatgtatcgctactgtgagctgttcccgcctagccagggccatgtcttaggtgcagctgtgccacgggtcagctgagccacagtcccagaaccaagctctcggtgtctcgggccaccatccgcccacctcgggctgaccccacctcctccatggacagtgtgagccccgggccgtgcatcctgctcagtgtggcgtcagtgtcggggctgagccccttgagctgcttcagtgaatgtacagtgcccggcacgagctgaacctcatgtgttccactcccaataaaaggttgacaggggcttctccttctctgg

SEQ ID NO: 27961 - protein, 484 aa, Homo sapiens
MKKGIRYETSRKTSYIFQQPQHGPWQTRMRKISNHGSLRVAKVAYPLGLCVGVFIYVAYIKWHRATATQAFFSITRAAPGARWGQQAHSPLGTAADGHEVFYGIMFDAGSTGTRVHVFQFTRPPRETPTLTHETFKALKPGLSAYADDVEKSAQGIRELLDVAKQDIPFDFWKATPLVLKATAGLRLLPGEKAQKLLQKVKKVFKASPFLVGDDCVSIMNGTDEGVSAWITINFLTGSLKTPGGSSVGMLDLGGGSTQIAFLPRVEGTLQASPPGYLTALRMFNRTYKLYSYSYLGLGLMSARLAILGGVEGQPAKDGKELVSPCLSPSFKGEWEHAEVTYRVSGQKAAASLHELCAARVSEVLQNRVHRTEEVKHVDFYAFSYYYDLAAGVGLIDAEKGGSLVVGDFEIAAKYVCRTLETQPQSSPFSCMDLTYVSLLLQEFGFPRSKVLKLTRKIDNVETSWALGAIFHYIDSLNRQKSPAS

SEQ ID NO: 27962 - DNA, 3167 bp, Homo sapiens
gggaatcgtggggtcgtatcccgcgggtggaggccggggtggcgccggccggggcgggggagcccaaaagaccggctgccgcctgctccccggaaaagggcactcgtctccgtgggtgtggcggagcgcgcggtgcatgaaactcccacgttaacccacgaaaccttcaaagcactgaagccaggtctttctgcctatgctgatgatgttgaaaagagcgctcagggaatccgggaactactggatgttgctaaacaggacattccgttcgacttctggaaggccacccctctggtcctcaaggccacagctggcttacgcctgttacctggagaaaaggcccagaagttactgcagaaggtgaaaaaagtatttaaagcatcgcctttccttgtaggggatgactgtgtttccatcatgaacggaacagatgaaggcgtttcggcgtggatcaccatcctgctcgaggctatggagcccgctggccctgggcaggctctagtgctctgcacccttgcagtttcttctgagagaaatgttcaaacgccattcccagactgggcactcggcatgaggggtgcatgccttcgcgaaccgttcaggtccttccaagtcaatcacccactggtgcgtgtaccggggggccgcatcaggcacagcaggactgcacagctgtgtcccacaggaggagccagacagtgaagctcatcgggaaagccttccaagagaaataacacggggcggggatctgagagggcgatcgcagctgtaactaggacagccaaggacggcctcgtggggtaacatgggatctaagacaggaggaggtttcaagaaactgcgcagatctgaagcagcagcaccccaggccgcacaagcagcacacaccggggccctctgtcagctgctgtgtttaatgaacgaggaggaggtggtgtggcttggtgggggacaccaggaggaaatgagatcgaagggttggagcatgggtctgtggaccgtgggaaccctggaagcactcggaaggatggggcctggtggaggaggactgggaaagccgggaagctgggtcaaggtgtggggtgtagaggcgccctcagatgtccacacggtccattggcctccggggtcctctgttcctgttctccctcaagccatgggagcttggcaagtgagctgggcctccacttccttatctatgacatagggagggtgcaggccccctgaggaggtgggactccgggctggcggagggggaatgtagggcagatggtcccaacaggccagaggccactggtgtcaggcatcagcagcttcctcctcagagtccaggtctgccgctgccttcgtgcccacggtcttcactccctgcgccgggaccaacaatgccctggctcctgagggctgcttttgacctgtgcggggagcagccccaacttggggtggggtcttacaggcttctggacctgccttttcctgacaattcaggtcagagtctcaagtcccctgggaggggccccaagcagctgtgaggcctgggtgctcggagcccactgaccgctagccttgtgcttgtccccagcggcaagcctgcacgagctgtgtgctgccagagtgtcagaggtccttcaaaacagagtgcacaggacggaggaagtgaagcatgtggacttctatgctttctcctactattacgaccttgcagctggtgtgggcctcatagatgcggagaagggaggcagcctggtggtgggggacttcgagatcgcagccaagtacggtgggagtcacctggagcgtgaagggacgtgtctcatccccagtgtgtcggaccctggagacacagccgcagagcagccccttctcatgcatggacctcacctacgtcagcctgctactccaggagttcggctttcccaggagcaaagtgctgaagctcactcggaaaattgacaatgttgagaccagctgggctctgggggccatttttcattacatcgactccctgaacagacagaagagtccagcctcatagtggccgagccatccctgtccccgtcagcagtgtctgtgtgtctgcataaaccctcctgtcctggacgtgacttcatcctgaggagccacagcacaggccgtgctggcactttctgcacactggctctgggacttgcagaaggcctggtgctgccctggcatcagcctcttccagtcacatctggccagagggctgtctggacctgggccctgctcaatgccacctgtctgcctgggctccaagtgggcaggaccaggacagaaccacaggcacacactgagggggcagtgtggctccctgcctgtcccatccccatgccccgtccgcggggctgtggctgctgctgtgcatgtccctgcgatgggagtcttgtctcccagcctgtcagtttcctccccagggcagagctccccttcctgcaagagtctgggaggcggtgcaggctgtcctggctgctctggggaagccgagggacagccataacacccccgggacagtaggtctgggcggcaccactgggaactctggacttgagtgtgtttgcctcttccttgggtatgaatgtgtgagttcacccagaggcctgctctcctcacacattgtgtggtttggggttaatgatggagggagacacctcctcatagacggcaggtgcccacctttcagggagtctcccagcatgggcggatgccgggcatgagctgctgtaaactatttgtggctgtgctgcttgagtgacgtctctgtcgtgtgggtgccaagtgcttgtgtagaaactgtgttctgagcccccttttctggacaccaactgtgtcctgtgaatgtatcgctactgtgagctgttcccgcctagccagggccatgtcttaggtgcagctgtgccacgggtcagctgagccacagtcccagaaccaagctctcggtgtctcgggccaccatccgcccacctcgggctgaccccacctcctccatggacagtgtgagccccgggccgtgcatcctgctcagtgtggcgtcagtgtcggggctgagccccttgagctgcttcagtgaatgtacagtgcccggcacgagctgaacctcatgtgttccactcccaataaaaggttgacaggggcttctccttctctgg

SEQ ID NO: 27963 - protein, 103 aa, Homo sapiens
MRRREAAWWWGTSRSQPSTVGVTWSVKGRVSSPVCRTLETQPQSSPFSCMDLTYVSLLLQEFGFPRSKVLKLTRKIDNVETSWALGAIFHYIDSLNRQKSPAS

SEQ ID NO: 27964 - DNA, 3250 bp, Homo sapiens
gggaatcgtggggtcgtatcccgcgggtggaggccggggtggcgccggccggggcgggggagcccaaaagaccggctgccgcctgctccccggaaaagggcactcgtctccgtgggtgtggcggagcgcgcggtgcatgaaactcccacgttaacccacgaaaccttcaaagcactgaagccaggtctttctgcctatgctgatgatgttgaaaagagcgctcagggaatccgggaactactggatgttgctaaacaggacattccgttcgacttctggaaggccacccctctggtcctcaaggccacagctggcttacgcctgttacctggagaaaaggcccagaagttactgcagaaggtgaaaaaagtatttaaagcatcgcctttccttgtaggggatgactgtgtttccatcatgaacggaacagatgaaggcgtttcggcgtggatcaccatcctgctcgaggctatggagcccgctggccctgggcaggctctagtgctctgcacccttgcagtttcttctgagagaaatgttcaaacgccattcccagactgggcactcggcatgaggggtgcatgccttcgcgaaccgttcaggtccttccaagtcaatcacccactggtgcgtgtaccggggggccgcatcaggcacagcaggactgcacagctgtgtcccacaggaggagccagacagtgaagctcatcgggaaagccttccaagagaaataacacggggcggggatctgagagggcgatcgcagctgtaactaggacagccaaggacggcctcgtggggtaacatgggatctaagacaggaggaggtttcaagaaactgcgcagatctgaagcagcagcaccccaggccgcacaagcagcacacaccggggccctctgtcagctgctgtgtttaatgaacgaggaggaggtggtgtggcttggtgggggacaccaggaggaaatgagatcgaagggttggagcatgggtctgtggaccgtgggaaccctggaagcactcggaaggatggggcctggtggaggaggactgggaaagccgggaagctgggtcaaggtgtggggtgtagaggcgccctcagatgtccacacggtccattggcctccggggtcctctgttcctgttctccctcaagccatgggagcttggcaagtgagctgggcctccacttccttatctatgacatagggagggtgcaggccccctgaggaggtgggactccgggctggcggagggggaatgtagggcagatggtcccaacaggccagaggccactggtgtcaggcatcagcagcttcctcctcagagtccaggtctgccgctgccttcgtgcccacggtcttcactccctgcgccgggaccaacaatgccctggctcctgagggctgcttttgacctgtgcggggagcagccccaacttggggtggggtcttacaggcttctggacctgccttttcctgacaattcaggtcagagtctcaagtcccctgggaggggccccaagcagctgtgaggcctgggtgctcggagcccactgaccgctagccttgtgcttgtccccagcggcaagcctgcacgagctgtgtgctgccagagtgtcagaggtccttcaaaacagagtgcacaggacggaggaagtgaagcatgtggacttctatgctttctcctactattacgaccttgcagctggtgtgggcctcatagatgcggagaagggaggcagcctggtggtgggggacttcgagatcgcagccaagtacggtgggagtcacctggagcgtgaagggacgtgtctcatccccagtgtgtcggaccctggagacacagccgcagagcagccccttctcatgcatggacctcacctacgtcagcctgctactccaggagttcggctttcccaggagcaaagtgctgaagctcactcggaaaattgacaatgttgagaccagctgggctctgggggccatttttcattacatcgactccctgaacagacagaagagtccagcctcatagtggccgagccatccctgtccccgtcagcagtgtctgtgtgtctgcataaaccctcctgtcctggacgtgacttcatcctgaggagccacagcacaggccgtgctggcactttctgcacactggctctgggacttgcagaaggcctggtgctgccctggcatcagcctcttccagtcacatctggccagagggctgtctggacctgggccctgctcaatgccacctgtctgcctgggctccaagtgggcaggaccaggacagaaccacaggcacacactgagggggcagtgtggctccctgcctgtcccatccccatgccccgtccgcggggctgtggctgctgctgtgcatgtccctgcgatgggagtcttgtctcccagcctgtcagtttcctccccagggcagagctccccttcctgcaagagtctgggaggcggtgcaggctgtcctggctgctctggggaagccgagggacagccataacacccccgggacagtaggtctgggcggcaccactgggaactctggacttgagtgtgtttgcctcttccttgggtatgaatgtgtgagttcacccagaggcctgctctcctcacacattgtgtggtttggggttaatgatggagggagacacctcctcatagacggcaggtgcccacctttcagggagtctcccagcatgggcggatgccgggcatgagctgctgtaaactatttgtggctgtgctgcttgagtgacgtctctgtcgtgtgggtgccaagtgcttgtgtagaaactgtgttctgagcccccttttctggacaccaactgtgtcctgtgaatgtatcgctactgtgagctgttcccgcctagccagggccatgtcttaggtgcagctgtgccacgggtcagctgagccacagtcccagaaccaagctctcggtgtctcgggccaccatccgcccacctcgggctgaccccacctcctccatggacagtgtgagccccgggccgtgcatcctgctcagtgtggcgtcagtgtcggggctgagccccttgagctgcttcagtgaatgtacagtgcccggcacgagctgaacctcatgtgttccactcccaataaaaggttgacaggggcttctccttctctgggattcctctcgttgagcgacagtagcatttgcccacctggcacctgagatccctgtttactaaaccttagaaaagctgccaaa

SEQ ID NO: 27965 - protein, 103 aa, Homo sapiens; identical to SEQ ID NO: 27963

SEQ ID NO: 27966 - DNA, 1548 bp, Homo sapiens
cggggtggcgccggccggggcgggggagcccaaaagaccggctgccgcctgctccccggaaaagggcactcgtctccgtgggtgtggcggagcgcgcggtgcatggtaagcggcggtacgaccttgcagctggtgtgggcctcatagatgcggagaagggaggcagcctggtggtgggggacttcgagatcgcagccaagtacgtgtgtcggaccctggagacacagccgcagagcagccccttctcatgcatggacctcacctacgtcagcctgctactccaggagttcggctttcccaggagcaaagtgctgaagctcactcggaaaattgacaatgttgagaccagctgggctctgggggccatttttcattacatcgactccctgaacagacagaagagtccagcctcatagtggccgagccatccctgtccccgtcagcagtgtctgtgtgtctgcataaaccctcctgtcctggacgtgacttcatcctgaggagccacagcacaggccgtgctggcactttctgcacactggctctgggacttgcagaaggcctggtgctgccctggcatcagcctcttccagtcacatctggccagagggctgtctggacctgggccctgctcaatgccacctgtctgcctgggctccaagtgggcaggaccaggacagaaccacaggcacacactgagggggcagtgtggctccctgcctgtcccatccccatgccccgtccgcggggctgtggctgctgctgtgcatgtccctgcgatgggagtcttgtctcccagcctgtcagtttcctccccagggcagagctccccttcctgcaagagtctgggaggcggtgcaggctgtcctggctgctctggggaagccgagggacagccataacacccccgggacagtaggtctgggcggcaccactgggaactctggacttgagtgtgtttgcctcttccttgggtatgaatgtgtgagttcacccagaggcctgctctcctcacacattgtgtggtttggggttaatgatggagggagacacctcctcatagacggcaggtgcccacctttcagggagtctcccagcatgggcggatgccgggcatgagctgctgtaaactatttgtggctgtgctgcttgagtgacgtctctgtcgtgtgggtgccaagtgcttgtgtagaaactgtgttctgagcccccttttctggacaccaactgtgtcctgtgaatgtatcgctactgtgagctgttcccgcctagccagggccatgtcttaggtgcagctgtgccacgggtcagctgagccacagtcccagaaccaagctctcggtgtctcgggccaccatccgcccacctcgggctgaccccacctcctccatggacagtgtgagccccgggccgtgcatcctgctcagtgtggcgtcagtgtcggggctgagccccttgagctgcttcagtgaatgtacagtgcccggcacgagctgaacctcatgtgttccactcccaataaaaggttgacaggggcttctccttctctgg

SEQ ID NO: 27967 - protein, 55 aa, Homo sapiens
MRRREAAWWWGTSRSQPSTCVGPWRHSRRAAPSHAWTSPTSACYSRSSAFPGAKC

SEQ ID NO: 27968 - DNA, 1631 bp, Homo sapiens
cggggtggcgccggccggggcgggggagcccaaaagaccggctgccgcctgctccccggaaaagggcactcgtctccgtgggtgtggcggagcgcgcggtgcatggtaagcggcggtacgaccttgcagctggtgtgggcctcatagatgcggagaagggaggcagcctggtggtgggggacttcgagatcgcagccaagtacgtgtgtcggaccctggagacacagccgcagagcagccccttctcatgcatggacctcacctacgtcagcctgctactccaggagttcggctttcccaggagcaaagtgctgaagctcactcggaaaattgacaatgttgagaccagctgggctctgggggccatttttcattacatcgactccctgaacagacagaagagtccagcctcatagtggccgagccatccctgtccccgtcagcagtgtctgtgtgtctgcataaaccctcctgtcctggacgtgacttcatcctgaggagccacagcacaggccgtgctggcactttctgcacactggctctgggacttgcagaaggcctggtgctgccctggcatcagcctcttccagtcacatctggccagagggctgtctggacctgggccctgctcaatgccacctgtctgcctgggctccaagtgggcaggaccaggacagaaccacaggcacacactgagggggcagtgtggctccctgcctgtcccatccccatgccccgtccgcggggctgtggctgctgctgtgcatgtccctgcgatgggagtcttgtctcccagcctgtcagtttcctccccagggcagagctccccttcctgcaagagtctgggaggcggtgcaggctgtcctggctgctctggggaagccgagggacagccataacacccccgggacagtaggtctgggcggcaccactgggaactctggacttgagtgtgtttgcctcttccttgggtatgaatgtgtgagttcacccagaggcctgctctcctcacacattgtgtggtttggggttaatgatggagggagacacctcctcatagacggcaggtgcccacctttcagggagtctcccagcatgggcggatgccgggcatgagctgctgtaaactatttgtggctgtgctgcttgagtgacgtctctgtcgtgtgggtgccaagtgcttgtgtagaaactgtgttctgagcccccttttctggacaccaactgtgtcctgtgaatgtatcgctactgtgagctgttcccgcctagccagggccatgtcttaggtgcagctgtgccacgggtcagctgagccacagtcccagaaccaagctctcggtgtctcgggccaccatccgcccacctcgggctgaccccacctcctccatggacagtgtgagccccgggccgtgcatcctgctcagtgtggcgtcagtgtcggggctgagccccttgagctgcttcagtgaatgtacagtgcccggcacgagctgaacctcatgtgttccactcccaataaaaggttgacaggggcttctccttctctgggattcctctcgttgagcgacagtagcatttgcccacctggcacctgagatccctgtttactaaaccttagaaaagctgccaaa

SEQ ID NO: 27969 - protein, 55 aa, Homo sapiens; identical to SEQ ID NO: 27967

SEQ ID NO: 27970 - DNA, 444 bp, Homo sapiens
cagccgcagcacggtccttggcaaacaaggatgagaaaaatatccaaccacgggagcctgcgggtggcgaaggtggcataccccctggggctgtgtgtgggcgtgttcatctatgttgcctacatcaagtggcaccgggccaccgccacccaggccttcttcagcatcaccagggcagccccgggggcccggtggggtcagcaggcccacagccccctggggacagctgcagacgggcacgaggtcttctacgggatcatgtttgatgcatgagctgctgtaaactatttgtggctgtgctgcttgagtgacgtctctgtcgtgtgggtgccaagtgcttgtgtagaaactgtgttctgaccccttgagctgcttcagtgaatgtacagtgcccggcacgagctgaacctcatgtgttccactcccaataaaaggttgacaggg

SEQ ID NO: 27971 - protein, 80 aa, Homo sapiens
MRKISNHGSLRVAKVAYPLGLCVGVFIYVAYIKWHRATATQAFFSITRAAPGARWGQQAHSPLGTAADGHEVFYGIMFDA

SEQ ID NO: 27972 - DNA, 4404 bp, Homo sapiens
aatgagaaaaggcaggtacctctttgccctttgtggttcccagggagtcgtggctcagaccctgagtcctctcacacccagcagagcagcaagaaggtctcatggtctcctcgtcaggctgtacaaagtgcctgttttagacatttgggggctgtgaggacccaggagaatgagtctctgttttgttaccggttattgcgtaacagaccccccaagtagagtgaaagaacagcaaacagcagtcgcggctggaatctcacagcagaccacacaggctcatctgggcagcacctccgctggggtcctggggatctgtgcagctgcatgtggctgtggcagctgtctagaccctcccgctggggtcctggggttctgtgcaggtgcatgtggctgtggcagctgtctagacgccccctgctggggttctgggggtctgtgcaggtgcatatggctggggcagctgtctagactccctgctggggtcctgggggtctgtgcacatgcctgtggctgtggcagctgtctaaatcccccgctggggtcctgagggtctgtgcacgtgcctgtcgctgggcggctgtctagacctgggcgctcttccacatggcctcgccccagcagagcagcctgggacacttttgtggtggcttcaaaaaaggaaggctaccctgatgccaccatttcctgcccattccatcaaggaaagcaggtccaggccagagtccagggatgggaccagcacctttcggtgggacagcagcctgccatcctcgaaaggtgatactggggccagccctgggaccaatacgcttcctttgctggttttgagcccccagcttgtgtgtattggagcagcagattccattcaaggcatggtggcacctggtggcacttgttctggccctgccaccaacctaccagctactcacagcctcagtcacctataaaactgggtaatgatggctcccctcctaaaaggactgtcgtcacacttcactgaacagcccttggcccagtgcctggcacccggcgtgcccagggccgtgagctgggcatggtcctggtagcggtgtgcttcctggccaacgaggctttgctgccacttcccagggaggtgttgccttcccagtggacctggaagccactcagcttcccccatcctgtgtcaagccagggcctccgcgactcctagctcagccctagtccatggcggtgatataccttcctttctctttcctttttaatctctgtttcagctaaggatggaaaggagttggtcagcccttgcttgtctcccagtttcaaaggagagtgggaacacgcagaagtcacgtacagggtttcagggcagaaagcaggtacggggagggttgctgcctgttggtttctgcgggtgagagtggtggcctcctctcccccttgcctttcccacatcccatgggacgttccacgggaggctcctgacctctctttgaagagcctgtacctgccctggaagtgaaggtggtttggctgcaggggcctgtgtctgtgctgagagccagctccttccctctgcctctgttcaacattcccctgactgtcaccagaagcttcctcctgagggctgatttcctaacaggcctgcagggaggaaggactggaccagcttggggctgagatgcagggctgggactgggagcccaggcactctgtgctgtgctgggcgggaatagagggagggtctgcttccacccatcctgctcgaggctatggagcccgctggccctgggcaggctctagtgctctgcacccttgcagtttcttctgagagaaatgttcaaacgccattcccagactgggcactcggcatgaggggtgcatgccttcgcgaaccgttcaggtccttccaagtcaatcacccactggtgcgtgtaccggggggccgcatcaggcacagcaggactgcacagctgtgtcccacaggaggagccagacagtgaagctcatcgggaaagccttccaagagaaataacacggggcggggatctgagagggcgatcgcagctgtaactaggacagccaaggacggcctcgtggggtaacatgggatctaagacaggaggaggtttcaagaaactgcgcagatctgaagcagcagcaccccaggccgcacaagcagcacacaccggggccctctgtcagctgctgtgtttaatgaacgaggaggaggtggtgtggcttggtgggggacaccaggaggaaatgagatcgaagggttggagcatgggtctgtggaccgtgggaaccctggaagcactcggaaggatggggcctggtggaggaggactgggaaagccgggaagctgggtcaaggtgtggggtgtagaggcgccctcagatgtccacacggtccattggcctccggggtcctctgttcctgttctccctcaagccatgggagcttggcaagtgagctgggcctccacttccttatctatgacatagggagggtgcaggccccctgaggaggtgggactccgggctggcggagggggaatgtagggcagatggtcccaacaggccagaggccactggtgtcaggcatcagcagcttcctcctcagagtccaggtctgccgctgccttcgtgcccacggtcttcactccctgcgccgggaccaacaatgccctggctcctgagggctgcttttgacctgtgcggggagcagccccaacttggggtggggtcttacaggcttctggacctgccttttcctgacaattcaggtcagagtctcaagtcccctgggaggggccccaagcagctgtgaggcctgggtgctcggagcccactgaccgctagccttgtgcttgtccccagcggcaagcctgcacgagctgtgtgctgccagagtgtcagaggtccttcaaaacagagtgcacaggacggaggaagtgaagcatgtggacttctatgctttctcctactattacgaccttgcagctggtgtgggcctcatagatgcggagaagggaggcagcctggtggtgggggacttcgagatcgcagccaagtacgtgtgtcggaccctggagacacagccgcagagcagccccttctcatgcatggacctcacctacgtcagcctgctactccaggagttcggctttcccaggagcaaagtgctgaagctcactcggaaaattgacaatgttgagaccagctgggctctgggggccatttttcattacatcgactccctgaacagacagaagagtccagcctcatagtggccgagccatccctgtccccgtcagcagtgtctgtgtgtctgcataaaccctcctgtcctggacgtgacttcatcctgaggagccacagcacaggccgtgctggcactttctgcacactggctctgggacttgcagaaggcctggtgctgccctggcatcagcctcttccagtcacatctggccagagggctgtctggacctgggccctgctcaatgccacctgtctgcctgggctccaagtgggcaggaccaggacagaaccacaggcacacactgagggggcagtgtggctccctgcctgtcccatccccatgccccgtccgcggggctgtggctgctgctgtgcatgtccctgcgatgggagtcttgtctcccagcctgtcagtttcctccccagggcagagctccccttcctgcaagagtctgggaggcggtgcaggctgtcctggctgctctggggaagccgagggacagccataacacccccgggacagtaggtctgggcggcaccactgggaactctggacttgagtgtgtttgcctcttccttgggtatgaatgtgtgagttcacccagaggcctgctctcctcacacattgtgtggtttggggttaatgatggagggagacacctcctcatagacggcaggtgcccacctttcagggagtctcccagcatgggcggatgccgggcatgagctgctgtaaactatttgtggctgtgctgcttgagtgacgtctctgtcgtgtgggtgccaagtgcttgtgtagaaactgtgttctgagcccccttttctggacaccaactgtgtcctgtgaatgtatcgctactgtgagctgttcccgcctagccagggccatgtcttaggtgcagctgtgccacgggtcagctgagccacagtcccagaaccaagctctcggtgtctcgggccaccatccgcccacctcgggctgaccccacctcctccatggacagtgtgagccccgggccgtgcatcctgctcagtgtggcgtcagtgtcggggctgagccccttgagctgcttcagtgaatgtacagtgcccggcacgagctgaacctcatgtgttccactcccaataaaaggttgacaggggcttctccttctctgg

SEQ ID NO: 27973 - protein, 55 aa, Homo sapiens; identical to SEQ ID NO: 27967

SEQ ID NO: 27974 - DNA, 4487 bp, Homo sapiens
aatgagaaaaggcaggtacctctttgccctttgtggttcccagggagtcgtggctcagaccctgagtcctctcacacccagcagagcagcaagaaggtctcatggtctcctcgtcaggctgtacaaagtgcctgttttagacatttgggggctgtgaggacccaggagaatgagtctctgttttgttaccggttattgcgtaacagaccccccaagtagagtgaaagaacagcaaacagcagtcgcggctggaatctcacagcagaccacacaggctcatctgggcagcacctccgctggggtcctggggatctgtgcagctgcatgtggctgtggcagctgtctagaccctcccgctggggtcctggggttctgtgcaggtgcatgtggctgtggcagctgtctagacgccccctgctggggttctgggggtctgtgcaggtgcatatggctggggcagctgtctagactccctgctggggtcctgggggtctgtgcacatgcctgtggctgtggcagctgtctaaatcccccgctggggtcctgagggtctgtgcacgtgcctgtcgctgggcggctgtctagacctgggcgctcttccacatggcctcgccccagcagagcagcctgggacacttttgtggtggcttcaaaaaaggaaggctaccctgatgccaccatttcctgcccattccatcaaggaaagcaggtccaggccagagtccagggatgggaccagcacctttcggtgggacagcagcctgccatcctcgaaaggtgatactggggccagccctgggaccaatacgcttcctttgctggttttgagcccccagcttgtgtgtattggagcagcagattccattcaaggcatggtggcacctggtggcacttgttctggccctgccaccaacctaccagctactcacagcctcagtcacctataaaactgggtaatgatggctcccctcctaaaaggactgtcgtcacacttcactgaacagcccttggcccagtgcctggcacccggcgtgcccagggccgtgagctgggcatggtcctggtagcggtgtgcttcctggccaacgaggctttgctgccacttcccagggaggtgttgccttcccagtggacctggaagccactcagcttcccccatcctgtgtcaagccagggcctccgcgactcctagctcagccctagtccatggcggtgatataccttcctttctctttcctttttaatctctgtttcagctaaggatggaaaggagttggtcagcccttgcttgtctcccagtttcaaaggagagtgggaacacgcagaagtcacgtacagggtttcagggcagaaagcaggtacggggagggttgctgcctgttggtttctgcgggtgagagtggtggcctcctctcccccttgcctttcccacatcccatgggacgttccacgggaggctcctgacctctctttgaagagcctgtacctgccctggaagtgaaggtggtttggctgcaggggcctgtgtctgtgctgagagccagctccttccctctgcctctgttcaacattcccctgactgtcaccagaagcttcctcctgagggctgatttcctaacaggcctgcagggaggaaggactggaccagcttggggctgagatgcagggctgggactgggagcccaggcactctgtgctgtgctgggcgggaatagagggagggtctgcttccacccatcctgctcgaggctatggagcccgctggccctgggcaggctctagtgctctgcacccttgcagtttcttctgagagaaatgttcaaacgccattcccagactgggcactcggcatgaggggtgcatgccttcgcgaaccgttcaggtccttccaagtcaatcacccactggtgcgtgtaccggggggccgcatcaggcacagcaggactgcacagctgtgtcccacaggaggagccagacagtgaagctcatcgggaaagccttccaagagaaataacacggggcggggatctgagagggcgatcgcagctgtaactaggacagccaaggacggcctcgtggggtaacatgggatctaagacaggaggaggtttcaagaaactgcgcagatctgaagcagcagcaccccaggccgcacaagcagcacacaccggggccctctgtcagctgctgtgtttaatgaacgaggaggaggtggtgtggcttggtgggggacaccaggaggaaatgagatcgaagggttggagcatgggtctgtggaccgtgggaaccctggaagcactcggaaggatggggcctggtggaggaggactgggaaagccgggaagctgggtcaaggtgtggggtgtagaggcgccctcagatgtccacacggtccattggcctccggggtcctctgttcctgttctccctcaagccatgggagcttggcaagtgagctgggcctccacttccttatctatgacatagggagggtgcaggccccctgaggaggtgggactccgggctggcggagggggaatgtagggcagatggtcccaacaggccagaggccactggtgtcaggcatcagcagcttcctcctcagagtccaggtctgccgctgccttcgtgcccacggtcttcactccctgcgccgggaccaacaatgccctggctcctgagggctgcttttgacctgtgcggggagcagccccaacttggggtggggtcttacaggcttctggacctgccttttcctgacaattcaggtcagagtctcaagtcccctgggaggggccccaagcagctgtgaggcctgggtgctcggagcccactgaccgctagccttgtgcttgtccccagcggcaagcctgcacgagctgtgtgctgccagagtgtcagaggtccttcaaaacagagtgcacaggacggaggaagtgaagcatgtggacttctatgctttctcctactattacgaccttgcagctggtgtgggcctcatagatgcggagaagggaggcagcctggtggtgggggacttcgagatcgcagccaagtacgtgtgtcggaccctggagacacagccgcagagcagccccttctcatgcatggacctcacctacgtcagcctgctactccaggagttcggctttcccaggagcaaagtgctgaagctcactcggaaaattgacaatgttgagaccagctgggctctgggggccatttttcattacatcgactccctgaacagacagaagagtccagcctcatagtggccgagccatccctgtccccgtcagcagtgtctgtgtgtctgcataaaccctcctgtcctggacgtgacttcatcctgaggagccacagcacaggccgtgctggcactttctgcacactggctctgggacttgcagaaggcctggtgctgccctggcatcagcctcttccagtcacatctggccagagggctgtctggacctgggccctgctcaatgccacctgtctgcctgggctccaagtgggcaggaccaggacagaaccacaggcacacactgagggggcagtgtggctccctgcctgtcccatccccatgccccgtccgcggggctgtggctgctgctgtgcatgtccctgcgatgggagtcttgtctcccagcctgtcagtttcctccccagggcagagctccccttcctgcaagagtctgggaggcggtgcaggctgtcctggctgctctggggaagccgagggacagccataacacccccgggacagtaggtctgggcggcaccactgggaactctggacttgagtgtgtttgcctcttccttgggtatgaatgtgtgagttcacccagaggcctgctctcctcacacattgtgtggtttggggttaatgatggagggagacacctcctcatagacggcaggtgcccacctttcagggagtctcccagcatgggcggatgccgggcatgagctgctgtaaactatttgtggctgtgctgcttgagtgacgtctctgtcgtgtgggtgccaagtgcttgtgtagaaactgtgttctgagcccccttttctggacaccaactgtgtcctgtgaatgtatcgctactgtgagctgttcccgcctagccagggccatgtcttaggtgcagctgtgccacgggtcagctgagccacagtcccagaaccaagctctcggtgtctcgggccaccatccgcccacctcgggctgaccccacctcctccatggacagtgtgagccccgggccgtgcatcctgctcagtgtggcgtcagtgtcggggctgagccccttgagctgcttcagtgaatgtacagtgcccggcacgagctgaacctcatgtgttccactcccaataaaaggttgacaggggcttctccttctctgggattcctctcgttgagcgacagtagcatttgcccacctggcacctgagatccctgtttactaaaccttagaaaagctgccaaa

SEQ ID NO: 27975 - protein, 55 aa, Homo sapiens; identical to SEQ ID NO: 27967

SEQ ID NO: 27976 - DNA, 266 bp, Homo sapiens
aaataacacggggcggggatctgagagggcgatcgcagctgtaactaggacagccaaggacggcctcgtggggtaacatgggatctaagacaggaggaggtttcaagaaactgcgcagatctgaagcagcagcaccccgggccgtgcatcctgctcagtgtggcgtcagtgtcggggctgagccccttgagctgcttcagtgaatgtacagtgcccggcacgagctgaacctcatgtgttccactcccaataaaaggttgacaggg

SEQ ID NO: 27977 - protein, 41 aa, Homo sapiens
MGSKTGGGFKKLRRSEAAAPRAVHPAQCGVSVGAEPLELLQ

SEQ ID NO: 27978 - DNA, 353 bp, Homo sapiens
ggaggtttcaagaaactgcgcagatctgaagcagcagcaccccaggccgcacaagcagcacacaccggggccctctgtcagctgctgtgtttaatgaacgaggaggaggtggtgtggcttggtgggggacaccaggaggaaatgagaaccaagctctcggtgtctcgggccaccatccgcccacctcgggctgaccccacctcctccatggacagtgtgagccccgggccgtgcatcctgctcagtgtggcgtcagtgtcggggctgagccccttgagctgcttcagtgaatgtacagtgcccggcacgagctgaacctcatgtgttccactcccaataaaaggttgacaggg

SEQ ID NO: 27979 - protein, 73 aa, Homo sapiens
MNEEEVVWLGGGHQEEMRTKLSVSRATIRPPRADPTSSMDSVSPGPCILLSVASVSGLSPLSCFSECTVPGTS

SEQ ID NO: 27980 - DNA, 1140 bp, Homo sapiens
gggctggcggagggggaatgtagggcagatggtcccaacaggccagaggccactggtgtcaggcatcagcagcttcctcctcagagtccaggtctgccgctgccttcgtgcccacggtcttcactccctgcgccgggaccaacaatgccctggctcctgagggctgcttttgacctgtgcggggagcagccccaacttggggtggggtcttacaggcttctggacctgccttttcctgacaattcaggtcagagtctcaagtcccctgggaggggccccaagcagctgtgaggcctgggtgctcggagcccactgaccgctagccttgtgcttgtccccagcggcaagcctgcacgagctgtgtgctgccagagtgtcagaggtccttcaaaacagagtgcacaggacggaggaagtgaagcatgtggacttctatgctttctcctactattacgaccttgcagctggtgtgggcctcatagatgcggagaagggaggcagcctggtggtgggggacttcgagatcgcagccaagtacggtgagtgatgctgcaggggccatctcagcaggggcaggcgccccgtgatgctcgtgacgcaggcgctggccctgactctcctgggtgtagcccctcctaaacaatggccacaggcaggggcctcggccccagctgagaaaggaccaccgtccttgtcccaccctcatggggtcgtgaggaactgggtccctcgattccacttcctcagatgccattttactgctactagggtaaccccaagagtgatttcccctgggatgtcccagtaagttcatgattgtcacacaacccttaagaagccaaggccctacagaatggagcctgggatgtggggtggagggctgtccccggggtcgcaggtgaccagcccagcagaccctgtgccacacactatgcctctccactgtctccttcacgcctggcccagcagccaagccttggtgaacatgtcctgctcttggttgcccttcccaatgtgtgggtccaaagagctcaaatttgtacatctttccagaaaaagtactacccttcccctcccccaaaagtggcttttttaaagcttttgtgtcattttcccatttgtgcccatggacactgggta

SEQ ID NO: 27981 - protein, 34 aa, Homo sapiens
MRRREAAWWWGTSRSQPSTVSDAAGAISAGAGAP

SEQ ID NO: 27982 - DNA, 1635 bp, Homo sapiens
actgcagggttgggttgtggggtgaccctctcagcccccaaacccaccccacaccacatcacccagaagccgtcctcagagcacgtgagtgccgcctacagctggagggcctgcctcagaagccagtcagtgccttggggctcttgggctggcgttccccgtgccagcctcacgtctcagtggcatcgccaacctcacagtgctcctgcagactgggtgttgtgtctcccacagatgcggagaagggaggcagcctggtggtgggggacttcgagatcgcagccaagtacgtgtgtcggaccctggagacacagccgcagagcagccccttctcatgcatggacctcacctacgtcagcctgctactccaggagttcggctttcccaggagcaaagtgctgaagctcactcggaaaattgacaatgttgagaccagctgggctctgggggccatttttcattacatcgactccctgaacagacagaagagtccagcctcatagtggccgagccatccctgtccccgtcagcagtgtctgtgtgtctgcataaaccctcctgtcctggacgtgacttcatcctgaggagccacagcacaggccgtgctggcactttctgcacactggctctgggacttgcagaaggcctggtgctgccctggcatcagcctcttccagtcacatctggccagagggctgtctggacctgggccctgctcaatgccacctgtctgcctgggctccaagtgggcaggaccaggacagaaccacaggcacacactgagggggcagtgtggctccctgcctgtcccatccccatgccccgtccgcggggctgtggctgctgctgtgcatgtccctgcgatgggagtcttgtctcccagcctgtcagtttcctccccagggcagagctccccttcctgcaagagtctgggaggcggtgcaggctgtcctggctgctctggggaagccgagggacagccataacacccccgggacagtaggtctgggcggcaccactgggaactctggacttgagtgtgtttgcctcttccttgggtatgaatgtgtgagttcacccagaggcctgctctcctcacacattgtgtggtttggggttaatgatggagggagacacctcctcatagacggcaggtgcccacctttcagggagtctcccagcatgggcggatgccgggcatgagctgctgtaaactatttgtggctgtgctgcttgagtgacgtctctgtcgtgtgggtgccaagtgcttgtgtagaaactgtgttctgagcccccttttctggacaccaactgtgtcctgtgaatgtatcgctactgtgagctgttcccgcctagccagggccatgtcttaggtgcagctgtgccacgggtcagctgagccacagtcccagaaccaagctctcggtgtctcgggccaccatccgcccacctcgggctgaccccacctcctccatggacagtgtgagccccgggccgtgcatcctgctcagtgtggcgtcagtgtcggggctgagccccttgagctgcttcagtgaatgtacagtgcccggcacgagctgaacctcatgtgttccactcccaataaaaggttgacaggggcttctccttctctgg

SEQ ID NO: 27983 - protein, 55 aa, Homo sapiens; identical to SEQ ID NO: 27967

SEQ ID NO: 27984 - DNA, 1718 bp, Homo sapiens
actgcagggttgggttgtggggtgaccctctcagcccccaaacccaccccacaccacatcacccagaagccgtcctcagagcacgtgagtgccgcctacagctggagggcctgcctcagaagccagtcagtgccttggggctcttgggctggcgttccccgtgccagcctcacgtctcagtggcatcgccaacctcacagtgctcctgcagactgggtgttgtgtctcccacagatgcggagaagggaggcagcctggtggtgggggacttcgagatcgcagccaagtacgtgtgtcggaccctggagacacagccgcagagcagccccttctcatgcatggacctcacctacgtcagcctgctactccaggagttcggctttcccaggagcaaagtgctgaagctcactcggaaaattgacaatgttgagaccagctgggctctgggggccatttttcattacatcgactccctgaacagacagaagagtccagcctcatagtggccgagccatccctgtccccgtcagcagtgtctgtgtgtctgcataaaccctcctgtcctggacgtgacttcatcctgaggagccacagcacaggccgtgctggcactttctgcacactggctctgggacttgcagaaggcctggtgctgccctggcatcagcctcttccagtcacatctggccagagggctgtctggacctgggccctgctcaatgccacctgtctgcctgggctccaagtgggcaggaccaggacagaaccacaggcacacactgagggggcagtgtggctccctgcctgtcccatccccatgccccgtccgcggggctgtggctgctgctgtgcatgtccctgcgatgggagtcttgtctcccagcctgtcagtttcctccccagggcagagctccccttcctgcaagagtctgggaggcggtgcaggctgtcctggctgctctggggaagccgagggacagccataacacccccgggacagtaggtctgggcggcaccactgggaactctggacttgagtgtgtttgcctcttccttgggtatgaatgtgtgagttcacccagaggcctgctctcctcacacattgtgtggtttggggttaatgatggagggagacacctcctcatagacggcaggtgcccacctttcagggagtctcccagcatgggcggatgccgggcatgagctgctgtaaactatttgtggctgtgctgcttgagtgacgtctctgtcgtgtgggtgccaagtgcttgtgtagaaactgtgttctgagcccccttttctggacaccaactgtgtcctgtgaatgtatcgctactgtgagctgttcccgcctagccagggccatgtcttaggtgcagctgtgccacgggtcagctgagccacagtcccagaaccaagctctcggtgtctcgggccaccatccgcccacctcgggctgaccccacctcctccatggacagtgtgagccccgggccgtgcatcctgctcagtgtggcgtcagtgtcggggctgagccccttgagctgcttcagtgaatgtacagtgcccggcacgagctgaacctcatgtgttccactcccaataaaaggttgacaggggcttctccttctctgggattcctctcgttgagcgacagtagcatttgcccacctggcacctgagatccctgtttactaaaccttagaaaagctgccaaa

SEQ ID NO: 27985 - protein, 55 aa, Homo sapiens; identical to SEQ ID NO: 27967

SEQ ID NO: 27986 - DNA, 2393 bp, Homo sapiens
cggtgagtgatgctgcaggggccatctcagcaggggcaggcgccccgtgatgctcgtgacgcaggcgctggccctgactctcctgggtgtagcccctcctaaacaatggccacaggcaggggcctcggccccagctgagaaaggaccaccgtccttgtcccaccctcatggggtcgtgaggaactgggtccctcgattccacttcctcagatgccattttactgctactagggtaaccccaagagtgatttcccctgggatgtcccagtaagttcatgattgtcacacaacccttaagaagccaaggccctacagaatggagcctgggatgtggggtggagggctgtccccggggtcgcaggtgaccagcccagcagaccctgtgccacacactatgcctctccactgtctccttcacgcctggcccagcagccaagccttggtgaacatgtcctgctcttggttgcccttcccaatgtgtgggtccaaagagctcaaatttgtacatctttccagaaaaagtactacccttcccctcccccaaaagtggcttttttaaagcttttgtgtcattttcccatttgtgcccatggacactgggtatccacaactacagcaggaaaaggctttgagcagaatcccaggacagctcttggtggatttgtccttcctcaagagcaggagtggattgttctgagctggctttggtgttttctttccccagaaagcttaggttttatgcagcttgacacctgggagaggtgtccagggtcttagatgtagaaatgtggcttgggagacattggcccatgaccctaacaccaggcgtgcaaatccccttggagcccagacccagtggcagccggggttgccgcccacctgcctgtgctgtgcactgggtgccttctgcgctcagctgcggccttgtctgtgaatccggagtgcggagccagcgggtgcctgtagtgggtggaattggggtctgcacttgcccctccgcccccaggtgggagtcacctggagcgtgaagggacgtgtctcatccccagtgtgtcggaccctggagacacagccgcagagcagccccttctcatgcatggacctcacctacgtcagcctgctactccaggagttcggctttcccaggagcaaagtgctgaagctcactcggaaaattgacaatgttgagaccagctgggctctgggggccatttttcattacatcgactccctgaacagacagaagagtccagcctcatagtggccgagccatccctgtccccgtcagcagtgtctgtgtgtctgcataaaccctcctgtcctggacgtgacttcatcctgaggagccacagcacaggccgtgctggcactttctgcacactggctctgggacttgcagaaggcctggtgctgccctggcatcagcctcttccagtcacatctggccagagggctgtctggacctgggccctgctcaatgccacctgtctgcctgggctccaagtgggcaggaccaggacagaaccacaggcacacactgagggggcagtgtggctccctgcctgtcccatccccatgccccgtccgcggggctgtggctgctgctgtgcatgtccctgcgatgggagtcttgtctcccagcctgtcagtttcctccccagggcagagctccccttcctgcaagagtctgggaggcggtgcaggctgtcctggctgctctggggaagccgagggacagccataacacccccgggacagtaggtctgggcggcaccactgggaactctggacttgagtgtgtttgcctcttccttgggtatgaatgtgtgagttcacccagaggcctgctctcctcacacattgtgtggtttggggttaatgatggagggagacacctcctcatagacggcaggtgcccacctttcagggagtctcccagcatgggcggatgccgggcatgagctgctgtaaactatttgtggctgtgctgcttgagtgacgtctctgtcgtgtgggtgccaagtgcttgtgtagaaactgtgttctgagcccccttttctggacaccaactgtgtcctgtgaatgtatcgctactgtgagctgttcccgcctagccagggccatgtcttaggtgcagctgtgccacgggtcagctgagccacagtcccagaaccaagctctcggtgtctcgggccaccatccgcccacctcgggctgaccccacctcctccatggacagtgtgagccccgggccgtgcatcctgctcagtgtggcgtcagtgtcggggctgagccccttgagctgcttcagtgaatgtacagtgcccggcacgagctgaacctcatgtgttccactcccaataaaaggttgacaggggcttctccttctctgg

SEQ ID NO: 27987 - protein, 54 aa, Homo sapiens
MDLTYVSLLLQEFGFPRSKVLKLTRKIDNVETSWALGAIFHYIDSLNRQKSPAS

SEQ ID NO: 27988 - DNA, 2476 bp, Homo sapiens
cggtgagtgatgctgcaggggccatctcagcaggggcaggcgccccgtgatgctcgtgacgcaggcgctggccctgactctcctgggtgtagcccctcctaaacaatggccacaggcaggggcctcggccccagctgagaaaggaccaccgtccttgtcccaccctcatggggtcgtgaggaactgggtccctcgattccacttcctcagatgccattttactgctactagggtaaccccaagagtgatttcccctgggatgtcccagtaagttcatgattgtcacacaacccttaagaagccaaggccctacagaatggagcctgggatgtggggtggagggctgtccccggggtcgcaggtgaccagcccagcagaccctgtgccacacactatgcctctccactgtctccttcacgcctggcccagcagccaagccttggtgaacatgtcctgctcttggttgcccttcccaatgtgtgggtccaaagagctcaaatttgtacatctttccagaaaaagtactacccttcccctcccccaaaagtggcttttttaaagcttttgtgtcattttcccatttgtgcccatggacactgggtatccacaactacagcaggaaaaggctttgagcagaatcccaggacagctcttggtggatttgtccttcctcaagagcaggagtggattgttctgagctggctttggtgttttctttccccagaaagcttaggttttatgcagcttgacacctgggagaggtgtccagggtcttagatgtagaaatgtggcttgggagacattggcccatgaccctaacaccaggcgtgcaaatccccttggagcccagacccagtggcagccggggttgccgcccacctgcctgtgctgtgcactgggtgccttctgcgctcagctgcggccttgtctgtgaatccggagtgcggagccagcgggtgcctgtagtgggtggaattggggtctgcacttgcccctccgcccccaggtgggagtcacctggagcgtgaagggacgtgtctcatccccagtgtgtcggaccctggagacacagccgcagagcagccccttctcatgcatggacctcacctacgtcagcctgctactccaggagttcggctttcccaggagcaaagtgctgaagctcactcggaaaattgacaatgttgagaccagctgggctctgggggccatttttcattacatcgactccctgaacagacagaagagtccagcctcatagtggccgagccatccctgtccccgtcagcagtgtctgtgtgtctgcataaaccctcctgtcctggacgtgacttcatcctgaggagccacagcacaggccgtgctggcactttctgcacactggctctgggacttgcagaaggcctggtgctgccctggcatcagcctcttccagtcacatctggccagagggctgtctggacctgggccctgctcaatgccacctgtctgcctgggctccaagtgggcaggaccaggacagaaccacaggcacacactgagggggcagtgtggctccctgcctgtcccatccccatgccccgtccgcggggctgtggctgctgctgtgcatgtccctgcgatgggagtcttgtctcccagcctgtcagtttcctccccagggcagagctccccttcctgcaagagtctgggaggcggtgcaggctgtcctggctgctctggggaagccgagggacagccataacacccccgggacagtaggtctgggcggcaccactgggaactctggacttgagtgtgtttgcctcttccttgggtatgaatgtgtgagttcacccagaggcctgctctcctcacacattgtgtggtttggggttaatgatggagggagacacctcctcatagacggcaggtgcccacctttcagggagtctcccagcatgggcggatgccgggcatgagctgctgtaaactatttgtggctgtgctgcttgagtgacgtctctgtcgtgtgggtgccaagtgcttgtgtagaaactgtgttctgagcccccttttctggacaccaactgtgtcctgtgaatgtatcgctactgtgagctgttcccgcctagccagggccatgtcttaggtgcagctgtgccacgggtcagctgagccacagtcccagaaccaagctctcggtgtctcgggccaccatccgcccacctcgggctgaccccacctcctccatggacagtgtgagccccgggccgtgcatcctgctcagtgtggcgtcagtgtcggggctgagccccttgagctgcttcagtgaatgtacagtgcccggcacgagctgaacctcatgtgttccactcccaataaaaggttgacaggggcttctccttctctgggattcctctcgttgagcgacagtagcatttgcccacctggcacctgagatccctgtttactaaaccttagaaaagctgccaaa

SEQ ID NO: 27989 - protein, 54 aa, Homo sapiens; identical to SEQ ID NO: 27987

SEQ ID NO: 27990 - DNA, 767 bp, Homo sapiens
cacctgtctgcctgggctccaagtgggcaggaccaggacagaaccacaggcacacactgagggggcagtgtggctccctgcctgtcccatccccatgccccgtccgcggggctgtggctgctgctgtgcatgtccctgcgatgggagtcttgtctcccagcctgtcagtttcctccccagggcagagctccccttcctgcaagagtctgggaggcggtgcaggctgtcctggctgctctggggaagccgagggacagccataacacccccgggacagtaggtctgggcggcaccactgggaactctggacttgagtgtgtttgcctcttccttgggtatgaatgtgtgagttcacccagaggcctgctctcctcacacattgtgtggtttggggttaatgatggagggagacacctcctcatagacggcaggtgcccacctttcagggagtctcccagcatgggcggatgccgggcatgagctgctgtaaactatttgtggctgtgctgcttgagtgacgtctctgtcgtgtgggtgccaagtgcttgtgtagaaactgtgttctgagcccccttttctggacaccaactgtgtcctgtgaatgtatcgctactgtgagctgttcccgcctagccagggccatgtcttaggtgcagctgtgccacgggtcagctgagccacaccccttgagctgcttcagtgaatgtacagtgcccggcacgagctgaacctcatgtgttccactcccaataaaaggttgacagggg

SEQ ID NO: 27991 - protein, 116 aa, Homo sapiens
MSLRWESCLPACQFPPQGRAPLPARVWEAVQAVLAALGKPRDSHNTPGTVGLGGTTGNSGLECVCLFLGYECVSSPRGLLSSHIVWFGVNDGGRHLLIDGRCPPFRESPSMGGCRA

SEQ ID NO: 27992 - DNA, 2335 bp, Homo sapiens
tgacgcaggaaggagccctctcaccatcatgtctcctcacctcctctggccgctaatattgctgaagtggctaaatgagtcccagtattaattatctcagccattttcagagtgatactgagaagaaatgaaatggagatagggaagaaggaagccgctcctctctacaggatgccaaatcaatgcaggaggagattctgagaactactggacaacggccacaggggaacaggggattcattccatctcaaagcctcaccctacacattatctttattagctataaaagggaaaagggatttgcaatggagagttatggcagactccagcctcatgaagtgacacaacttagcattgccacccaggggacaaacccacactatgagtctgattcagtgcaccaagaaggacaaacatcacttactctgctataacataacgcagtatattatacactaacatatgtagtatattacattacataataacatagtacaggcttctaggacacagtttatagaagtgcagataatacttgaggcagtttcccaaacttgcaaataaaaactctccacagggcttgtgactagcacattcccaaagccccaaacccagaattccacctgcttagtgagcacctccagagcacttttttttttttttttttttgagacggagttttgctcttgttgcccaggctggagtgcaatggcaggatctcggctcactgcaacctccacctcccaggttcaagcgattctcgtgcctcagcctcctgagcagctgggattacaggcacccacctaatttttgtatttttagtagagatggagtttcaccatgttggtcaggctggtcttgaactcccaacctcaggtgatccacccaccttggcctcccaaagtgctaggattacaggcacgagccactgcgctcggccatctctagggcatatttttactgtgcaatgtgggaatctctgccatagggtgggctgcctttctaacccagtggcccggttctagcaggacttccccagtatgtggatgggggcacagggactcttgggggggcctcaaggcatctgtgagctaggcctaaccaccgctactgaatgactgcgagatgagtcccagagctgggacgagagtgggcctggtaccctgccccagccctcccctgacaggagttagtaagggacaggttagcatgctaaagagatagcaagctggtcacagcctagggccaccacccttctgtcttacaagtcagaaacatgtcctgactttgggggagagggtatatgttaaacgggcccaccctgggagctgtagtggtcactgtggagctgagcactgggctgcactcctcgctgccccagagtgaccaggtgggtggtttcatccaagaggcagggctcagaaggccaggctgagccaccgatatgcatgtctgcaccccaccacttcctgctcagtctgtatcaggcccgggatgaaatcgtcacttagacgctcaggggtcctcccacccatctggccaacacaaacctgccagcatagcactgagtggaaggttccagtgcacccacaggcctggctgttaaaatgtccggcctctccagaggacaggttaagttcacactgagaaagcctggctctctccagctagcctgaattaaagtgagaaggatgagcacagcacctgtggaaatggcgctggaaagcaagtgtacctaggaactgcctctgggccaccgaagtgcgccggcccagtgttctcagacaacccaggaggagtcctccatctggccacttcccacccgttaggccccgaggggacaccaggttggtgagacccggaccccaccagcaaaggacccttccttcattcatcacacactggctccatctgcactgcacctactgccagccaggcactgagcttcacatccgcacaaaacacaaagacctctgatacggtttgggtctgtgttcccacctaaacctcgtggtgaattgtgattatgttgagttgttttggaggtagggcctggtgagaagtgactcgatgatggggtggatttctcatgaatggtttagcaccatctccttgatgctgttcttaagatagtgagttttcacgaaatctggttgtttaaaagtgtgcgccccaccccttgcttctgctctggccatgtgatctgcctgccttccccttcgccttccaccatgattgtaagattcctgaggcctccccagaggctgagcagatatcggtactacgcttgctatacagcctgcagaactatgagccaattaaacctcttttcttt

SEQ ID NO: 27993 - protein, 83 aa, Homo sapiens [sequence omitted]

SEQ ID NO: 27994 - DNA, 432 bp, Homo sapiens
acaaaatgaaaatggtttttagagcctttcctgtggtctgctggttcttaatggcctttaattcaaaataatccacatgcgaagaggcatattttggggtggtgtatcccaatgcccctcagatgcctcttttgtgaactgtccaagtggatgcccacctcaggacctttgcatttgctattcccccagattcattcatgcctttttttttttttagatggagtcttgccctgtcgcccagactgcaatctcggctcatgcaagtaatgatcaataagtgtcagcgcctccattctttgccaggtgtgcaccacagctgggggattaaactttaccacaccacagcagataacatatttgcataacttgctttttgtcttcttaagctttccttgaactcaattccccagagtggtagaagtggtcataggg

SEQ ID NO: 27995 - protein, 55 aa, Homo sapiens [sequence omitted]

SEQ ID NO: 27996 - DNA, 3859 bp, Homo sapiens
agagccgcagtgccgggcgccagagcagcggcgccagagcagctgcaccatcccggcgttcgcgtgtgccgccgctttcctcctccatctcttttcctccgcctccgccggcgcgatggcgaagccgctgacggacagcgagaagcggaagcagatcagcgtgcgcggcctggcggggctaggcgacgtggccgaggtgcggaagagcttcaaccggcacttgcacttcacgctggtcaaggaccgcaatgtggccacgccccgcgactacttcttcgcgctggcgcacacggtgcgcgaccacctcgtgggccgctggatccgcacgcagcagcactactacgagcgcgaccccaagcgcatttattatctttccctggaattctacatgggtcgcacgctgcagaacacgatggtgaacctgggccttcagaatgcctgcgatgaagccatctatcagttggggttagacttggaggaactcgaggagatagaagaagatgctggccttgggaatggaggcctggggaggctggcagcgtgtttccttgactcaatggctaccttgggcctggcagcatacggctatggaatccgctatgaatttgggatttttaaccagaagattgtcaatggctggcaggtagaggaggccgatgactggctgcgctacggcaacccctgggagaaagcgcggcctgagtatatgcttcccgtgcacttctacggacgcgtggagcacacccccgacggcgtgaagtggctggacacacaggtggtgctggccatgccctacgacaccccagtgcccggctacaagaacaacaccgtcaacaccatgcggctgtggtccgccaaggctcccaacgacttcaagctgcaggacttcaacgtgggagactacatcgaggcggtcctggaccggaacttggctgagaacatctccagggtcctgtatccaaatgataacttctttgaggggaaggagctgcggctgaagcaggagtacttcgtggtggccgccacgctccaggacatcatccgccgcttcaagtcgtccaagttcggctgccgggaccctgtgagaacctgtttcgagacgttcccagacaaggtggccatccagctgaacgacacccaccccgccctctccatccctgagctcatgcggatcctggtggacgtggagaaggtggactgggacaaggcctgggaaatcacgaagaagacctgtgcatacaccaaccacactgtgctgcctgaggccttggagcgctggcccgtgtccatgtttgagaagctgctgccgcggcacctggagataatctatgccatcaaccagcggcacctggaccacgtggccgcgctgtttcccggcgatgtggaccgcctgcgcaggatgtctgtgatcgaggagggggactgcaagcggatcaacatggcccacctgtgtgtgattgggtcccatgctgtcaatggtgtggcgaggatccactcggagatcgtgaaacagtcggtctttaaggatttttatgaactggagccagagaagttccagaataagaccaatggcatcaccccccgccggtggctgctgctgtgcaacccggggctggccgataccatcgtggagaaaattggggaggagttcctgactgacctgagccagctgaagaagctgctgccgctggtcagtgacgaggtgttcatcagggacgtggccaaggtcaaacaggagaacaagctcaagttctcggccttcctggagaaggagtacaaggtgaagatcaacccctcctccatgttcgatgtgcatgtgaagaggatccacgagtacaagcggcagctgctcaactgcctgcacgtcgtcaccctgtacaatcgaatcaagagagacccggccaaggcttttgtgcccaggactgttatgattgggggcaaggcagcgcccggttaccacatggccaagctgatcatcaagttggtcacctccatcggcgacgtcgtcaatcatgacccagttgtgggtgacaggttgaaagtgatcttcctggagaactaccgtgtgtccttggctgagaaagtgatcccggccgctgatctgtcgcagcagatctccactgcaggcaccgaggcctcaggcacaggcaacatgaagttcatgctcaacggggccctcaccatcggcaccatggacggcgccaacgtggagatggccgaggaggccggggccgagaacctcttcatcttcggcctgcgggtggaggatgtcgaggccttggaccggaaagggtacaatgccagggagtactacgaccacctgcccgagctgaagcaggccgtggaccagatcagcagtggctttttttctcccaaggagccagactgcttcaaggacatcgtgaacatgctgatgcaccatgacaggttcaaggtgtttgcagactatgaagcctacatgcagtgccaggcacaggtggaccagctgtaccggaaccccaaggagtggaccaagaaggtcatcaggaacatcgcctgctcgggcaagttctccagtgaccggaccatcacggagtatgcacgggagatctggggtgtggagccctccgacctgcagcttcagcacctgccccacccagagtgggagtcaggtggagccacctgctgggctcccccagaactttgcacacatcttgctatgtattagccgatgtctttagtgttgagcctctggattctggggtctgggccagtggccatagtgaagcctgggaatgagtgttactgcagcatctgggctgccagccacagggaagggccaagccccatgtagccccagtcatcctgcccagccctgcctcctggccatgccgggaggggtcggatcctctaggcatcgccttcacagccccctgccccctgccctctgtcctggctctgcacctggtatatgggtcatggacccagatggggctttccctttgtagccatccaatgggcattgtgtgggtgcttggaacccgggatgactgagggggacactggagtgggtgcttgtgtctgctgtctcagaggccttggtcaggatgaagttggctgacacagcttagcttggttttgcttattcaaaagagaaaataactacacatggaaatgaaactagctgaagccttttcttgttttagcaactgaaaattgtacttggtcacttttgtgcttgaggaggcccattttctgcctggcagggggcaggtctgtgccctcccgctgactcctgctgtgtcctgaggtgcatttcctgttgtacacacaagggccaggctccattctccctccctttccaccagtgccacagcctcgtctggaaaaaggaccaggggtcccggaggaacccatttgtgctctgcttggacagcaggcctggcactgggaggtgggggtgagcccctcacagccttgcccctccccaaggctggcaacctgcctcccattgcccaagagagagggcagggaacaggctactgtccttccctgtggaattgccgagaaatctagcaccttgcatgctggatctgggctgcggggaggctctttttctccctggcctccagtgcccaccaggaggatctgcgcacggtgcacagcccaccagagcactacagccttttattgagtggggcaagtgctgggctgtggtcgtgccctgacagcatcttccccaggcagcggctctgtggaggaggccatactcccctagttggccactggggccaccaccctgaccaccactgtgcccctcattgttactgccttgtgagataaaaactgattaaacctttgtggctgtggttggctgaca

SEQ ID NO: 27997 - protein, 863 aa, Homo sapiens
MAKPLTDSEKRKQISVRGLAGLGDVAEVRKSFNRHLHFTLVKDRNVATPRDYFFALAHTVRDHLVGRWIRTQQHYYERDPKRIYYLSLEFYMGRTLQNTMVNLGLQNACDEAIYQLGLDLEELEEIEEDAGLGNGGLGRLAACFLDSMATLGLAAYGYGIRYEFGIFNQKIVNGWQVEEADDWLRYGNPWEKARPEYMLPVHFYGRVEHTPDGVKWLDTQVVLAMPYDTPVPGYKNNTVNTMRLWSAKAPNDFKLQDFNVGDYIEAVLDRNLAENISRVLYPNDNFFEGKELRLKQEYFVVAATLQDIIRRFKSSKFGCRDPVRTCFETFPDKVAIQLNDTHPALSIPELMRILVDVEKVDWDKAWEITKKTCAYTNHTVLPEALERWPVSMFEKLLPRHLEIIYAINQRHLDHVAALFPGDVDRLRRMSVIEEGDCKRINMAHLCVIGSHAVNGVARIHSEIVKQSVFKDFYELEPEKFQNKTNGITPRRWLLLCNPGLADTIVEKIGEEFLTDLSQLKKLLPLVSDEVFIRDVAKVKQENKLKFSAFLEKEYKVKINPSSMFDVHVKRIHEYKRQLLNCLHVVTLYNRIKRDPAKAFVPRTVMIGGKAAPGYHMAKLIIKLVTSIGDVVNHDPVVGDRLKVIFLENYRVSLAEKVIPAADLSQQISTAGTEASGTGNMKFMLNGALTIGTMDGANVEMAEEAGAENLFIFGLRVEDVEALDRKGYNAREYYDHLPELKQAVDQISSGFFSPKEPDCFKDIVNMLMHHDRFKVFADYEAYMQCQAQVDQLYRNPKEWTKKVIRNIACSGKFSSDRTITEYAREIWGVEPSDLQLQHLPHPEWESGGATCWAPPELCTHLAMY

SEQ ID NO: 27998 - DNA, 4139 bp, Homo sapiens
agagccgcagtgccgggcgccagagcagcggcgccagagcagctgcaccatcccggcgttcgcgtgtgccgccgctttcctcctccatctcttttcctccgcctccgccggcgcgatggcgaagccgctgacggacagcgagaagcggaagcagatcagcgtgcgcggcctggcggggctaggcgacgtggccgaggtgcggaagagcttcaaccggcacttgcacttcacgctggtcaaggaccgcaatgtggccacgccccgcgactacttcttcgcgctggcgcacacggtgcgcgaccacctcgtgggccgctggatccgcacgcagcagcactactacgagcgcgaccccaagcgcatttattatctttccctggaattctacatgggtcgcacgctgcagaacacgatggtgaacctgggccttcagaatgcctgcgatgaagccatctatcagttggggttagacttggaggaactcgaggagatagaagaagatgctggccttgggaatggaggcctggggaggctggcagcgtgtttccttgactcaatggctaccttgggcctggcagcatacggctatggaatccgctatgaatttgggatttttaaccagaagattgtcaatggctggcaggtagaggaggccgatgactggctgcgctacggcaacccctgggagaaagcgcggcctgagtatatgcttcccgtgcacttctacggacgcgtggagcacacccccgacggcgtgaagtggctggacacacaggtggtgctggccatgccctacgacaccccagtgcccggctacaagaacaacaccgtcaacaccatgcggctgtggtccgccaaggctcccaacgacttcaagctgcaggacttcaacgtgggagactacatcgaggcggtcctggaccggaacttggctgagaacatctccagggtcctgtatccaaatgataacttctttgaggggaaggagctgcggctgaagcaggagtacttcgtggtggccgccacgctccaggacatcatccgccgcttcaagtcgtccaagttcggctgccgggaccctgtgagaacctgtttcgagacgttcccagacaaggtggccatccagctgaacgacacccaccccgccctctccatccctgagctcatgcggatcctggtggacgtggagaaggtggactgggacaaggcctgggaaatcacgaagaagacctgtgcatacaccaaccacactgtgctgcctgaggccttggagcgctggcccgtgtccatgtttgagaagctgctgccgcggcacctggagataatctatgccatcaaccagcggcacctggaccacgtggccgcgctgtttcccggcgatgtggaccgcctgcgcaggatgtctgtgatcgaggagggggactgcaagcggatcaacatggcccacctgtgtgtgattgggtcccatgctgtcaatggtgtggcgaggatccactcggagatcgtgaaacagtcggtctttaaggatttttatgaactggagccagagaagttccagaataagaccaatggcatcaccccccgccggtggctgctgctgtgcaacccggggctggccgataccatcgtggagaaaattggggaggagttcctgactgacctgagccagctgaagaagctgctgccgctggtcagtgacgaggtgttcatcagggacgtggccaaggtcaaacaggagaacaagctcaagttctcggccttcctggagaaggagtacaaggtgaagatcaacccctcctccatgttcgatgtgcatgtgaagaggatccacgagtacaagcggcagctgctcaactgcctgcacgtcgtcaccctgtacaatcgaatcaagagagacccggccaaggcttttgtgcccaggactgttatgattgggggcaaggcagcgcccggttaccacatggccaagctgatcatcaagttggtcacctccatcggcgacgtcgtcaatcatgacccagttgtgggtgacaggttgaaagtgatcttcctggagaactaccgtgtgtccttggctgagaaagtgatcccggccgctgatctgtcgcagcagatctccactgcaggcaccgaggcctcaggcacaggcaacatgaagttcatgctcaacggggccctcaccatcggcaccatggacggcgccaacgtggagatggccgaggaggccggggccgagaacctcttcatcttcggcctgcgggtggaggatgtcgaggccttggaccggaaagggtacaatgccagggagtactacgaccacctgcccgagctgaagcaggccgtggaccagatcagcagtggctttttttctcccaaggagccagactgcttcaaggacatcgtgaacatgctgatgcaccatgacaggttcaaggtgtttgcagactatgaagcctacatgcagtgccaggcacaggtggaccagctgtaccggaaccccaaggagtggaccaagaaggtcatcaggaacatcgcctgctcgggcaagttctccagtgaccggaccatcacggagtatgcacgggagatctggggtgtggagccctccgacctgcagatcccgccccccaacatcccccgggactaggcacaccctgccttggcgggaccagcgggcatttgttttcttgctgactttgcacctccttttttccccaaacactttgccagccactggtggtccctgcttttctgagtaccatgtttccaggaggggccatgggggtcagggtggttttgagagagcagggtaaggaaggaatgtgctagaagtgctcctagtttcttgtaaaggaagccagagttgacagtacaaagggtcgtggccagccctgcagcttcagcacctgccccacccagagtgggagtcaggtggagccacctgctgggctcccccagaactttgcacacatcttgctatgtattagccgatgtctttagtgttgagcctctggattctggggtctgggccagtggccatagtgaagcctgggaatgagtgttactgcagcatctgggctgccagccacagggaagggccaagccccatgtagccccagtcatcctgcccagccctgcctcctggccatgccgggaggggtcggatcctctaggcatcgccttcacagccccctgccccctgccctctgtcctggctctgcacctggtatatgggtcatggacccagatggggctttccctttgtagccatccaatgggcattgtgtgggtgcttggaacccgggatgactgagggggacactggagtgggtgcttgtgtctgctgtctcagaggccttggtcaggatgaagttggctgacacagcttagcttggttttgcttattcaaaagagaaaataactacacatggaaatgaaactagctgaagccttttcttgttttagcaactgaaaattgtacttggtcacttttgtgcttgaggaggcccattttctgcctggcagggggcaggtctgtgccctcccgctgactcctgctgtgtcctgaggtgcatttcctgttgtacacacaagggccaggctccattctccctccctttccaccagtgccacagcctcgtctggaaaaaggaccaggggtcccggaggaacccatttgtgctctgcttggacagcaggcctggcactgggaggtgggggtgagcccctcacagccttgcccctccccaaggctggcaacctgcctcccattgcccaagagagagggcagggaacaggctactgtccttccctgtggaattgccgagaaatctagcaccttgcatgctggatctgggctgcggggaggctctttttctccctggcctccagtgcccaccaggaggatctgcgcacggtgcacagcccaccagagcactacagccttttattgagtggggcaagtgctgggctgtggtcgtgccctgacagcatcttccccaggcagcggctctgtggaggaggccatactcccctagttggccactggggccaccaccctgaccaccactgtgcccctcattgttactgccttgtgagataaaaactgattaaacctttgtggctgtggttggctgaca

SEQ ID NO: 27999 - protein, 843 aa, Homo sapiens; identical to SEQ ID NO: 3841

SEQ ID NO: 28000 - DNA, 542 bp, Homo sapiens
ggggagggcgtggacggagactgtggtgccgagcatgggctgggtggatgtgtttgggcagaagggggagacggtggggggccagcagggcgccaggtgcccaggaggaggctgggccggggagaggcacaggggccggcgggggcccttgccactccgtcctgagcaacccgttttgtggccaggtggtgctggccatgccctacgacaccccagtgcccggctacaagaacaacaccgtcaacaccatgcggctgtggtccgccaaggctcccaacgacttcaagctgcaggacttcaacgtgggagactacatcgaggcggtcctggaccggaacttggctgagaacatctccagggtcctgtatccaaatgataacgtgagtagctggcctgggcactcttgctcaggccgtatcgctttctggcatagagaggtgggctggctggccgggctccccagtggggcctgctgttggccttggcaagcagccacctggtggccctctcgccttaggtgcacacacgatgcccttggggag

SEQ ID NO: 28001 - protein, 164 aa, Homo sapiens [sequence omitted]

SEQ ID NO: 28002 - DNA, 397 bp, Homo sapiens
tgcatgaccgcgctgtggggcccaaggcttgcccttgcccgccagctgtgcacagaccctgggcctctgtcatggtgggggctgtgtgtgtataggcgtgtgcatgtgtgatgtggcacgtttattttaagcaaaagccatgtttttctgtgtgccccatgccaggcctcacgtgagcaggtgaacagttagacacccgaaaggcccaggctggagtgcagtggtgccatcacggctcactgcagtcttgacctccaagggcccaggaaatcctcccacctcattacttgggaggctgagtaggaggatcgattgtcctgggtgattgaggctatagtgagctgtgattgcactactgcactccagtgtgggcagcagagccagaccctgtctcagc

SEQ ID NO: 28003 - protein, 35 aa, Homo sapiens
MTALWGPRLALARQLCTDPGPLSWWGLCVYRRVHV

SEQ ID NO: 28004 - DNA, 2714 bp, Homo sapiens
gcgggtggatcgcatgagcccaggagttcgagaccagcctgagcagtgtggtgaaaccccatctctacaaaaaagtgcaaaaattagctgggcgtggtggttcatgtctgtagtcccagttacttgggaggctgagtaggaggatcgattgtcctgggtgattgaggctatagtgagctgtgattgcactactgcactccagtgtgggcagcagagccagaccctgtctcagcaaaaaaaagaaaaaaaaaagaaggaaacatttgaacctggagaaaagcaggaagaattgtagcaaaaccataaacctgtcacccagactagctgaagcatttcacagtaaactgcagacactctagctcttcactcttacatacgtcagcattccttttcataaaatgatgttttccaccagaaccacaatgggagtagactgaaacatcaccacacagtaccaccatccgtcacacctaaagcattggacaggagtcctccgtgtcctgaaatgttcactcgggcagcgcccggttaccacatggccaagctgatcatcaagttggtcacctccatcggcgacgtcgtcaatcatgacccagttgtgggtgacaggttgaaagtgatcttcctggagaactaccgtgtgtccttggctgagaaagtgatcccggccgctgatctgtcgcagcagatctccactgcaggcaccgaggcctcaggcacaggcaacatgaagttcatgctcaacggggccctcaccatcggcaccatggacggcgccaacgtggagatggccgaggaggccggggccgagaacctcttcatcttcggcctgcgggtggaggatgtcgaggccttggaccggaaagggtacaatgccagggagtactacgaccacctgcccgagctgaagcaggccgtggaccagatcagcagtggctttttttctcccaaggagccagactgcttcaaggacatcgtgaacatgctgatgcaccatgacaggttcaaggtgtttgcagactatgaagcctacatgcagtgccaggcacaggtggaccagctgtaccggaaccccaaggagtggaccaagaaggtcatcaggaacatcgcctgctcgggcaagttctccagtgaccggaccatcacggagtatgcacgggagatctggggtgtggagccctccgacctgcagatcccgccccccaacatcccccgggactaggcacaccctgccttggcgggaccagcgggcatttgttttcttgctgactttgcacctccttttttccccaaacactttgccagccactggtggtccctgcttttctgagtaccatgtttccaggaggggccatgggggtcagggtggttttgagagagcagggtaaggaaggaatgtgctagaagtgctcctagtttcttgtaaaggaagccagagttgacagtacaaagggtcgtggccagccctgcagcttcagcacctgccccacccagagtgggagtcaggtggagccacctgctgggctcccccagaactttgcacacatcttgctatgtattagccgatgtctttagtgttgagcctctggattctggggtctgggccagtggccatagtgaagcctgggaatgagtgttactgcagcatctgggctgccagccacagggaagggccaagccccatgtagccccagtcatcctgcccagccctgcctcctggccatgccgggaggggtcggatcctctaggcatcgccttcacagccccctgccccctgccctctgtcctggctctgcacctggtatatgggtcatggacccagatggggctttccctttgtagccatccaatgggcattgtgtgggtgcttggaacccgggatgactgagggggacactggagtgggtgcttgtgtctgctgtctcagaggccttggtcaggatgaagttggctgacacagcttagcttggttttgcttattcaaaagagaaaataactacacatggaaatgaaactagctgaagccttttcttgttttagcaactgaaaattgtacttggtcacttttgtgcttgaggaggcccattttctgcctggcagggggcaggtctgtgccctcccgctgactcctgctgtgtcctgaggtgcatttcctgttgtacacacaagggccaggctccattctccctccctttccaccagtgccacagcctcgtctggaaaaaggaccaggggtcccggaggaacccatttgtgctctgcttggacagcaggcctggcactgggaggtgggggtgagcccctcacagccttgcccctccccaaggctggcaacctgcctcccattgcccaagagagagggcagggaacaggctactgtccttccctgtggaattgccgagaaatctagcaccttgcatgctggatctgggctgcggggaggctctttttctccctggcctccagtgcccaccaggaggatctgcgcacggtgcacagcccaccagagcactacagccttttattgagtggggcaagtgctgggctgtggtcgtgccctgacagcatcttccccaggcagcggctctgtggaggaggccatactcccctagttggccactggggccaccaccctgaccaccactgtgcccctcattgttactgccttgtgagataaaaactgattaaacctttgtggctgtggttggctgaca

SEQ ID NO: 28005 - protein, 238 aa, Homo sapiens
MFTRAAPGYHMAKLIIKLVTSIGDVVNHDPVVGDRLKVIFLENYRVSLAEKVIPAADLSQQISTAGTEASGTGNMKFMLNGALTIGTMDGANVEMAEEAGAENLFIFGLRVEDVEALDRKGYNAREYYDHLPELKQAVDQISSGFFSPKEPDCFKDIVNMLMHHDRFKVFADYEAYMQCQAQVDQLYRNPKEWTKKVIRNIACSGKFSSDRTITEYAREIWGVEPSDLQIPPPNIPRD

SEQ ID NO: 28006 - DNA, 587 bp, Homo sapiens
gcttcatccaccttatccccgcgcccctccgttggctgcactgagctcagagcactggccctcctgcagcccacactccattccaactccaccggggttctgttactgtctttcccatcccaggatcccatcagggcactccactgtgtgtggccgtcaggtctccccagtgtcatttggtctgtgacagcttctcagtttttccttgttcttcatgatctggacgtcatgaggaatccagcacgggcctgattccaagcgataattacaaagaaaaggcagtgttgcctgattgccttgaagcactggggagcctgtgaggccttaagtagggtcaggtgaaaccacacatgccatctgaagtcagagctgtgccttgctggcccgagcacagaggcctgtgctccctttctgcgccctcacacagcttcttctgcccgggccccgtcctgggatgcccatgtctgcccgtccgtccctctcccacttagctctgccttgtcctgtctggtcttgcttgcgtttttccttttccatcttctctccagctccttgctccctagatctagaatgcggtagctttcctg

SEQ ID NO: 28007 - protein, 43 aa, Homo sapiens
MPMSARPSLSHLALPCPVWSCLRFSFSIFSPAPCSLDLECGSF

SEQ ID NO: 28008 - DNA, 2380 bp, Homo sapiens
gggtcaggtgaaaccacacatgccatctgaagtcagagctgtgccttgctggcccgagcacagaggcctgtgctccctttctgcgccctcacacagcttcttctgcccgggccccgtcctgggatgcccatgtctgcccgtccgtccctctcccacttagctctgccttgtcctgtctggtcttgcttgcgtttttccttttccatcttcgaggtcccagccaaggtgctccatttcacttcctgcccctccggccgtctgtttttcaaaagctctgcccaggatttcacagtgagccaagttctgagtggccctctccactaggaatgtggcatcagccactatgtcctagcagatctgctagtgatgacatttctttaacagtcaaaggagcaggtgggattggctttagactgacttcacatctctgctcgagcaggtccctgctcaagggcctcgtaaccacccatggccactggctgctgccctggaccgtgcaggccttgagctcccagggccatcctggggcaggggctgtgccaggcaccaacatggcttgttctccaaggtggcccacctggggcgctggctgctgactcctggcccatcgcctcacaggagccagactgcttcaaggacatcgtgaacatgctgatgcaccatgacaggttcaaggtgtttgcagactatgaagcctacatgcagtgccaggcacaggtggaccagctgtaccggaaccccaaggagtggaccaagaaggtcatcaggaacatcgcctgctcgggcaagttctccagtgaccggaccatcacggagtatgcacgggagatctggggtgtggagccctccgacctgcagatcccgccccccaacatcccccgggactaggcacaccctgccttggcgggaccagcgggcatttgttttcttgctgactttgcacctccttttttccccaaacactttgccagccactggtggtccctgcttttctgagtaccatgtttccaggaggggccatgggggtcagggtggttttgagagagcagggtaaggaaggaatgtgctagaagtgctcctagtttcttgtaaaggaagccagagttgacagtacaaagggtcgtggccagccctgcagcttcagcacctgccccacccagagtgggagtcaggtggagccacctgctgggctcccccagaactttgcacacatcttgctatgtattagccgatgtctttagtgttgagcctctggattctggggtctgggccagtggccatagtgaagcctgggaatgagtgttactgcagcatctgggctgccagccacagggaagggccaagccccatgtagccccagtcatcctgcccagccctgcctcctggccatgccgggaggggtcggatcctctaggcatcgccttcacagccccctgccccctgccctctgtcctggctctgcacctggtatatgggtcatggacccagatggggctttccctttgtagccatccaatgggcattgtgtgggtgcttggaacccgggatgactgagggggacactggagtgggtgcttgtgtctgctgtctcagaggccttggtcaggatgaagttggctgacacagcttagcttggttttgcttattcaaaagagaaaataactacacatggaaatgaaactagctgaagccttttcttgttttagcaactgaaaattgtacttggtcacttttgtgcttgaggaggcccattttctgcctggcagggggcaggtctgtgccctcccgctgactcctgctgtgtcctgaggtgcatttcctgttgtacacacaagggccaggctccattctccctccctttccaccagtgccacagcctcgtctggaaaaaggaccaggggtcccggaggaacccatttgtgctctgcttggacagcaggcctggcactgggaggtgggggtgagcccctcacagccttgcccctccccaaggctggcaacctgcctcccattgcccaagagagagggcagggaacaggctactgtccttccctgtggaattgccgagaaatctagcaccttgcatgctggatctgggctgcggggaggctctttttctccctggcctccagtgcccaccaggaggatctgcgcacggtgcacagcccaccagagcactacagccttttattgagtggggcaagtgctgggctgtggtcgtgccctgacagcatcttccccaggcagcggctctgtggaggaggccatactcccctagttggccactggggccaccaccctgaccaccactgtgcccctcattgttactgccttgtgagataaaaactgattaaacctttgtggctgtggttggctgaca

SEQ ID NO: 28009 - protein, 130 aa, Homo sapiens
MTGSRCLQTMKPTCSARHRWTSCTGTPRSGPRRSSGTSPARASSPVTGPSRSMHGRSGVWSPPTCRSRPPTSPGTRHTLPWRDQRAFVFLLTLHLLFSPNTLPATGGPCFSEYHVSRRGHGGQGGFERAG

SEQ ID NO: 28010 - DNA, 2465 bp, Homo sapiens
gggtcaggtgaaaccacacatgccatctgaagtcagagctgtgccttgctggcccgagcacagaggcctgtgctccctttctgcgccctcacacagcttcttctgcccgggccccgtcctgggatgcccatgtctgcccgtccgtccctctcccacttagctctgccttgtcctgtctggtcttgcttgcgtttttccttttccatcttcgaggtcccagccaaggtgctccatttcacttcctgcccctccggccgtctgtttttcaaaagctctgcccaggatttcacagtgagccaagttctgagtggccctctccactaggaatgtggcatcagccactatgtcctagcagatctgctagtgatgacatttctttaacagtcaaaggagcaggtgggattggctttagactgacttcacatctctgctcgagcaggtccctgctcaagggcctcgtaaccacccatggccactggctgctgccctggaccgtgcaggccttgagctcccagggccatcctggggcaggggctgtgccaggcaccaacatggcttgttctccaaggtggcccacctggggcgctggctgctgactcctggcccatcgcctcacaggtacaatgccagggagtactacgaccacctgcccgagctgaagcaggccgtggaccagatcagcagtggctttttttctcccaaggagccagactgcttcaaggacatcgtgaacatgctgatgcaccatgacaggttcaaggtgtttgcagactatgaagcctacatgcagtgccaggcacaggtggaccagctgtaccggaaccccaaggagtggaccaagaaggtcatcaggaacatcgcctgctcgggcaagttctccagtgaccggaccatcacggagtatgcacgggagatctggggtgtggagccctccgacctgcagatcccgccccccaacatcccccgggactaggcacaccctgccttggcgggaccagcgggcatttgttttcttgctgactttgcacctccttttttccccaaacactttgccagccactggtggtccctgcttttctgagtaccatgtttccaggaggggccatgggggtcagggtggttttgagagagcagggtaaggaaggaatgtgctagaagtgctcctagtttcttgtaaaggaagccagagttgacagtacaaagggtcgtggccagccctgcagcttcagcacctgccccacccagagtgggagtcaggtggagccacctgctgggctcccccagaactttgcacacatcttgctatgtattagccgatgtctttagtgttgagcctctggattctggggtctgggccagtggccatagtgaagcctgggaatgagtgttactgcagcatctgggctgccagccacagggaagggccaagccccatgtagccccagtcatcctgcccagccctgcctcctggccatgccgggaggggtcggatcctctaggcatcgccttcacagccccctgccccctgccctctgtcctggctctgcacctggtatatgggtcatggacccagatggggctttccctttgtagccatccaatgggcattgtgtgggtgcttggaacccgggatgactgagggggacactggagtgggtgcttgtgtctgctgtctcagaggccttggtcaggatgaagttggctgacacagcttagcttggttttgcttattcaaaagagaaaataactacacatggaaatgaaactagctgaagccttttcttgttttagcaactgaaaattgtacttggtcacttttgtgcttgaggaggcccattttctgcctggcagggggcaggtctgtgccctcccgctgactcctgctgtgtcctgaggtgcatttcctgttgtacacacaagggccaggctccattctccctccctttccaccagtgccacagcctcgtctggaaaaaggaccaggggtcccggaggaacccatttgtgctctgcttggacagcaggcctggcactgggaggtgggggtgagcccctcacagccttgcccctccccaaggctggcaacctgcctcccattgcccaagagagagggcagggaacaggctactgtccttccctgtggaattgccgagaaatctagcaccttgcatgctggatctgggctgcggggaggctctttttctccctggcctccagtgcccaccaggaggatctgcgcacggtgcacagcccaccagagcactacagccttttattgagtggggcaagtgctgggctgtggtcgtgccctgacagcatcttccccaggcagcggctctgtggaggaggccatactcccctagttggccactggggccaccaccctgaccaccactgtgcccctcattgttactgccttgtgagataaaaactgattaaacctttgtggctgtggttggctgaca

SEQ ID NO: 28011 - protein, 130 aa, Homo sapiens; identical to SEQ ID NO: 28009

SEQ ID NO: 28012 - DNA, 973 bp, Homo sapiens
caggggactgaaattggtggcctgaattgcctcccagtgctgtatatcccgtgagtaattctactgcaaacttctgcttttctccagttgcctttggaagttccagaggcaaaactgtgtccctttagcacaggtacctgggttgctaagggggcagtgggctcagagtatgggtttgctttgcggttataattttccccattataaaaggaagatatgtgtagaaaatttagaccagagaatagctctgaagttgagggtcaagaatcagagaccttgtctccatgcctgtgtgttgggctttgacttggcaccacactgcttgttccctgcctaactcactgagtgctgctctgggctacagcgcatcctcatggggctcttggctgcctcctctctgcacagcctctgcttccttagatagcagtgtgaggactgtggagaaggatctttggtctgagctcaaatgattggctcctgattgtcctgtggtctagggaattcctggggaagtcggagcctgagcaccagcactgagcctggccgtgggaaggaagcatgaagacctctgccctcctcccgttttcctccagtcagcagcccggtatcctgaagccccggggggccggcacctgcaatgctcaggagcccagctcgcacctggagagcacctcagatcccagacctcagcagggcccaggttccagcccagatcccagcatgtggtcagagctggtgtgactgaagccaacaggtgacacggtcatcgaagagcagcagacaaaactaaaactaacccaaaggcagctgaaagtggagggcaggtgaattcccagccctcgccggattcaacttttgccaacggtgaagaactgccctgagctgcaaaccttacaaagtctgtaactctagataaaccataccatgtgctaactgcactgaaataaaacactaactacattataatgtcaca

SEQ ID NO: 28013 - protein, 60 aa, Homo sapiens
MKTSALLPFSSSQQPGILKPRGAGTCNAQEPSSHLESTSDPRPQQGPGSSPDPSMWSELV

SEQ ID NO: 28014 - DNA, 1727 bp, Homo sapiens
gccagggatgctgggcgcgcgctccttggaactagagaggaggtggccggggcggggccgggggaggggggtagggcagagccggcgggagcccggcgctgattggccggcctggctggcgggcccccgccgctggttcgtagccggcgcagcggcctgggctgggatgtgaggagcggcgggttccgggctccgggctctgggtggcggcggctgtgagcggcggcactgcggcgcaggccagcgggcgccgtcggcggctggccctgtcggccgcgggatgaggaagcggaccgagcccgtcgccttggagcatgagcgctgcgccgccgcgggctcgtcctcctccggctcggccgccgcggcgctggacgccgactgccgcctgaagcagaacctacgcctgacgggcccggcggcggctgagccgcgctgcgcagccgacgcgggaatgaagcgggcgctgggcaggcgaaagggcgtgtggttgcgcctgaggaagatacttttctgtgttttggggttgtacattgccattccatttctcatcaaactatgtcctggaatacaggccaaactgattttcttgaatttcgtaagagttccctatttcattgatttgaaaaaaccacaggatcaaggtttgaatcacacgtgtaactactacctgcagccagaggaagacgtgaccattggagtctggcacaccgtccctgcagtctggtggaagaacgcccaaggcaaagaccagatgtggtatgaggatgccttggcttccagccaccctatcattctgtacctgcatgggaacgcaggtaccagaggaggcgaccaccgcgtggagctttacaaggtgctgagttcccttggttaccatgtggtcacctttgactacagaggttggggtgactcagtgggaacgccatctgagcggggcatgacctatgacgcactccacgtttttgactggatcaaagcaagaagtggtgacaaccccgtgtacatctggggccactctctgggcactggcgtggcgacaaatctggtgcggcgcctctgtgagcgagagacgcctccagatgcccttatattggaatctccattcactaatatccgcgaagaagctaagagccatccattttcagtgatatatcgatacttccctgggtttgactggttcttccttgatcctattacaagtagtggaattaaatttgcaaatgatgaaaacgtgaagcacatctcctgtcccctgctcatcctgcacgctgaggacgacccggtggtgcccttccagcttggcagaaagctctatagcatcgccgcaccagctcgaagcttccgagatttcaaagttcagtttgtgccctttcattcagaccttggctacaggcacaaatacatttacaagagccctgagctgccacggatactgagacctcagcagggcccaggttccagcccagatcccagcatgtggtcagagctggtgtgactgaagccaacaggtgacacggtcatcgaagagcagcagacaaaactaaaactaacccaaaggcagctgaaagtggagggcaggtgaattcccagccctcgccggattcaacttttgccaacggtgaagaactgccctgagctgcaaaccttacaaagtctgtaactctagataaaccataccatgtgctaactgcactgaaataaaacactaactacattataatgtcaca

SEQ ID NO: 28015 - protein, 404 aa, Homo sapiens; identical to SEQ ID NO: 3845

SEQ ID NO: 28016 - DNA, 409 bp, Homo sapiens
gcatcgccgcaccagctcgaagcttccgagatttcaaagttcagtttgtgccctttcattcagaccttggctacaggcacaaatacatttacaagagccctgagctgccacggatactgagacctcagcagggcccaggttccagcccagatcccagcatgtggtcagagctggtgtgactgaagccaacaggtgacacggtcatcgaagagcagcagacaaaactaaaactaacccaaaggcagctgaaagtggagggcaggtgaattcccagccctcgccggattcaacttttgccaacggtgaagaactgccctgagctgcaaaccttacaaagtctgtaactctagataaaccataccatgtgctaactgcactgaaataaaacactaactacattataatgtca

SEQ ID NO: 28017 - protein, 30 aa, Homo sapiens
AATDTETSAGPRFQPRSQHVVRAGVTEANR

SEQ ID NO: 28018 - DNA, 546 bp, Homo sapiens
gaaccccaaggagtggaccaagaaggtcatcaggaacatcgcctgctcgggcaagttctccagtgaccggaccatcacggagtatgcacgggagatctggggtgtggagccctccgacctgcagatcccgccccccaacatcccccgggactaggcacaccctgccttggcgggaccagcgggcatttgttttcttgctgactttgcacctccttttttccccaaacactttgccagccactggtggtccctgcttttctgagtaccatgtttccaggaggggccatgggggtcagggtggttttgagagagcagggtaaggaaggaatgtgctagaagtgctcctagtttcttgtaaaggaagccagagttgacagtacaaagggtcgtgccctgacagcatcttccccaggcagcggctctgtggaggaggccatactcccctagttggccactggggccaccaccctgaccaccactgtgcccctcattgttactgccttgtgagataaaaactgattaaacctttgtggctgtggttggctg

SEQ ID NO: 28019 - protein, 78 aa, Homo sapiens
MHGRSGVWSPPTCRSRPPTSPGTRHTLPWRDQRAFVFLLTLHLLFSPNTLPATGGPCFSEYHVSRRGHGGQGGFERAG

SEQ ID NO: 28020 - DNA, 716 bp, Homo sapiens
gaaccccaaggagtggaccaagaaggtcatcaggaacatcgcctgctcgggcaagttctccagtgaccggaccatcacggagtatgcacgggagatctggggtgtggagccctccgacctgcagatcccgccccccaacatcccccgggactaggcacaccctgccttggcgggaccagcgggcatttgttttcttgctgactttgcacctccttttttccccaaacactttgccagccactggtggtccctgcttttctgagtaccatgtttccaggaggggccatgggggtcagggtggttttgagagagcagggtaaggaaggaatgtgctagaagtgctcccattgcccaagagagagggcagggaacaggctactgtccttccctgtggaattgccgagaaatctagcaccttgcatgctggatctgggctgcggggaggctctttttctccctggcctccagtgcccaccaggaggatctgcgcacggtgcacagcccaccagagcactacagccttttattgagtggggcaagtgctgggctgtggtcgtgccctgacagcatcttccccaggcagcggctctgtggaggaggccatactcccctagttggccactggggccaccaccctgaccaccactgtgcccctcattgttactgccttgtgagataaaaactgattaaacctttgtggctgtggttggctgaca

SEQ ID NO: 28021 - protein, 78 aa, Homo sapiens; identical to SEQ ID NO: 28019

SEQ ID NO: 28022 - DNA, 617 bp, Homo sapiens
gaaccccaaggagtggaccaagaaggtcatcaggaacatcgcctgctcgggcaagttctccagtgaccggaccatcacggagtatgcacgggagatctggggtgtggagccctccgacctgcagatcccgccccccaacatcccccgggactaggcacaccctgccttggcgggaccagcgggcatttgttttcttgctgactttgcacctccttttttccccaaacactttgccagccactggtggtccctgcttttctgagtaccatgtttccaggaggggccatgggggtcagggtggttttgagagagcagggtaaggaaggaatgtgctagaagtgctcctagtttcttgtaaaggaagccagatgcccaccaggaggatctgcgcacggtgcacagcccaccagagcactacagccttttattgagtggggcaagtgctgggctgtggtcgtgccctgacagcatcttccccaggcagcggctctgtggaggaggccatactcccctagttggccactggggccaccaccctgaccaccactgtgcccctcattgttactgccttgtgagataaaaactgattaaacctttgtggctgtggttggctgaca

SEQ ID NO: 28023 - protein, 78 aa, Homo sapiens; identical to SEQ ID NO: 28019

SEQ ID NO: 28024 - DNA, 1294 bp, Homo sapiens
gaaccccaaggagtggaccaagaaggtcatcaggaacatcgcctgctcgggcaagttctccagtgaccggaccatcacggagtatgcacgggagatctggggtgtggagccctccgacctgcagatcccgccccccaacatcccccgggactaggcacaccctgccttggcgggaccagcgggcatttgttttcttgctgactttgcacctccttttttccccaaacactttgccagccactggtggtccctgcttttctgagtaccatgtttccaggaggggccatgggggtcagggtggttttgagagagcagggtaaggaaggaatgtgctagaagtgctcctagtttcttgtaaaggaagccagagttgacagtacaaagggtcgtggccagccctgcagcttcagcacctgccccacccagagtgggagtcaggtggagccacctgctgggctcccccagaactttgcacacatcttgctatgtattagccgatgtctttagtgttgagcctctggattctggggtctgggccagtggccatagtgaagcctgggaatgagtgttactgcagcatctgggctgccagccacagggaagggccaagccccatgtagccccagtcatcctgcccagccctgcctcctggccatgccgggaggggtcggatcctctaggcatcgccttcacagccccctgccccctgccctctgtcctggctctgcacctggtatatgggtcatggacccagatggggctttccctttgtagccatccaatgggcattgtgtgggtgcttggaacccgggatgactgaggggaacccatttgtgctctgcttggacagcaggcctggcactgggaggtgggggtgagcccctcacagccttgcccctccccaaggctggcaacctgcctcccattgcccaagagagagggcagggaacaggctactgtccttccctgtggaattgccgagaaatctagcaccttgcatgctggatctgggctgcggggaggctctttttctccctggcctccagtgcccaccaggaggatctgcgcacggtgcacagcccaccagagcactacagccttttattgagtggggcaagtgctgggctgtggtcgtgccctgacagcatcttccccaggcagcggctctgtggaggaggccatactcccctagttggccactggggccaccaccctgaccaccactgtgcccctcattgttactgccttgtgagataaaaactgattaaacctttgtggctgtggttggctgaca

SEQ ID NO: 28025 - protein, 46 aa, Homo sapiens
MGHGPRWGFPFVAIQWALCGCLEPGMTEGNPFVLCLDSRPGTGRWG

SEQ ID NO: 28026 - DNA, 408 bp, Homo sapiens
ccccaaggagtggaccaagaaggtcatcaggaacatcgcctgctcgggcaagttctccagtgaccggaccatcacggagtatgcacgggagatctggggtgtggagccctccgacctgcagatcccgccccccaacatcccccgggactaggcacaccctgccttggcgggaccagcgggcatttgttttcttgctgactttgcacctccttttttccccaaacactttgccagccactggtggtccctgcttttctgagtaccatgtttccaggcagcggctctgtggaggaggccatactcccctagttggccactggggccaccaccctgaccaccactgtgcccctcattgttactgccttgtgagataaaaactgattaaacctttgtggctgtggttggctg

SEQ ID NO: 28027 - protein, 97 aa, Homo sapiens
MHGRSGVWSPPTCRSRPPTSPGTRHTLPWRDQRAFVFLLTLHLLFSPNTLPATGGPCFSEYHVSRQRLCGGGHTPLVGHWGHHPDHHCAPHCYCLVR

SEQ ID NO: 28028 - DNA, 949 bp, Homo sapiens
aggagtggaccaagaaggtcatcaggaacatcgcctgctcgggcaagttctccagtgaccggaccatcacggagtatgcacgggagatctggggtgtggagccctccgacctgcagatcccgccccccaacatcccccgggactaggcacaccctgccttggcgggaccagcgggcatttgttttcttgctgactttgcacctccttttttccccaaacactttgccagccactggtggtccctgcttttctgagtaccatgtttccaggaggggccatgggggtcagggtggttttgagagagcagggtaaggaaggaatgtgctagaagtgctcctagtttcttgtaaaggaagccagagttgacagtacaaagggtcgtggccagccctgcagcttcagcacctgccccacccagagtgggagtcaggtggagccacctgctgggctcccccagaactttgcacacatcttgctatgtattagccgatgtctttagtgttgagcctctggattctggggtctgggccagtggccatagtgaagcctgggaatgagtgttatggcaacctgcctcccattgcccaagagagagggcagggaacaggctactgtccttccctgtggaattgccgagaaatctagcaccttgcatgctggatctgggctgcggggaggctctttttctccctggcctccagtgcccaccaggaggatctgcgcacggtgcacagcccaccagagcactacagccttttattgagtggggcaagtgctgggctgtggtcgtgccctgacagcatcttccccaggcagcggctctgtggaggaggccatactcccctagttggccactggggccaccaccctgaccaccactgtgcccctcattgttactgccttgtgagataaaaactgattaaacctttgtggctgtggttggctgaca

SEQ ID NO: 28029 - protein, 69 aa, Homo sapiens [sequence omitted]

SEQ ID NO: 28030 - DNA, 1174 bp, Homo sapiens
gcgcagcggcctgggctgggatgtgaggagcggcgggttccgggctccgggctctgggtggcggcggctgtgagcggcggcactgcggcgcaggccagcgggcgccgtcggcggctggccctgtcggccgcgggatgaggaagcggaccgagcccgtcgccttggagcatgagcgctgcgccgccgcgggctcgtcctcctccggctcggccgccgcggcgctggacgccgactgccgcctgaagcagaacctacgcctgacgggcccggcggcggctgagccgcgctgcgcagccgacgcgggaatgaagcgggcgctgggcaggcgaaagggcgtgtggttgcgcctgaggaagatacttttctgtgttttggggttgtacattgccattccatttctcatcaaactattttgtgccctttcattcagaccttggctacaggcacaaatacatttacaagagccctgagctgccacggatactgagggaattcctggggaagtcggagcctgagcaccagcactgagcctggccgtgggaaggaagcatgaagacctctgccctcctcccgttttcctccagtcagcagcccggtatcctgaagccccggggggccggcacctgcaatgctcaggagcccagctcgcacctggagagcacctcagatcccaggcggggaggcccctgcaggcctgcagtgcccggaggcctgagcatggctgtgtggaaagcgtgggtggcaggcatgtggctctccttgccgcccctcaacctgagatcttgttgggagacttaatggcagcaggcagccatcactgcctgcttgatgctgcactgagctggacagggggagtccgggcaggggactcttggggctcgggaccatgctgagctttttggcaccacccacagagaacgtggggtccaggttctttctgcaccttcccagcacatgcagaatgactccagtggttccatcgtcccctcctgccctgtgtacctgcttgcctttctcagctgccccacctcccctgggctggcccactcacccacagtggaagtgcccgggatctgcacttcctcccctttcacctacctgtacacctaacctggccttagactgagctttatttaagaataaaatcgtggtggtggtccttttgtctctctgc

SEQ ID NO: 28031 - protein, 111 aa, Homo sapiens
MRKRTEPVALEHERCAAAGSSSSGSAAAALDADCRLKQNLRLTGPAAAEPRCAADAGMKRALGRRKGVWLRLRKILFCVLGLYIAIPFLIKLFCALSFRPWLQAQIHLQEP

SEQ ID NO: 28032 - DNA, 2123 bp, Homo sapiens
gccagggatgctgggcgcgcgctccttggaactagagaggaggtggccggggcggggccgggggaggggggtagggcagagccggcgggagcccggcgctgattggccggcctggctggcgggcccccgccgctggttcgtagccggcgcagcggcctgggctgggatgtgaggagcggcgggttccgggctccgggctctgggtggcggcggctgtgagcggcggcactgcggcgcaggccagcgggcgccgtcggcggctggccctgtcggccgcgggatgaggaagcggaccgagcccgtcgccttggagcatgagcgctgcgccgccgcgggctcgtcctcctccggctcggccgccgcggcgctggacgccgactgccgcctgaagcagaacctacgcctgacgggcccggcggcggctgagccgcgctgcgcagccgacgcgggaatgaagcgggcgctgggcaggcgaaagggcgtgtggttgcgcctgaggaagatacttttctgtgttttggggttgtacattgccattccatttctcatcaaactatgtcctggaatacaggccaaactgattttcttgaatttcgtaagagttccctatttcattgatttgaaaaaaccacaggatcaaggtttgaatcacacgtgtaactactacctgcagccagaggaagacgtgaccattggagtctggcacaccgtccctgcagtctggtggaagaacgcccaaggcaaagaccagatgtggtatgaggatgccttggcttccagccaccctatcattctgtacctgcatgggaacgcaggtaccagaggaggcgaccaccgcgtggagctttacaaggtgctgagttcccttggttaccatgtggtcacctttgactacagaggttggggtgactcagtgggaacgccatctgagcggggcatgacctatgacgcactccacgtttttgactggatcaaagcaagaagtggtgacaaccccgtgtacatctggggccactctctgggcactggcgtggcgacaaatctggtgcggcgcctctgtgagcgagagacgcctccagatgcccttatattggaatctccattcactaatatccgcgaagaagctaagagccatccattttcagtgatatatcgatacttccctgggtttgactggttcttccttgatcctattacaagtagtggaattaaatttgcaaatgatgaaaacgtgaagcacatctcctgtcccctgctcatcctgcacgctgaggacgacccggtggtgcccttccagcttggcagaaagctctatagcatcgccgcaccagctcgaagcttccgagatttcaaagttcagtttgtgccctttcattcagaccttggctacaggcacaaatacatttacaagagccctgagctgccacggatactgagggaattcctggggaagtcggagcctgagcaccagcactgagcctggccgtgggaaggaagcatgaagacctctgccctcctcccgttttcctccagtcagcagcccggtatcctgaagccccggggggccggcacctgcaatgctcaggagcccagctcgcacctggagagcacctcagatcccaggcggggaggcccctgcaggcctgcagtgcccggaggcctgagcatggctgtgtggaaagcgtgggtggcaggcatgtggctctccttgccgcccctcaacctgagatcttgttgggagacttaatggcagcaggcagccatcactgcctgcttgatgctgcactgagctggacagggggagtccgggcaggggactcttggggctcgggaccatgctgagctttttggcaccacccacagagaacgtggggtccaggttctttctgcaccttcccagcacatgcagaatgactccagtggttccatcgtcccctcctgccctgtgtacctgcttgcctttctcagctgccccacctcccctgggctggcccactcacccacagtggaagtgcccgggatctgcacttcctcccctttcacctacctgtacacctaacctggccttagactgagctttatttaagaataaaatcgtggtggtggtccttttgtctctctgc

SEQ ID NO: 28033 - protein, 398 aa, Homo sapiens; identical to SEQ ID NO: 3843

SEQ ID NO: 28034 - DNA, 1361 bp, Homo sapiens
gccagggatgctgggcgcgcgctccttggaactagagaggaggtggccggggcggggccgggggaggggggtagggcagagccggcgggagcccggcgctgattggccggcctggctggcgggcccccgccgctggttcgtagccggcgcagcggcctgggctgggatgtgaggagcggcgggttccgggctccgggctctgggtggcggcggctgtgagcggcggcactgcggcgcaggccagcgggcgccgtcggcggctggccctgtcggccgcgggatgaggaagcggaccgagcccgtcgccttggagcatgagcgctgcgccgccgcgggctcgtcctcctccggctcggccgccgcggcgctggacgccgactgccgcctgaagcagaacctacgcctgacgggcccggcggcggctgagccgcgctgcgcagccgacgcgggaatgaagcgggcgctgggcaggcgaaagggcgtgtggttgcgcctgaggaagatacttttctgtgttttggggttgtacattgccattccatttctcatcaaactatgtcctggaatacaggccaaactgattttcttgaatttcgtaagagttccctatttcattgatttgaaaaaaccacaggatcaaggtttgaatcacacgtgtaactactacctgcagccagaggaagacgtgaccattggagtctggcacaccgtccctgcagtctggtggaagaacgcccaaggcaaagaccagatgtggtatgaggatgccttggcttccagccaccctatcattctgtacctgcatgggaacgcaggtaccaggtgagggagaggagccctttacaggtgctgagttcccttggttaccatgtggtcacctttgactacagaggtgagatttcttttgcaagagcatctgagcacaattccactgcttgctggcggtatcccatgggcaggcctcactcgaagaggctcggagcaaggccagcgcctgctttgcctgtgctgtgatggtgtcctgggtcctgacaaagaccctgatggagctgtcaggagagccccttctggtaggggaggctcagcacctggagcccccagcagatgccctgtcagcaacttttttttttttttttttaagataggatctcactttgtcacccaacctggagtacagtagcatgattgtagctcactgcagccttgaactccttggctcaagggatccttctgccttaggctctcgagtagctgtgactgcaggaatgcgacaccacacccgctgttttgtttttgtttttagtagaaatggggtatcgctgtgttgcctaggctagtctcagactcctggcctcaagcga

SEQ ID NO: 28035 - protein, 181 aa, Homo sapiens
MRKRTEPVALEHERCAAAGSSSSGSAAAALDADCRLKQNLRLTGPAAAEPRCAADAGMKRALGRRKGVWLRLRKILFCVLGLYIAIPFLIKLCPGIQAKLIFLNFVRVPYFIDLKKPQDQGLNHTCNYYLQPEEDVTIGVWHTVPAVWWKNAQGKDQMWYEDALASSHPIILYLHGNAGTR

SEQ ID NO: 28036 - DNA, 1281 bp, Homo sapiens
ggcagaggggccggcgccagaccctgagagcgctggggcccactcggacctcctcctcctgctctgcatcaggccccacaccgagcgcccgggcgggcgcccctcgggctgggctgcgtgcgcggagccttactggcgccttgggccctcggcggctctccccggcgaaagggcgtgtggttgcgcctgaggaagatacttttctgtgttttggggttgtacattgccattccatttctcatcaaactatgtcctggaatacaggccaaactgattttcttgaatttcgtaagagttccctatttcattgatttgaaaaaaccacaggatcaaggtttgaatcacacgtgtaactactacctgcagccagaggaagacgtgaccattggagtctggcacaccgtccctgcagtctggtggaagaacgcccaaggcaaagaccagatgtggtatgaggatgccttggcttccagccaccctatcattctgtacctgcatgggaacgcaggtaccaggtgagggagaggagcccatcatctttgctgtggagcatggctcctttttggggtgggaatgtcctggcccggtctgccggaaaccagcaggagcaacctgcggtcccacaaaattgggtgtactgacccactgcaatgagggagagcctcccaagaacgaagggaaaggcagagttctgaaggggttgagggaaggcggagtttaggtgacgtttacatgaagcagggttcccacaggctgaggccagcacggctgtgttccgtggggaccaagtgtgggaagctgtgtgcagaccgtcccctatctggagctgcagcctggattgggatgaaggaggctgagtctcagtcaggagctgagctccccagccagaggggcatgtttttttctccttgttgtaatctcaaaggtcacagcatctgctggtatgtgatttggggagcagggtttcttggagagtgagggctttggggtccctccgaggaggggtcatagtggcacttggctgtgggtgcctcgcgctcttgggaatgggcggcttcagctcactggcagcttgttttctctatatctgtcatgctgcctgaagtggcaggcagatctttgttacctgtaagatagctccaggtggcagacaggtgaagccggagccagggcagccctggaggaggtggcacacttcctggaaaaaagtggcaggtgctgagaaggggcaggagggagaggctgaaagcaccaggtgctggggtctttgcaggccaccct

SEQ ID NO: 28037 - protein, 89 aa, Homo sapiens
MRMPWLPATLSFCTCMGTQVPGEGEEPIIFAVEHGSFLGWECPGPVCRKPAGATCGPTKLGVLTHCNEGEPPKNEGKGRVLKGLREGGV

SEQ ID NO: 28038 - DNA, 1552 bp, Homo sapiens
ctgggctgggatgtgaggagcggcgggttccgggctccgggctctgggtggcggcggctgtgagcggcggcactgcggcgcaggccagcgggcgccgtcggcggctggccctgtcggccgcgggatgaggaagcggaccgagcccgtcgccttggagcatgagcgctgcgccgccgcgggctcgtcctcctccggctcggccgccgcggcgctggacgccgactgccgcctgaagcagaacctacgcctgacgggcccggcggcggctgagccgcgctgcgcagccgacgcgggaatgaagcgggcgctgggcaggcgaaagggcgtgtggttgcgcctgaggaagatacttttctgtgttttggggttgtacattgccattccatttctcatcaaactatgtcctggaatacaggccaaactgattttcttgaatttcggtccctgtgccccttcccagctggaggactttctgtgctagtgttgctccccagcactggatttctgtccacagaagactacactgccctgggggaccagcgtatctgtcttcagctgagtaagagttccctatttcattgatttgaaaaaaccacaggatcaaggtttgaatcacacgtgtaactactacctgcagccagaggaagacgtgaccattggagtctggcacaccgtccctgcagtctggtggaagaacgcccaaggcaaagaccagatgtggtatgaggatgccttggcttccagccaccctatcattctgtacctgcatgggaacgcaggtaccaggtgagggagaggagcccatcatctttgctgtggagcatggctcctttttggggtgggaatgtcctggcccggtctgccggaaaccagcaggagcaacctgcggtcccacaaaattgggtgtactgacccactgcaatgagggagagcctcccaagaacgaagggaaaggcagagttctgaaggggttgagggaaggcggagtttaggtgacgtttacatgaagcagggttcccacaggctgaggccagcacggctgtgttccgtggggaccaagtgtgggaagctgtgtgcagaccgtcccctatctggagctgcagcctggattgggatgaaggaggctgagtctcagtcaggagctgagctccccagccagaggggcatgtttttttctccttgttgtaatctcaaaggtcacagcatctgctggtatgtgatttggggagcagggtttcttggagagtgagggctttggggtccctccgaggaggggtcatagtggcacttggctgtgggtgcctcgcgctcttgggaatgggcggcttcagctcactggcagcttgttttctctatatctgtcatgctgcctgaagtggcaggcagatctttgttacctgtaagatagctccaggtggcagacaggtgaagccggagccagggcagccctggaggaggtggcacacttcctggaaaaaagtggcaggtgctgagaaggggcaggagggagaggctgaaagcaccaggtgctggggtctttgcaggccaccct

SEQ ID NO: 28039 - protein, 118 aa, Homo sapiens
MRKRTEPVALEHERCAAAGSSSSGSAAAALDADCRLKQNLRLTGPAAAEPRCAADAGMKRALGRRKGVWLRLRKILFCVLGLYIAIPFLIKLCPGIQAKLIFLNFGPCAPSQLEDFLC

SEQ ID NO: 28040 - DNA, 3291 bp, Homo sapiens
agcgcggagcggaggccgaggcgagagcctggcgctgtaggactagaacgaaaggagtgaggcgccgagagcccagataccattttggcgtgagagctggtggttggcaaggccgcgggagtgggaagcgtccgccatgttctgcgaaaaagccatggaactgatccgcgagctgcatcgcgcgcccgaagggcaactgcctgccttcaacgaggatggactcagacaagttctggaggagatgaaagctttgtatgaacaaaaccagtctgatgtgaatgaagcaaagtcaggtggacgaagtgatttgataccaactatcaaatttcgacactgttctctgttaagaaatcgacgctgcactgtagcatacctgtatgaccgcttgcttcggatcagagcactcagatgggaatatggtagcgtcttgccaaatgcattacgatttcacatggctgctgaagaaatggagtggtttaataattataaaagatctcttgctacttatatgaggtcactgggaggagatgaaggtttggacattacacaggatatgaaaccaccaaaaagcctatatattgaagtccggtgtctaaaagactatggagaatttgaagttgatgatggcacttcagtcctattaaaaaaaaatagccagcactttttacctcgatggaaatgtgagcagctgatcagacaaggagtcctggagcacatcctgtcatgaccatgcgccgaggcacttccaggcttcactcaactcatggactcctctgtactcactctctccaccactcccttcacctccctctttgattttagaagctatagacattgtttaagataactaagaatacttggctaagaagtataatttgctaactattaaggactttctttttttaatgttgtacactattcttcctactcttttttggttttggttttgttttgtagagactgtctcactatgttgcccaagctggtctcaaactcctggcctcaagcagtcctcccaccttagcttctcaaagtgttgagatcacaggcgtgagccactgcacccggcccctactcctttttctaataagctgtatctgtaatcacagcattcctacagttgttacagtgtgttttttaaatgaaagtaaacatggttacatttgaatctcttaaataagcagtcacttggctggacaggaagaaggtagatcctgtgtgtcttgttttctggtcatgtgtattgtacaagctagagagctgaatttctgagatacacattttcaaatcacatgcaagtgaagatgatggtctgtagaaattttcagtatatataatgtttaatgacatactaatttatcatctggctatttgggaaggaaggacacacatggattttgcacatttccaccatggtggctggtgtggcttgtggctatggggtgatcaccagtatcaccactttggaaggggacagtgaaattggggctagagaaggaactttgtacagttttccctgagattcagattgactgaaaagtcacatgaagagttgattgtcttttaatggtatgttttaaacagctgacattttaaattttgatgaaatccagtttattcgtttgttcttttatgctttgggtgttgcatccgagaaatcttttcccatcccaagatcacaattttttttcctttttacttctagaagtgttataattttaagctttatactttggtctatgacccgtttttttttttgttttgttttgttttttcgtttgtttctttgttttgagatggagtcttgttctgtcacccaggctggggtgcagtggcgtgatcttggctcactgcaatctctatcccctgggttcaagtgattctcttgtctcagcctcccaagtagctgggattacaggcacaggccgccacgcctggctaatttttgtatttttagtagagacagagttttaccatgttggccaggctggtttcaaactcctgacctcaagtgacccaccttggcctcccaaagttttgggattacaagtgtgggccaccgcggccagcctatgatccattttgaatgaattttttatatggtgcaaggtgtcaatccaccttcactttttcttgggaatatagatatccagctgtttcactaccattttttgaaaggactgccctttgctctatcacctttgcatttttgttaaaaagtagttgtcaatgtatatgtgggtttatttcaggactctgttttgttccattgacctgtttttctctcctgaatgccaataccatatttgtatgtagtgtatgtaattttctaataattcttgaaacagatagtattaatgtgtcatatttttgctgttgtttgtattttttgtagagatggggtttcaccgtgttggccaggctgtgttgaactcctgagctaaagcaatacacttgcctcgtcctccccatgtgctgggattacaggcgtgagccttggtgctggcccagtgtaccacatttctttttgagatttgttttggctatgttaagtcctttgcttttgatgtgaaatttgggaacaggcagggtgtggtggcttatgcctgtaatcctagaactttgggaggcctagatgggtggatcacttgagctcaggagttccagaccagcccgggcctatggcaaaactccgtctctacaaaaaatagaaaaaattagccaggtgtggtggtgcatgcctgtagtcacagttacacggcaggctgaggtgggaggatcacttgaaccccagaggtcaagactgcagtgagctgagatcacaccactgtactccagcctgggtgacaaagtgagactctatctcaaaaagaaattaggatcaatttgtcaatttctacaacaacaacaacaaaaacccctgttgggcaccttgattgagattgcattgaatttatataaaactgttgggagaattgacatcttaataatattgagtcttctggcctataaacaaggtctgtcttcctaggtattaatgttttgtcttctatttctcttaataatcttttgtagttttcagtgtacaggtctaccatgtcagcatttcatagttttgatgctaaatggtattttaaaatttcaaattctaaccacttgttgctagtaaatagaaatacaattgatgttgaacttgtatccttcagccttgctaaactgtgagttctcatggtgtttttgtaaattacatcaacagtcatgtgttctatgaataaagagttttactccttc

SEQ ID NO: 28041 - protein, 196 aa, Homo sapiens
MFCEKAMELIRELHRAPEGQLPAFNEDGLRQVLEEMKALYEQNQSDVNEAKSGGRSDLIPTIKFRHCSLLRNRRCTVAYLYDRLLRIRALRWEYGSVLPNALRFHMAAEEMEWFNNYKRSLATYMRSLGGDEGLDITQDMKPPKSLYIEVRCLKDYGEFEVDDGTSVLLKKNSQHFLPRWKCEQLIRQGVLEHILS

SEQ ID NO: 28042 - DNA, 1919 bp, Homo sapiens
gaggccgaggcgagagcctggcgctgtaggactagaacgaaaggagtgaggcgccgagagcccagataccattttggcgtgagagctggtggttggcaaggccgcgggagtgggaagcgtccgccatgttctgcgaaaaagccatggaactgatccgcgagctgcatcgcgcgcccgaagggcaactgcctgccttcaacatggagtggtttaataattataaaagatctcttgctacttatatgaggtcactgggaggagatgaaggtttggacattacacaggatatgaaaccaccaaaaagcctatatattgaagtccggtgtctaaaagactatggagaatttgaagttgatgatggcacttcagtcctattaaaaaaaaatagccagcactttttacctcgatggaaatgtgagcagctgatcagacaaggagtcctggagcacatcctgtcatgaccatgcgccgaggcacttccaggcttcactcaactcatggactcctctgtactcactctctccaccactcccttcacctccctctttgattttagaagctatagacattgtttaagataactaagaatacttggctaagaagtataatttgctaactattaaggactttctttttttaatgttgtacactattcttcctactcttttttggttttggttttgttttgtagagactgtctcactatgttgcccaagctggtctcaaactcctggcctcaagcagtcctcccaccttagcttctcaaagtgttgagatcacaggcgtgagccactgcacccggcccctactcctttttctaataagctgtatctgtaatcacagcattcctacagttgttacagtgtgttttttaaatgaaagtaaacatggttacatttgaatctcttaaataagcagtcacttggctggacaggaagaaggtagatcctgtgtgtcttgttttctggtcatgtgtattgtacaagctagagagctgaatttctgagatacacattttcaaatcacatgcaagtgaagatgatggtctgtagaaattttcagtatatataatgtttaatgacatactaatttatcatctggctatttgggaaggaaggacacacatggattttgcacatttccaccatggtggctggtgtggcttgtggctatggggtgatcaccagtatcaccactttggaaggggacagtgaaattggggctagagaaggaactttgtacagttttccctgagattcagattgactgaaaagtcacatgaagagttgattgtcttttaatggtatgttttaaacagctgacattttaaattttgatgaaatccagtttattcgtttgttcttttatgctttgggtgttgcatccgagaaatcttttcccatcccaagatcacaattttttttcctttttacttctagaagtgttataattttaagctttatactttggtctatgacccgtttttttttttgttttgttttgttttttcgtttgtttctttgttttgagatggagtcttgttctgtcacccaggctggggtgcagtggcgtgatcttggctcactgcaatctctatcccctgggttcaagtgattctcttgtctcagcctcccaagtagctgggattacaggcacaggccgccacgcctggctaatttttgtatttttagtagagacagagttttaccatgttggccaggctggtttcaaactcctgacctcaagtgacccaccttggcctcccaaagttttgggattacaagtgtgggccaccgcggccagcctatgatccattttgaatgaattttttatatggtgcaaggtgtcaatccaccttcactttttcttgggaatatagatatccagctgtttcactaccattttttgaaaggactgcc

SEQ ID NO: 28043 - protein, 111 aa, Homo sapiens
MFCEKAMELIRELHRAPEGQLPAFNMEWFNNYKRSLATYMRSLGGDEGLDITQDMKPPKSLYIEVRCLKDYGEFEVDDGTSVLLKKNSQHFLPRWKCEQLIRQGVLEHILS

SEQ ID NO: 28044 - DNA, 541 bp, Homo sapiens
caaaaaacatgtgttttctgttttcttgagtatatatatacacctaggagtaaaattactgagtcatatggtaattctgtgtgtagcttttgaggaactgtcaagtttttgcccacagggctataccgttttacattcccaccagcaatgtacgagggttccagtttctccgcatctcaccaacacttgttataaccatgctagtggggtgtgaaaggactattgctttttgctaaagtatataaatgaaagatacagttcagtattgatagcatattgccacagaattggtggggaaatcagtggatttcaatatcggtttatatgttctaggaggatggactcagacaagttctggaggagatgaaagctttgtatgaacaaaaccagtctgatgtgaatgaagcaaagtcaggtggacgaagtgatttgataccaactatcaaatttcgacactgttctctgttaagaaatcgacgctgcactgtagcatacctgtaagcttctcagtttttgcttggggtggcaggattttctgtgt

SEQ ID NO: 28045 - protein, 45 aa, Homo sapiens
MKALYEQNQSDVNEAKSGGRSDLIPTIKFRHCSLLRNRRCTVAYL

SEQ ID NO: 28046 - DNA, 1828 bp, Homo sapiens
ggtcacaacagtgatttgtgttgggatgtgtactgttttcgaatggatgatattcagtgtgtgcaagttttcttagaattttgtcaaatgatcatctctatgtttgcagatggagtggtttaataattataaaagatctcttgctacttatatgaggtcactgggaggagatgaaggtttggacattacacaggatatgaaaccaccaaaaagcctatatattgaagtccggtgtctaaaagactatggagaatttgaagttgatgatggcacttcagtcctattaaaaaaaaatagccagcactttttacctcgatggaaatgtgagcagctgatcagacaaggagtcctggagcacatcctgtcatgaccatgcgccgaggcacttccaggcttcactcaactcatggactcctctgtactcactctctccaccactcccttcacctccctctttgattttagaagctatagacattgtttaagataactaagaatacttggctaagaagtataatttgctaactattaaggactttctttttttaatgttgtacactattcttcctactcttttttggttttggttttgttttgtagagactgtctcactatgttgcccaagctggtctcaaactcctggcctcaagcagtcctcccaccttagcttctcaaagtgttgagatcacaggcgtgagccactgcacccggcccctactcctttttctaataagctgtatctgtaatcacagcattcctacagttgttacagtgtgttttttaaatgaaagtaaacatggttacatttgaatctcttaaataagcagtcacttggctggacaggaagaaggtagatcctgtgtgtcttgttttctggtcatgtgtattgtacaagctagagagctgaatttctgagatacacattttcaaatcacatgcaagtgaagatgatggtctgtagaaattttcagtatatataatgtttaatgacatactaatttatcatctggctatttgggaaggaaggacacacatggattttgcacatttccaccatggtggctggtgtggcttgtggctatggggtgatcaccagtatcaccactttggaaggggacagtgaaattggggctagagaaggaactttgtacagttttccctgagattcagattgactgaaaagtcacatgaagagttgattgtcttttaatggtatgttttaaacagctgacattttaaattttgatgaaatccagtttattcgtttgttcttttatgctttgggtgttgcatccgagaaatcttttcccatcccaagatcacaattttttttcctttttacttctagaagtgttataattttaagctttatactttggtctatgacccgtttttttttttgttttgttttgttttttcgtttgtttctttgttttgagatggagtcttgttctgtcacccaggctggggtgcagtggcgtgatcttggctcactgcaatctctatcccctgggttcaagtgattctcttgtctcagcctcccaagtagctgggattacaggcacaggccgccacgcctggctaatttttgtatttttagtagagacagagttttaccatgttggccaggctggtttcaaactcctgacctcaagtgacccaccttggcctcccaaagttttgggattacaagtgtgggccaccgcggccagcctatgatccattttgaatgaattttttatatggtgcaaggtgtcaatccaccttcactttttcttgggaatatagatatccagctgtttcactaccattttttgaaaggactgcc

SEQ ID NO: 28047 - protein, 86 aa, Homo sapiens
MEWFNNYKRSLATYMRSLGGDEGLDITQDMKPPKSLYIEVRCLKDYGEFEVDDGTSVLLKKNSQHFLPRWKCEQLIRQGVLEHILS

SEQ ID NO: 28048 - DNA, 478 bp, Homo sapiens
gatgatattcagtgtgtgcaagttttcttagaattttgtcaaatgatcatctctatgtttgcagatggagtggtttaataattataaaagatctcttgctacttatatgaggtcactgggaggagatgaaggtttggacattacacaggatatgaaaccaccaaaaagcctatatattgaagctggatgcagtggcgcgatctcggctcaacctgcaacctccacctcccaggttcacctcaactgcaacctccacctcccaggtccggtgtctaaaagactatggagaatttgaagttgatgatggcacttcagtcctattaaaaaaaaatagccagcactttttacctcgatggaaatgtgagcagctgatcagacaaggagtcctggagcacatcctgtcatgaccatgcgccgaggcacttccaggcttcactcaactcatggactcctctgtactcactctctccaccactcc

SEQ ID NO: 28049 - protein, 76 aa, Homo sapiens
MEWFNNYKRSLATYMRSLGGDEGLDITQDMKPPKSLYIEAGCSGAISAQPATSTSQVHLNCNLHLPGPVSKRLWRI

SEQ ID NO: 28050 - DNA, 466 bp, Homo sapiens
tgaccctaaggatttggtgttcactttgttcatgccagggagcaaaagaatgtttcaggtcatgtggttcttgagcttattttcctaacaggcactttttacctcgatggaaatgtgagcagctgatcagacaaggagtcctggagcacatcctgtcatgaccatgcgccgaggcacttccaggcttcactcaactcatggactcctctgctttgttatctttccacggtgctgtgacatttttctcctgcagaaaggagaagacatgccagctttgggatggcggctgccccgggaagagggaggaggctgagaacagaacaggctcccgccctccacagtgctgtggcaggatattattcttactagatatgttgatgggcacatgggtgtttcttacataactattttcctctatgtttgaaatattttatagtttaaaaaattaaaaacaaacttagaagtc

SEQ ID NO: 28051 - protein, 68 aa, Homo sapiens
MDSSALLSFHGAVTFFSCRKEKTCQLWDGGCPGKREEAENRTGSRPPQCCGRILFLLDMLMGTWVFLT

SEQ ID NO: 28052 - DNA, 926 bp, Homo sapiens
tatagacattgtttaagataactaagaatacttggctaagaagtataatttgctaactattaaggactttctttttttaatgttgtacactattcttcctactcttttttggttttggttttgttttgtagagactgtctcactatgttgcccaagctggtctcaaactcctggcctcaagcagtcctcccaccttagcttctcaaagtgttgagatcacaggcgtgagccactgcacccggcccctactcctttttctaataagctgtatctgtaatcacagcattcctacagttgttacagtgtgttttttaaatgaaagtaaacatggttacatttgaatctcttaaataagcagtcacttggctggacaggaagaaggtagatcctgtgtgtcttgttttctggtcatgtgtattgtacaagctagagagctgaatttctgagatcacaccactgtactccagcctgggtgacaaagtgagactctatctcaaaaagaaattaggatcaatttgtcaatttctacaacaacaacaacaaaaacccctgttgggcaccttgattgagattgcattgaatttatataaaactgttgggagaattgacatcttaataatattgagtcttctggcctataaacaaggtctgtcttcctaggtattaatgttttgtcttctatttctcttaataatcttttgtagttttcagtgtacaggtctaccatgtcagcatttcatagttttgatgctaaatggtattttaaaatttcaaattctaaccacttgttgctagtaaatagaaatacaattgatgttgaacttgtatccttcagccttgctaaactgtgagttctcatggtgtttttgtaaattacatcaacagtcatgtgttctatgaataaagagttttactccttcctttct

SEQ ID NO: 28053 - protein, 44 aa, Homo sapiens
MLYTILPTLFWFWFCFVETVSLCCPSWSQTPGLKQSSHLSFSKC

SEQ ID NO: 28054 - DNA, 1654 bp, Homo sapiens
ttccagccctggccccaccttcccttcagcagtccgtgttgtctgggtagtctgtggccagtgtagccctgttgcagagtgaggtctccgctgaaaggagaactggcgtggtcgttgtttgaaaagaatcaggccccagcaaggttcactggaagctaacactggacgcagcagagtctgggtctgacaggaggtcagcgtcaccattttgagggtgatggacatgttttctgcactctagcactgtgtggaagcgctggctgacagcagcctggctgtccgaattccaaagaaatgggctccttctaaatattcaggtgctgctgcatactcgggagcacacgctttccttgcccttgcaggtgggggtgtccttggatggagagggtgctcctctgtgccgcgtctcagcagccccaccagagctgtctccccttccccatgcaggtgcagggagctcacctgaggctgaggcaggcccaggcccagcacttgcaggaggtccggctggtgccccaggaccgtgtggccgagctgcatcgcctgctcagccttcagggagagcaggccaggaggcgcctggatgcacagcgggaagaacatgagaaacagctgaaagccacagaagagcgggtggaagaggcggagatgattctgaagaatatggaaatgctcctccaagagaaagtggataagctgaaggagcagtttgaaaagaacacgaagtccgacctgctgctgaaggagctgtacgtggagaacgcccacctggtgagagcacttcaggccaccgaggagaagcagcgaggcgccgagaaacaaagccgcctcttggaagaaaaagttcgcgctctcaacaaactcgtcagtaggattgcccccgcagccctctctgtgtaaagacagattattttctaggattcattcgaaagcacatcttttaaattaagccactgtgctgccttagattccgtgggtcatgagccatgagtcctgggacatctgaggattgggattctttgttcaccccgcagatagttaatgaatggtctgccctgggcaagatggaggtgggggctgggggaatatgcatgttgcagaagccggcgtttttattagcggtcctgagtaatttcccttggcaaaattcccagttttgccactctctggagccagatcctgggagctgtcagcaaggagcaggtaagtgagcagttatggacagcactttccatgtggtgcttccgaccctggctgtcagagtgaaatgtaaagtcagggctctgtacagttttgccatttcactgttctgctttaagcttagcttattagaactcttggtggagggtgcgtacacacattccagaaaaggcttcactcgctgggaacgtcaacccagcgagaaaggaggggaagccccttctccggggaccttatctgtggactcaggaatgatggtgtttattgcaaatgcacaatctttttcccattgaaatgtcatcacactggaaattgtactatatgtaaaaaaaaaaaaaagtatagttttatatttgaaatgtatgcaaattatggccatatggctgattggaatgtactactgtaatataaaaagtcactgtatttgcaataaattcttttctattaaaattga

SEQ ID NO: 28055 - protein, 173 aa, Homo sapiens
MERVLLCAASQQPHQSCLPFPMQVQGAHLRLRQAQAQHLQEVRLVPQDRVAELHRLLSLQGEQARRRLDAQREEHEKQLKATEERVEEAEMILKNMEMLLQEKVDKLKEQFEKNTKSDLLLKELYVENAHLVRALQATEEKQRGAEKQSRLLEEKVRALNKLVSRIAPAALSV

SEQ ID NO: 28056 - DNA, 4977 bp, Homo sapiens
gcggtacgggggtggtgccgcgctcctggccccgcgcgggcggacggcggaggcgcctcccagcctgctatgggatggatgaagaagagaaccactatgtctcgcagctcagggaagtctacagcagctgcgacaccacggggactggctttctggaccgccaggagctgacccagctctgccttaagcttcacctggagcagcagctgcccgtcctcctgcagacgcttctcggaaacgaccatttcgccagggttaactttgaggaatttaaggaaggttttgtggctgtgttgtcttcaaatgctggtgttcgcccctcagatgaagacagtagttctttggaatcagctgcctccagtgccatccctccaaagtatgtgaatggttctaagtggtatggccgtcggagccggcctgagctatgtgacgctgccacagaagccagacgcgtgccggagcagcaaacccaggccagcctgaaaagtcacctctggcgctcagcgtctctggagagcgtggagagtcccaagtcagatgaagaggccgagagcactaaagaagctcagaatgaattatttgaagcacaaggacagctgcagacctgggattctgaggactttgggagcccccagaagtcctgcagcccctcctttgacaccccagagagccagatccggggcgtgtgggaagagctgggggtgggcagcagcggacacctgagcgagcaggagctggctgtggtctgccagagcgtcgggctccagggactcgagaaagaggaactcgaagacctgtttaacaaactggatcaagacggagacggcaaagtgagtcttgaggaattccagcttggcctcttcagtcatgagcccgcgctacttctagagtcttccactcgggttaaaccgagcaaggcttggtctcattaccaggtcccagaggagagcggctgccacaccaccacaacctcatccctcgtgtccctgtgctccagcctgcgcctcttctccagcattgacgatggttctggcttcgcttttcctgatcaggtcctggccatgtggacccaggaggggattcagaatggcagggagatcttgcagagcctggacttcagcgtggacgagaaggtgaaccttctggagctgacctgggcccttgacaacgagctcatgacagtggacagtgccgtccagcaggcagccctggcctgctaccaccaggagctgagctaccagcaagggcaggtggagcagctggcaagggagcgtgacaaggcaaggcaggacctggagagggccgagaagaggaacctggagtttgtgaaagagatggacgactgccactccaccctggagcagctcacggagaagaaaatcaagcatctggagcaggggtaccgggaaaggctgagcctcctgcggtctgaggtggaggcggagcgagagctgttctgggagcaggcccacaggcagagggccgcgctggagtgggacgtggggcgcctgcaggctgaggaggctggcctccgcgagaagctgaccctggccctgaaggaaaacagtcgcctacagaaggagattgtggaagtggtggaaaagctttcggattcggagaggctggccctgaagctgcagaaggacctggagtttgtgctgaaggacaagctggagccacagagtgcagagctcctggcccaggaggagcggttcgcagcagtcctgaaggaatacgagctcaagtgccgggacctgcaggaccgcaacgatgagctgcaagctgagctggaaggcctgtgggcgcggctgcccaagaaccggcacagcccctcatggagcccggatgggcgcagacggcagctccctggactcggcccagcaggcatttcattcctgggtaattctgctccagtgagtatagaaacggagctgatgatggagcaggtaaaggagcattaccaagacctcaggacccagctggagaccaaggtaaattactacgaaagggaaattgcggcactgaaaaggaactttgagaaggagaggaaggacatggagcaggctcgcaggcgcgaggtcagcgtgctggagggtcagaaggccgacctggaggagctccacgagaagtctcaggaggtcatctggggcctgcaggagcagctgcaggacacagcccgcggccccgagcctgagcagatgggcctggcaccctgctgcacccaggcactgtgtggcctggccctgcggcatcacagccacctgcagcagatcaggagagaggctgaggcggagctgagtggagagctgtcggggctgggagccctgcccgctcgcagagacctgaccttggagctggaggagccgccgcagggacccctgccacgcgggagccagaggtcggagcagctggagctggagagggcactgaagctgcagccctgtgcgagcgagaagcgcgcccagatgtgcgtatcgttggccctcgaggaggaggagttggagcttgcccgcgggaagcgagtggacgggccctccctggaagcagagatgcaggccctgccgaaagatgggctggtggcaggaagtggccaggagggcacacgtggcctcctaccactgcgtccgggctgtggggagcggccactggcctggctggccccaggtgatggcagagagtctgaggaggcggcaggagccgggcctcgccgcaggcaagcccaggacacagaagctacgcagagcccggcccccgcccctgccccggcatcccacggcccctcagagaggtggtcacgcatgcagccctgtggagtggatggggatattgtcccaaaggagccagagcctttcggcgcgagcgcagcggggctggagcagcctggagcccgggagctgcctctgctgggaacagagagagacgcctcgcaaacccagccacggatgtgggagccacccctgaggccggccgcttcgtgcaggggacaggctgagaggctacaggccattcaggaagagcgagcacgaagctggagcaggggcacccaggagcaggcctcggagcagcaggcccgggccgagggcgccctggagcctgggtgtcacaagcacagtgtggaggttgccaggagagggtccttgccatcccacctccagctcgcagacccgcagggttcctggcaggagcagcttgctgccccagaagagggggagaccaaaatagcgctggagagagagaaggatgacatggaaaccaaacttctacatctggaagacgtcgtccgggctctggagaaacatgtagatttgagagagaacgacagactggagttccatagactttctgaagaaaacactttgttgaaaaacgatctgggaagggttcggcaagagcttgaagctgcagaaagtactcacgatgcacagaggaaggaaattgaggttttaaagaaagacaaggaaaaggcctgctctgagatggaggtgctcaacagacagaatcagaactacaaggatcaattatcccagctcaatgtcagggttcttcaactgggacaggaggcttctacccaccaggcccaaaacgaggagcatcgtgtgaccattcagatgttaacacagagcctggaggaggtggttcgcagtgggcagcagcagagtgaccaaatccaaaaacttagagttgaacttgaatgcctgaatcaggaacatcagagcctgcagctgccatggtcagagctgacccagacccttgaggaaagtcaagaccaggtgcagggagctcacctgaggctgaggcaggcccaggcccagcacttgcaggaggtccggctggtgccccaggaccgtgtggccgagctgcatcgcctgctcagccttcagggagagcaggccaggaggcgcctggatgcacagcgggaagaacatgagaaacagctgaaagccacagaagagcgggtggaagaggcggagatgattctgaagaatatggaaatgctcctccaagagaaagtggataagctgaaggagcagtttgaaaagaacacgaagtccgacctgctgctgaaggagctgtacgtggagaacgcccacctggtgagagcacttcaggccaccgaggagaagcagcgaggcgccgagaaacaaagccgcctcttggaagaaaaagttcgcgctctcaacaaactcgtcagtaggattgcccccgcagccctctctgtgtaaagacagattattttctaggattcattcgaaagcacatcttttaaattaagccactgtgctgccttagattccgtgggtcatgagccatgagtcctgggacatctgaggattgggattctttgttcaccccgcagatagttaatgaatggtctgccctgggcaagatggaggtgggggctgggggaatatgcatgttgcagaagccggcgtttttattagcggtcctgagtaatttcccttggcaaaattcccagttttgccactctctggagccagatcctgggagctgtcagcaaggagcaggtaagtgagcagttatggacagcactttccatgtggtgcttccgaccctggctgtcagagtgaaatgtaaagtcagggctctgtacagttttgccatttcactgttctgctttaagcttagcttattagaactcttggtggagggtgcgtacacacattccagaaaaggcttcactcgctgggaacgtcaacccagcgagaaaggaggggaagccccttctccggggaccttatctgtggactcaggaatgatggtgtttattgcaaatgcacaatctttttcccattgaaatgtcatcacactggaaattgtactatatgtaaaaaaaaaaaaaagtatagttttatatttgaaatgtatgcaaattatggccatatggctgattggaatgtactactgtaatataaaaagtcactgtatttgcaataaattcttttctattaaaattga

SEQ ID NO: 28057 - protein, 1382 aa, Homo sapiens; identical to SEQ ID NO: 3849

SEQ ID NO: 28058 - DNA, 2626 bp, Homo sapiens
tagtcagattattgtacttccttcatactcttcccttttgagtgttgtttctttaaagttctaagccaagattaaaagcccgggctctggggcttaggtgtctcggacttggttatgggcgtcaccaggcttctgcagaagtaggagcctcgctggtcttcagtctgggtagacgtggtttgagaattccagtgaagctgctgtttcagaaagagatgagactgagcgttgaacactgtttttcctgctaatggaaacagttattgtaaaagatgaatgtagcagctgagaaaaaaatatcccccacctcttcctcagattgctttgggaattcactgtccatgggtttcatgctgcctccctccttgggagggaggtgattttcatgtgcatttggtatcgaaagtctttatcaaagggctgttacctgccatgcacaccgggtggaggggccaccttgggactcaccccagggagctgtgctcctcgctgtgagggggcagctggtggcatttgccatgtgacccaccagatccccttgtctggggtcacctccagcagcctgtgagggaggagcacccaccctcagatttgcctcccagcatgggcagctcagccaaggcagggcggccctgcacgtgctgaggacaggggcgtttctaagagggaggaggctaggaagggggtggcgtgggcctgggcagccctgacatgacatgtctgacgtgtgatgtgtgacatgttacaggcatctggagcaggggtaccgggaaaggctgagcctcctgcggtctgaggtggaggcggagcgagagctgttctgggagcaggcccacaggcagagggccgcgctggagtgggacgtggggcgcctgcaggctgaggaggctggcctccgcgagaagctgaccctggccctgaaggagcctgatgagccactggcctgtgtctcctaggaaaacagtcgcctacagaaggagattgtggaagtggtggaaaagctttcggattcggagaggctggccctgaagctgcagaaggacctggagtttgtgctgaaggacaagctggagccacagagtgcagagctcctggcccaggaggagcggttcgcagcagtcctgaaggaatacgagctcaagtgccgggacctgcaggaccgcaacgatgagctgcaagctgagctggaaggcctgtgggcgcggctgcccaagaaccggcacagcccctcatggagcccggatgggcgcagacggcagctccctggactcggcccagcaggcatttcattcctgggtaattctgctccagtgagtatagaaacggagctgatgatggagcaggtaaaggagcattaccaagacctcaggacccagctggagaccaaggtaaattactacgaaagggaaattgcggcactgaaaaggaactttgagaaggagaggaaggacatggagcaggctcgcaggcgcgaggtcagcgtgctggagggtcagaaggccgacctggaggagctccacgagaagtctcaggaggtcatctggggcctgcaggagcagctgcaggacacagcccgcggccccgagcctgagcagatgggcctggcaccctgctgcacccaggcactgtgtggcctggccctgcggcatcacagccacctgcagcagatcaggtccagccagcttcttttgagatttcaagtctggggtttcttgccaagaaccaaaatttgaaattagacttaggaaacaactcagaattgctgtgcctcccgactgggtggttttcctctgggcagatgggtgagtgccaaaagaacaggtcctggcatgaggattctggctctgaatttaaaatatacattggatcatgggccatgaagctgttcactgtgtagaaacagcccagtgttctgtaccctctgcctcagccgtgcccggcagcaacattgcctccatcgctcagagacacccgcttctccagggccaggcagggtagcatgtggggagatggagaaaggcctgaagccctgaacaatgggaaagatggccagctggggttagtgaggttcccaaaaaggctcaagtgtgcaagcgagagagaaggcttacagaaagcctgtgctggtgttttatgtgttctggtgtgaggtacatgtgaagtgaccacgtctgttcttgttgggggcatctgaggtaggagaggaagtgcctggtcatcgcagacaggctgctgctcagctggcacccactgtcctgtggagagcattggccccggcttagaagaggacgggccctcccaccacactggccaggccacccccagcctgacagaaagtcatctttccggccggatgcggtggctcacacctgtaatcagcactttgggaggccaaggcgggtaaatcacttgagctcaggagttcgagaccagcctggccaacatggtgaaaccctgtctctactaaaaacacaaaaaattagctgagcatggtagcaggcgcctgtaatcccagctactcgggaagctgaggcaggagaatcacttgaattcaggaggcggaggttgcagtgagccgagatctcgccattgcactccagcctgagccacaaagtgagactcgtct

SEQ ID NO: 28059 - protein, 133 aa, Homo sapiens
MMEQVKEHYQDLRTQLETKVNYYEREIAALKRNFEKERKDMEQARRREVSVLEGQKADLEELHEKSQEVIWGLQEQLQDTARGPEPEQMGLAPCCTQALCGLALRHHSHLQQIRSSQLLLRFQVWGFLPRTKI

SEQ ID NO: 28060 - DNA, 544 bp, Homo sapiens
tggagagggccgagaagaggaacctggagtttgtgaaagagatggacgactgccactccaccctggagcagctcacggagaagaaaatcaagaaaacagtcgcctacagaaggagattgtggaagtggtggaaaagctttcggattcggagaggctggccctgaagctgcagaaggacctggagtttgtgctgaaggacaagctggagccacagagtgcagagctcctggcccaggaggagcggttcgcagcagtcctgaaggaatacgagctcaagtgccgggtacgtgcctgctctgtctgccttttagtctcatgtccaggctctgggtctccacacgcaggtggtccacagtaacgcaggagtgtctgctccagggagagcctctgcttgcggccatgcttgaccatggccttgccacactcctagacttagggttccctggctctcgttgccacctatcctgaaggccgcctctgtgtgtccagggaccatgcagggcattgttgtcttctgttgttcatgtttagctttcctgggcca

SEQ ID NO: 28061 - protein, 40 aa, Homo sapiens
MDDCHSTLEQLTEKKIKKTVAYRRRLWKWWKSFRIRRGWP

SEQ ID NO: 28062 - DNA, 291 bp, Homo sapiens
gacctgtttaacaaactggatcaagacggagacggcaaagtgagtcttgaggaattccagcttggcctcttcagtcatgagcccgcgctacttctagagtcttccactcgggttaaaccgagcaaggcttggtctcattaccaggtcccagaggagagcggctgccacaccaccacaacctcatccctcgtgtccctgtgctccagcctgcgcctcttctccagcattgacgatggttctggcttcgcttttcctgatcaggcatctggagcaggggtaccgggaaaggct

SEQ ID NO: 28063 - protein, 96 aa, Homo sapiens
DLFNKLDQDGDGKVSLEEFQLGLFSHEPALLLESSTRVKPSKAWSHYQVPEESGCHTTTTSSLVSLCSSLRLFSSIDDGSGFAFPDQASGAGVPGK

SEQ ID NO: 28064 - DNA, 3770 bp, Homo sapiens
ggtggcaaggctacggttcgcgccagcggccggcgctatggggctgagccgcgtgcgggcggttttctttgacttggacaacactctcatcgacacggccggggcgagcaggagaggcatgttggaggtgataaaactcttacaatcaaaataccattataaagaagaggctgaaatcatctgtgataaagttcaagttaaactcagcaaggaatgttttcatccttacaatacatgcattactgatttaaggacttcacattgggaagaagcaatccaggaaacaaaaggtggtgcagccaatagaaaattggctgaagaatgttatttcctttggaaatctacacgtttacagcatatgacactagcagaagacgtcaaagccatgcttactgaacttcgaaaggaggtccgcctacttctattaacgaatggggacagacagacccagagggagaagattgaggcttgtgcctgtcagtcctattttgacgctgttgttgtaggtggagagcagagagaggagaaaccagcaccgtccatattttattactgctgcaatcttctcggagtacaacctggggactgtgtgatggtcggtgacacattagaaaccgacatccaaggaggcctcaatgcaggattgaaagcaacagtctggatcaataaaaatggaatagtgccactgaagtcctccccagttccgcattacatggtttcttctgtgctagagttacctgctctcttacaaagtatagactgcaaagtcagtatgtccacttaaagcacataaaagggcatgattatgaatgttagaatcaatttgctgagtatgaaataagaaaagttagggcactccacttatgataatccagctctaagaataattttacttatgatttaatggccaatattttgaaggtcttcccaaccctattgcttctaagttgtaacaaccaaccattgagtggtacttatatctgaaaattcagattgcatgaattcaggtcagtagtatagcccagaaaatttaaggaaatatattatttgttagtctgtatctggagctttttaaaattatgttattaatcttttagtatcttggctgcataatgccaagcaggattgctttacacatggatgcacaaatgtaaggtttatcttctggcttaaaaatagatatttttaaaaaatagattttctaaaacacagatttatgaaagcaagtgaatctggttaatatgaaataagtactaagtcacatgcaaatcaaggtattatatagtgaaattattttgcatattttgaaaacataaaccatagtttttgcctactttggatgtatactttcttttatgaacctgatttttctgtatgacatttttttttttttcagagggcagggagcaatttttctatggcatgtgacagattcctccagttagaaaaagctgttaaaatcaacacatggtgctcctttaccgtgacattttctcacctgtgcacagtgagccggtagcttccttttagtcttcacctctcaaggaaatgtttttactgtcttttcccagacacacagtggggttgagggagctaggctgttttgctagagataattgcaaggcacgtggcactaaaagtcatttttcttctgtggatccataagaggaacatttcctcagtgtagcctaacaatgcagcccccaatctgttcctttttttttttgaaatgggatctctgtcgcccaggttggagtgccatggcaccatctcggctcactgcaacctctgcctcctgagctcaagtgatcctcccacctcagcctcccaagggtgtgtgtgactacaagtacacactaccacgcccagctaatgtgtgtttttgtagagatgggattttgccatgttgcccaggctggtctcgaattcctggattcaagtgatcctcccacctcagcctcctaaagtcctaggattataggcatgagccactgtgcctggccccctcatctgatagaaaattagattttgctatgagccatttcctgagggccaatttaatactcgtgtgactcttcttagagttaccatctgccttaaatttcctctgtttttcacattcttggaaatatatcattgttttgcaaatttctatatctaattcagggtttaccaggagcttaataattaatggctacatagcaaggcatcgtcttggaaccggagaattttctctagactattaggctagacagtctcatgattatactaaccaaacctggagtaaagtggttgaaaaaaaagaaagtataaaggggcttattaaagtggttaataaatatgatttaggttggtttttgatatgtttttcttccaactgttatataagaaactactaatgtaaaatagtaggctatatgttgggatgtgtatagctatgtcttcaagactaatactcagagaatcaaattgtagattgtacctatctgtgagcctatttctttagccagttttctgtctactgccaagaaacagaattctctgcctcatgcaaatgccctttcgtgtttacttttcgctctagatttttaaaaatgtgattgtgcccttgactgtaccaaagtgctgttgctataacagtgaacatttgtgaacagaggatgtttgtagtttcaaatgcagtacccatatgaccttgatcatattttagctatttaaaaattaagttggaggattttggcagaagtagtcacatgcatgattgctctgatagattggttggcgtgtgctgcagggggcttgtccttttaactctcccacaggatggatgtaggcagtgtcacattcattatgctgagagtgaaggttcatcactcctgtatcatggtagcaaatctcaacaggatagcttctaggatgttaagtgagcagttctccagcagaaatgatgtagaaggaaaaaattgaataattaaatttccttgtcttcacagtttgtattctacagagtacagtaatgtattacattccatttgcacccttccttagggaagaactttgtggttatctaccttctgagtggaatgttacagaaaatattttaaaatattggaataaacctatgattttattaatattttttgttttagaataatattccttaaaattatgggtgatgttttgtcatctttattttttttcaaagtttccctgtagtggccttctcacacaaagccagaggccctccctaacactgcttacagaggtgggcctagaacagacatgaatggacactgcacctggaataccagcacctggtggggaggtttggttccatgtgcacctccacatacaaggcacgaacatctcagatctgggagtgcccaggacccagtggatgctcagtattgtaggaaagcaggtctttaccaaagttcttggtttattgctttcaaacttctttgcaaccttcagtaagaaacattttctatcataacctctttaacacatttatagtgttagataacactgtaactatatataaatataaatataacacatgtatataaataaatataaatataacattttatagtataacattaatatgtgtatgggatccagttttatatgtttaattttcataaaacattcttgttacgtgtgatgatatttttcattccattcttttttgaattagggaatatattcattgttgaacaagtactacttgtagtacacaagtcaaaaaaataaaagggtgaatggtg

SEQ ID NO: 28065 - protein, 248 aa, Homo sapiens; identical to SEQ ID NO: 3851

SEQ ID NO: 28066 - DNA, 2337 bp, Homo sapiens
aaggctacggttcgcgccagcggccggcgctatggggctgagccgcgtgcgggcggttttctttgacttggacaacactctcatcgacacggccggggcgagcaggagaggcatgttggaggtgataaaactcttacaatcaaaataccattataaagaagaggctgaaatcatctgtgataaagttcaagttaaactcagcaaggaatgttttcatccttacaatacatgcattactgatttaaggacttcacattgggaagaagcaatccaggaaacaaaaggtggtgcagccaatagaaaattggctgaagaatgttatttcctttggaaatctacacgtttacagcatatgacactagcagaagacgtcaaagccatgcttactgaacttcgaaaggaggtccgcctacttctattaacgaatggggacagacagacccagagggagaagattgaggcttgtgcctgtcagtcctattttgacgctgttgttgtaggtggagagcagagagaggagaaaccagcaccgtccatattttattactgctgcaatcttctcggagtacaacctggggactgtgtgatggtcggtgacacattagaaaccgacatccaaggaggcctcaatgcaggattgaaagcaacagtctggatcaataaaaatggaatagtgccactgaagtcctccccagttccgcattacatggtttcttctgtgctagagttacctgctctcttacaaagtatagactgcaaagtcagtatgtccacttaaagcacataaaagggcatgattatgaatgttagaatcaatttgctgagtatgaaataagaaaagttagggcactccacttatgataatccagctctaagaataattttacttatgatttaatggccaatattttgaaggtcttcccaaccctattgcttctaagttgtaacaaccaaccattgagtggtacttatatctgaaaattcagattgcatgaattcaggtcagtagtatagcccagaaaatttaaggaaatatattatttgttagtctgtatctggagctttttaaaattatgttattaatcttttagtatcttggctgcataatgccaagcaggattgctttacacatggatgcacaaatgtaaggtttatcttctggcttaaaaatagatatttttaaaaaatagattttctaaaacacagatttatgaaagcaagtgaatctggttaatatgaaataagtactaagtcacatgcaaatcaaggtattatatagtgaaattattttgcatattttgaaaacataaaccatagtttttgcctactttggatgtatactttcttttatgaacctgatttttctgtatgacatttttttttttttcagagggcagggagcaatttttctatggcatgtgacagattcctccagttagaaaaagctgttaaaatcaacacatggtgctcctttaccgtgacattttctcacctgtgcacagtgagccggtagcttccttttagtcttcacctctcaaggaaatgtttttactgtcttttcccagacacacagtggggttgagggagctaggctgttttgctagagataattgcaaggcacgtggcactaaaagtcatttttcttctgtggatccataagaggaacatttcctcagtgtagcctaacaatgcagcccccaatctgttcctttttttttttgaaatgggatctctgtcgcccaggttggagtgccatggcaccatctcggctcactgcaacctctgcctcctgagctcaagtgatcctcccacctcagcctcccaagggtgtgtgtgactacaagtacacactaccacgcccagctaatgtgtgtttttgtagagatgggattttgccatgttgcccaggctggtctcgaattcctggattcaagtgatcctcccacctcagcctcctaaagtcctaggattataggcatgagccactgtgcctggccccctcatctgatagaaaattagattttgctatgagccatttcctgagggccaatttaatactcgtgtgactcttcttagagttaccatctgccttaaatttcctctgtttttcacattcttggaaatatatcattgttttgcaaatttctatatctaattcagggtttaccaggagcttaataattaatggctacatagcaaggcatcgtcttggaaccggagaattttctctagactattaggctagacagtctcatgattatactaaccaaacctggagtaaagtggttgaaaaaaaagaaagtataaaggggcttattaaagtggttaataaatatg

SEQ ID NO: 28067 - protein, 248 aa, Homo sapiens; identical to SEQ ID NO: 3851

SEQ ID NO: 28068 - DNA, 440 bp, Homo sapiens
ggttcgcgccagcggccggcgctatggggctgagccgcgtgcgggcggttttctttgacttggacaacactctcatcgacacggccggggcgagcaggagaggcatgttggagatggggtctcgatatgttgctcatgctggtcctgaactcctaaactcaagtgatcctgccaccttggccttccaaagtgctgggattacaggcatgagccaccatgcccggcccaaaaagcacaagttttattttcatatcttcatgaccagaatgaaagatgttggactctaaactaccaaacaaaggattgttactagctatatatgaagaagttggctttaaaaaatgagtgagttctagagcagttgggagagcctcactttgttgtctctaaaaataaggccaattcccaccagaaacggtgtagttagtagctgctttaaa

SEQ ID NO: 28069 - protein, 87 aa, Homo sapiens
MGLSRVRAVFFDLDNTLIDTAGASRRGMLEMGSRYVAHAGPELLNSSDPATLAFQSAGITGMSHHARPKKHKFYFHIFMTRMKDVGL

SEQ ID NO: 28070 - DNA, 318 bp, Homo sapiens
cgcgaagtcaccagaccatctcccggcgcgggtggaattcccgcgatctgtctcattccctgcgccgccgagaaaagtgagatcccgcgagactcccaggatgaagtctggctctgttgcccaagctggagtgtgttggcaccatcttggttcactgcaacttccacctcccaggctccagtgattctcctgcctcagcctcaagggtagctgagattacaggctggagtgcagtggcatgatctcacctcactgagaacctccacctccagggttcaagtgattctgctacctcaacctcccaaatagctgggacta

SEQ ID NO: 28071 - protein, 69 aa, Homo sapiens [sequence omitted]

SEQ ID NO: 28072 - DNA, 4662 bp, Homo sapiens
accagaccatctcccggcgcgggtggaattcccgcgatctgtctcattccctgcgccgccgagaaaagtgagatcccgcgagactcccaggaatggcaccattgttgtgcggatgctgatgcccagcgttgagcctgtcgtctcctatattaggggaagttctcctggcccttcccaactacctcccctgtgcaagtttattacaactgaacggcctcaaggatgaagtctggctctgttgcccaagctggagtgtgttggcaccatcttggttcactgcaacttccacctcccaggctccagtgattctcctgcctcagcctcaagggtagctgagattacaggctggagtgcagtggcatgatctcacctcactgagaacctccacctccagggttcaagtgattctgctacctcaacctcccaaatagctgggactacaggcactttccctacattttcaaaggcctgcatcatcacatctgccacagcattctctatcattgaggcattttctcaggaaatcacctgtgaaatattttgcagctaaccacctacctgtgccccaccagccaacatgctttactcctgccaggcaggtgagtggtccccagatccctattttaccacttgttttgtcagactgttcttggtatcagctgtgttggagggagttctctgcaaagaccaatatgggactgcatatacagagattttatttccagatatgactgtgagagaatgatgaggggagcagttacttagtctatttgagctgttataataaaataccactgactaggaaatgtataaagaggactttattttcccagagttctggaggctgggaagttcaacatcaaaacatcagtaggtgcagttgtctgttgagggctcatgtctgtttccaagatgatgccttcatgctgcatcttttggaagggaggagcattgtgtcctcacagagcagaaaatagaagggccacaggacaaactccctctatcaagccttttcataagggcacctgatcccattcgcaaagctctatcttcgtgacttgacttaatcacttcccaaaggtcccacctcctaatacttacactgtttcaacagtaaacagtttatgtagagtttcaacataaattaaggaggggacaaaacatccaaaccaaggaaggctgggagggaagccagagggaaagtgcaagaggaggtttggtggaggtgtcctagattgtttgcagtccaaggaggttggggagagtgtaacaggcctgccttggtatccctgctctgcagtcactggctaagagcagtccttagaaagcacagcctggcacaaatacaacaagaatatgtgctcagtaggaaagagaccacatttccccaatagcccaggtaatgccctcccctcaactggcatctctgttccctaaacattgacctcttttctctgaatctcttggggacacatgggttgaattcaggttctctgtagccctctggattctgtctgcctctgttatatcttcacgaacaagttatgcagcctcaactaaagcttgtaacaaagcaaagttactctcctgagtgtgtcctctgatggatggtgagatataacttcaagatgaagcctcacccacactccctgtacaaaaacgcttctcacgtaagtgtctctttaagtgcttactgtagtatgacttattgctaaactttcgtccacactcttggcattcataaggcctctctcctgtgtgtattctttcatgcacagtgaggtctgacttactggtatagcctcgcttacactcctggcaaacaaaaggcttctcctttgagtgtatccgccagtggtgtctggtgagacttctcttccagctgaagccttgcccacacacattacacacgaagggcttctcccctgagtgtgtcctctggtgtgtgaggagatttcccttccagttgaagcctcgcccacactccttgcatacaaaaggctgcttgccagaatgtgcaagctggtgtttcacaagatttgacttccagataaatccttgcccacattcactacagatgaaaggcttctcccctgagtgtgtcttctggtggaagaggagagttgattttaggatgaagcctcgcccgcaatccttgcaattaaatggcctttcccccgagtgtgtccactgatgtctaagaagatttgccttcaaactaaaacttttctcacactgcttgcacatgaagggcttctctcctgagtgtgtcctctgatgtatggtgagatttggcttcaaggtaaagcctcgcccacaatccctgcagaaaaaacgtttctcacccaagtgtgccctcaggtgcttgttataggaggacttatcccgaaaccttcgcccacactcccgacatccataaggcttctcctctgagtgtgtcctctggtgtaaagtgaaggttgacttttggataaagcctcgtccacagtccttgcacacaaaaggcttctcctctgagtgtgtgatctgatgtttcacaagggttgacttctgaataaatccttgcccacattctctacaaacaaaaggtttctcccctgagtgtgttctctggtggtagacaagagttgacttttggctaaagcttcgctcacaatccttgcacacaaaaggcttctcccctgagtgtgttctctggtgtctgaggagacttcctttcacgctaaaactttgcttacactgcctgcacgcaaagggcttctcccctgagtgtgtcctctggtgtgtgataaggtgtgacttattgctaaagcctcggccacactcctggcatctgtaaggcttctctcctgagtgtattctcttgtgcacaacgaagtatgacttattagtatagcctcgcccacactccttgcacacaaaaggcttctcccctgaatgcgccttcaagtgcttgttgtatgaggacttatcgttaaaccttcgcccacactcctggcattcataaggcttctctcctgtgtgtgttctctcatgcacagtgaggtatgacttactggtatagcctcgtccacacaccttgcacagaaaaggcttctctcctgagtgtgtcctctggtgtctgaggaggttggccttgaggctgaagcctcgcccacacacactgcacacataggacttctctcctgtgtgtgtgttctggtgcaagagcaatgctgactcatctctaaagccctggtgacactccctgcatgtaaaaagtttctgcctggaatgtgcttttttgtgtatgattaccatcatcttccggctgaagtcttgcccacgctctgcacacttgaatgctccccatcttgaattttctattcctttcaatactttgtctatttctgtaggattttccctctggccttgactagactctatttccactacactgttcctcctccttgagcttactgcatgtcttaggggtgggctggaaaatgccatgggcttagtgcttttttctttctcttgaccttcagctgtgtcactctggaagctttgatcagaaaattgtagttgctgttgcctctgatgtgcaagtccaagattcttgggccgcaggacatgttctgcatatattcctggagaatagaccaacaatgagactgaatcagtaacgaaaagtcttctatgaaagaaaaacccagaaccatattgctttactgcttaattctaataaactcataaagaacaacaaacaccaattcttctcaaactattccaaaaaattgaagcagggcagggaggaattcttcctaactcattctaaaaggccagcattatcctgataccaaaaccagacaaggacacagcaaaaacagagaactacaggccaatatccctgatgatgctaaatggaaaaatcctcaacaaaatactagcaaaaccaatgcaacaacacagaaaagataatacaccatgatcaaatgagatttatcccaagtatgcaatcatgattcaacatacacaaatcaatacttgtgatacatcacatcaacagagtgaaggaccaaaagacatatgatcatctcaacagatacagaaaaagatttgatatgattcaaaatcccattatgataaaaactttttttttttgagacagggtctcactctgtcacccaggctggagtgcagtggcatgatcatggctcactgcagcctcgacctcccaggcttacacgatcctcccacctcaactttccaaatagctagactacaggtgcctgcctgtagtcaagccataggtgccattgcctggctaatttttatattttttgtagagatgggatttcgccatgttgtccaggctggtctcaaattcttgagctcaagcaatctgcccatcttgccctcccaaagtgatgagattaaaggcataagccaccgcacccagcctatgataaaaacttaaatcaggtgtacaggaaacatatctcaacataatatagacaatatgttccaaacccacagcaaacatcttagtgaatggggaaaagataaaagtctttcctctaagaactggaagaagattcgaatgtctactttcaccactcttattaccatagttcagggagtcctagtcagaactatggtaagagaaaaaaataaggcaag

SEQ ID NO: 28073 - protein, 37 aa, Homo sapiens
MLMPSVEPVVSYIRGSSPGPSQLPPLCKFITTERPQG

SEQ ID NO: 28074 - DNA, 970 bp, Homo sapiens
atctcccggcgcgggtggaattcccgcgatctgtctcattccctgcgccgccgagaaaagtgagatcccgcgagactcccaggggtctcattctgtcacccaggttggagtgcagtggcaacatcatagctcactgcagccttgaacccctgggctcaagtgatcctcctgcttcagcctcctgagtagctggggctacaggcactttccctacattttcaaaggcctgcatcatcacatctgccacagcattctctatcattgaggcattttctcaggaaatcacctgtgaaatattttgcagctaaccacctacctgtgccccaccagccaacatgctttactcctgccaggcagctgtgtcactctggaagctttgatcagaaaattgtagttgctgttgcctctgatgtgcaagtccaagattcttgggccgcaggacatgttctgcatatattcctggagaatagaccaacaatgagactgaatcagtaacgaaaagtcttctatgaaagaaaaacccagaaccatattgctttactgcttaattctaataaactcataaagaacaacaaacaccaattcttctcaaactattccaaaaaattgaagcagggcagggaggaattcttcctaactcattctaaaaggccagcattatcctgataccaaaaccagacaaggacacagcaaaaacagagaactacaggccaatatccctgatgatgctaaatggaaaaatcctcaacaaaatactagcaaaaccaatgcaacaacacagaaaagataatacaccatgatcaaatgagatttatcccaagtatgcaatcatgattcaacatacacaaatcaatacttgtgatacatcacatcaacagagtgaaggaccaaaagacatatgatcatctcaacagatacagaaaaagatttgatatgattcaaaatcccattatgataaaaactttttttt

SEQ ID NO: 28075 - protein, 60 aa, Homo sapiens
LPARVEFPRSVSFPAPPRKVRSRETPRGLILSPRLECSGNIIAHCSLEPLGSSDPPASAS

SEQ ID NO: 28076 - DNA, 749 bp, Homo sapiens
cggcgcgggtggaattcccgcgatctgtctcattccctgcgccgccgagaaaagtgagatcccgcgagactcccaggggtctcattctgtcacccaggttggagtgcagtggcaacatcatagctcactgcagccttgaacccctgggctcaagtgatcctcctgcttcagcctcctgagtagctggggctacaggcactttccctacattttcaaaggcctgcatcatcacatctgccacagcattctctatcattgaggcattttctcaggaaatcacctgtgaaatattttgcagctaaccacctacctgtgccccaccagccaacatgctttactcctgccaggcaggttctctgtagccctctggattctgtctgcctctgttatatcttcacgaacaagttatgcagcctcaactaaagcttgtaacaaagcaaagttactctcctgagtgtgtcctctgatggatggtgagatataacttcaagatgaagcctcacccacactccctgtacaaaaacgcttctcacctgtgtcactctggaagctttgatcagaaaattgtagttgctgttgcctctgatgtgcaagtccaagattcttgggccgcaggacatgttctgcatatattcctggagaatagaccaacaatgagactgaatcagtaacgaaaagtcttctatgaaagaaaaacccagaaccatattgctttactgcttaattctaataaactcataaagaacaac

SEQ ID NO: 28077 - protein, 66 aa, Homo sapiens
MVRYNFKMKPHPHSLYKNASHLCHSGSFDQKIVVAVASDVQVQDSWAAGHVLHIFLENRPTMRLNQ

SEQ ID NO: 28078 - DNA, 498 bp, Homo sapiens
atctgtctcattccctgcgccgccgagaaaagtgagatcccgcgagactcccaggaatggcaccattgttgtgcggatgctgatgcccagcgttgagcctgtcgtctcctatattaggggaagttctcctggcccttcccaactacctcccctgtgcaagtttattacaactgaacggcctcaaggatgaagtctggctctgttgcccaagctggagtgtgttggcaccatcttggttcactgcaacttccacctcccaggctccagtgattctcctgcctcagcctcaagggtagctgagattacaggctggagtgcagtggcatgatctcacctcactgagaacctccacctccagggttcaagtgattctgctacctcaacctcccaaatagctgggactacagatggagtctcgctctgtcacccaggctggagtgcaatggtgtgatctcggctccctgcaacctccgcttcccgggttcaagctatcctcct

SEQ ID NO: 28079 - protein, 37 aa, Homo sapiens; identical to SEQ ID NO: 28073

SEQ ID NO: 28080 - DNA, 759 bp, Homo sapiens
ggaaacgtgtgtcggcgccgccggatgcggcgacttctcagtggctgtggctggcgttggtccgaagcgtggtgttcttccctggtgtctttctgcttatctctttcctccctgggccctccggcgcgagggaccgtcatcacctccccgagagaggttgtccgcgctgccaggcgctgggcagcaggctctccgggtggccgggcgggcggcgcggagacgtcggcgggcctgatgtctgccttgagcgcccgcggtcctagcctgcctgtacgcgcaggtcactgtagaatggcaccattgttgtgcggatgctgatgcccagcgttgagcctgtcgtctcctatattaggggaagttctcctggcccttcccaactacctcccctgtgcaagtttattacaactgaacggcctcaaggatgaagtctggctctgttgcccaagctggagtgtgttggcaccatcttggttcactgcaacttccacctcccaggctccagtgattctcctgcctcagcctcaagggtagctgagattacaggctggagtgcagtggcatgatctcacctcactgagaacctccacctccagggttcaagtgattctgctacctcaacctcccaaatagctgggactacagggtctcattctgtcacccaggttggagtgcagtggcaacatcatagctcactgcagccttgaacccctgggctcaagtgatcctcctgcttcagcctcctgagtagctggggctaca

SEQ ID NO: 28081 - protein, 97 aa, Homo sapiens
MRRLLSGCGWRWSEAWCSSLVSFCLSLSSLGPPARGTVITSPREVVRAARRWAAGSPGGRAGGAETSAGLMSALSARGPSLPVRAGHCRMAPLLCGC

SEQ ID NO: 28082 - DNA, 1315 bp, Homo sapiens
gtggtgttcttccctggtgtctttctgcttatctctttcctccctgggccctccggcgcgagggaccgtcatcacctccccgagagaggttgtccgcgctgccaggcgctgggcagcaggctctccgggtggccgggcgggcggcgcggagacgtcggcgggcctgatgtctgccttgagcgcccgcggtcctagcctgcctgtacgcgcaggtcactgtagaatggcaccattgttgtgcggatgctgatgcccagcgttgagcctgtcgtctcctatattaggggaagttctcctggcccttcccaactacctcccctgtgcaagtttattacaactgaacggcctcaaggatgaagtctggctctgttgcccaagctggagtgtgttggcaccatcttggttcactgcaacttccacctcccaggctccagtgattctcctgcctcagcctcaagggtagctgagattacaggctggagtgcagtggcatgatctcacctcactgagaacctccacctccagggttcaagtgattctgctacctcaacctcccaaatagctgggactacaggaaaacattctgcctgtgttgcaatatccagaaactcctagatatactgatcaacagcagtttgaatgttttcctgatcagtgccattgacatagtcctgactcaccagagaagcaaagcaagcctcgaaagatggctccaattcattcaccaggtactgtgagaaggtctcagagtatctggtgctgcctgaagaagtgaagcctggccccggagctccaatgtgggtagtgggggccctggtggctgccaagagaacataccacctagtggagccaccgtgtctcgaatagcctgtatttctttatgattcaatcttgttatataaaatgcatctaggaatttattcatttcctctaggttttccactttgttggtgtataattgttcataagtctctaatgaacctttgcattcctcgttattgatttctagttttattccattgttgtctgagaagatgctagatatgatttcaatttttttttttttttgagacggagtctcgctttatcgcccaggctggagtgcagtggcgtgaactcggctaactgcaagctccacctcctgggttcacgccattctcctgcctcagcctcctgagtagctgggactacaggcgcccaccaccacgcccagctaattttttgtatttttagtagagacagggtttcactgtgttagcctggtctcgaactcctgaccttgtgatccgcctgccttggtgtcccaaagtgctgg

SEQ ID NO: 28083 - protein, 37 aa, Homo sapiens; identical to SEQ ID NO: 28073

SEQ ID NO: 28084 - DNA, 440 bp, Homo sapiens
aatggcaccattgttgtgcggatgctgatgcccagcgttgagcctgtcgtctcctatattaggggaagttctcctggcccttcccaactacctcccctgtgcaagtttattacaactgaacggcctcaaggatgaagtctggctctgttgcccaagctggagtgtgttggcaccatcttggttcactgcaacttccacctcccaggctccagtgattctcctgcctcagcctcaagggtagctgagattacaggctggagtgcagtggcatgatctcacctcactgagaacctccacctccagggttcaagtgattctgctacctcaacctcccaaatagctgggactacaggtgtgtgccaccttgcctgctaatttttgtatttttagtaaagacggggtttcaccatgctagccaggctggtctcgaactcctgacc

SEQ ID NO: 28085 - protein, 37 aa, Homo sapiens; identical to SEQ ID NO: 28073

SEQ ID NO: 28086 - DNA, 3126 bp, Homo sapiens
ggtcctcctgagccttccccctctgattctccctcccttcctgccctgggtggctccagcaaatggcccgtggagcctacaaccaggagtcacctcatggtttttttccctgtgagcaggaattctccattctaaaccagaactcatcaggcggctagagcaaggggaagtgccctggggagaagagagaagacgccggccaggcccctgtgcaggaatatatgcagaacatgtcctgcggcccaagaatcttggacttgcacatcagaggcaacagcaactacaattttctgatcaaagcttccagagtgacacagctgaaggtcaagagaaagaaaaaagcactaagcccatggcattttccagcccacccctaagacatgcagtaagctcaaggaggaggaacagtgtagtggaaatagagtctagtcaaggccagagggaaaatcctacagaaatagacaaagtattgaaaggaatagaaaattcaagatggggagcattcaagtgtgcagagcgtgggcaagacttcagccggaagatgatggtaatcatacacaaaaaagcacattccaggcagaaactttttacatgcagggagtgtcaccagggctttagagatgagtcagcattgctcttgcaccagaacacacacacaggagagaagtcctatgtgtgcagtgtgtgtgggcgaggcttcagcctcaaggccaacctcctcagacaccagaggacacactcaggagagaagccttttctgtgcaaggtgtgtggacgaggctataccagtaagtcatacctcactgtgcatgagagaacacacacaggagagaagccttatgaatgccaggagtgtgggcgaaggtttaacgataagtcctcatacaacaagcacttgaaggcgcattcaggggagaagccttttgtgtgcaaggagtgtgggcgaggctatactaataagtcatacttcgttgtgcacaagagaatacactcaggagagaagccttacagatgccaggagtgtggccgaggctttagcaataagtcacaccttatcacacaccagaggacacactcaggggagaagccctttgcgtgcaggcagtgtaagcaaagttttagcgtgaaaggaagtctcctcagacaccagagaacacactcaggggagaagccttttgtgtgcaaggattgtgagcgaagctttagccaaaagtcaactcttgtctaccaccagagaacacactcaggggagaaaccttttgtttgtagagaatgtgggcaaggatttattcagaagtcaacccttgtgaaacatcagatcacacactcagaggagaagccttttgtgtgcaaggactgtggacgaggctttatccaaaagtcaaccttcactttacaccagaggacacactcagaggagaagccttatggatgtcgggagtgtgggcgaaggtttcgggataagtcctcctataacaagcacctgagggcacacttgggtgagaaacgttttttctgcagggattgtgggcgaggctttaccttgaagccaaatctcaccatacatcagaggacacactcaggagagaagcccttcatgtgcaagcagtgtgagaaaagttttagtttgaaggcaaatcttcttagacatcagtggacacactcgggggaaaggccatttaattgcaaggattgcgggcgaggcttcatcctaaaatcaactctcctcttccaccagaagacacactcaggggagaagcctttcatctgtagtgaatgtgggcaaggatttatctggaagtcaaatcttgtgaaacaccagcttgcacattctggcaagcagccttttgtatgcaaggagtgtgggcgaggcttcaactggaagggaaatctcctcacacaccagaggacacactcaggggagaagcccttcgtgtgtaatgtgtgtgggcaaggcttcagctggaagagaagtctcaccagacaccactggcggatacactcaaaggagaagccttttgtttgccaggagtgtaagcgaggctataccagtaagtcagacctcactgtgcatgaaagaatacacacaggagagaggccttatgaatgccaagagtgtggacgaaagtttagcaataagtcatactacagtaagcacttaaagagacacttacgtgagaagcgtttttgtacagggagtgtgggtgaggcttcatcttgaagttatatctcaccatccatcagaggacacactcaggagagtaactttgctttgttacaagctttagttgaggctgcataacttgttcgtgaagatataacagaggcagacagaatccagagggctacagagaacctgaattcaacccatgtgtccccaagagattcagagaaaagaggtcaatgtttagggaacagagatgccagttgaggggagggcattacctgggctattggggaaatgtggtctctttcctactgagcacatattcttgttgtatttgtgccaggctgtgctttctaaggactgctcttagccagtgactgcagagcagggataccaaggcaggcctgttacactctccccaacctccttggactgcaaacaatctaggacacctccaccaaacctcctcttgcactttccctctggcttccctcccagccttccttggtttggatgttttgtcccctccttaatttatgttgaaactctacataaactgtttactgttgaaacagtgtaagtattaggaggtgggacctttgggaagtgattaagtcaagtcacgaagatagagctttgcgaatgggatcaggtgcccttatgaaaaggcttgatagagggagtttgtcctgtggcccttctattttctgctctgtgaggacacaatgctcctcccttccaaaagatgcagcatgaaggcatcatcttggaaacagacatgagccctcaacagacaactgcacctactgatgttttgatgttgaacttcccagcctccagaactctgggaaaataaagtcctctttatacatttcctagtcagtggtattttattataacagctcaaatagactaagtaactgctcccctcatcattctctcacagtcatatctggaaa

SEQ ID NO: 28087 - protein, 622 aa, Homo sapiens [sequence omitted]

SEQ ID NO: 28088 - DNA, 3347 bp, Homo sapiens
cttgaagtgggcggtggggctgcggcttgccgagcgccccgggtctgggccgccactcagtctccgttcccggttgcgtgtagtggcggctcgggcggtgaacagcccggatttcacaggggcgccgagcaacccagattggccatctgcaagcttcccttctccgtggagagcaggaagacagtcatgggacctcagggagccaggagacaggctttcttggcatttggggatgtcactgtggatttcacccagaaggaatggaggctgctgagccctgctcagagggccctgtacagggaggtgacactggagaactacagccacctggtctcactaggaattctccattctaaaccagaactcatcaggcggctagagcaaggggaagtgccctggggagaagagagaagacgccggccaggcccctgtgcaggaatatatgcagaacatgtcctgcggcccaagaatcttggacttgcacatcagaggcaacagcaactacaattttctgatcaaagcttccagagtgacacagctgaaggtcaagagaaagaaaaaagcactaagcccatggcattttccagcccacccctaagacatgcagtaagctcaaggaggaggaacagtgtagtggaaatagagtctagtcaaggccagagggaaaatcctacagaaatagacaaagtattgaaaggaatagaaaattcaagatggggagcattcaagtgtgcagagcgtgggcaagacttcagccggaagatgatggtaatcatacacaaaaaagcacattccaggcagaaactttttacatgcagggagtgtcaccagggctttagagatgagtcagcattgctcttgcaccagaacacacacacaggagagaagtcctatgtgtgcagtgtgtgtgggcgaggcttcagcctcaaggccaacctcctcagacaccagaggacacactcaggagagaagccttttctgtgcaaggtgtgtggacgaggctataccagtaagtcatacctcactgtgcatgagagaacacacacaggagagaagccttatgaatgccaggagtgtgggcgaaggtttaacgataagtcctcatacaacaagcacttgaaggcgcattcaggggagaagccttttgtgtgcaaggagtgtgggcgaggctatactaataagtcatacttcgttgtgcacaagagaatacactcaggagagaagccttacagatgccaggagtgtggccgaggctttagcaataagtcacaccttatcacacaccagaggacacactcaggggagaagccctttgcgtgcaggcagtgtaagcaaagttttagcgtgaaaggaagtctcctcagacaccagagaacacactcaggggagaagccttttgtgtgcaaggattgtgagcgaagctttagccaaaagtcaactcttgtctaccaccagagaacacactcaggggagaaaccttttgtttgtagagaatgtgggcaaggatttattcagaagtcaacccttgtgaaacatcagatcacacactcagaggagaagccttttgtgtgcaaggactgtggacgaggctttatccaaaagtcaaccttcactttacaccagaggacacactcagaggagaagccttatggatgtcgggagtgtgggcgaaggtttcgggataagtcctcctataacaagcacctgagggcacacttgggtgagaaacgttttttctgcagggattgtgggcgaggctttaccttgaagccaaatctcaccatacatcagaggacacactcaggagagaagcccttcatgtgcaagcagtgtgagaaaagttttagtttgaaggcaaatcttcttagacatcagtggacacactcgggggaaaggccatttaattgcaaggattgcgggcgaggcttcatcctaaaatcaactctcctcttccaccagaagacacactcaggggagaagcctttcatctgtagtgaatgtgggcaaggatttatctggaagtcaaatcttgtgaaacaccagcttgcacattctggcaagcagccttttgtatgcaaggagtgtgggcgaggcttcaactggaagggaaatctcctcacacaccagaggacacactcaggggagaagcccttcgtgtgtaatgtgtgtgggcaaggcttcagctggaagagaagtctcaccagacaccactggcggatacactcaaaggagaagccttttgtttgccaggagtgtaagcgaggctataccagtaagtcagacctcactgtgcatgaaagaatacacacaggagagaggccttatgaatgccaagagtgtggacgaaagtttagcaataagtcatactacagtaagcacttaaagagacacttacgtgagaagcgtttttgtacagggagtgtgggtgaggcttcatcttgaagttatatctcaccatccatcagaggacacactcaggagagtaactttgctttgttacaagctttagttgaggctgcataacttgttcgtgaagatataacagaggcagacagaatccagagggctacagagaacctgaattcaacccatgtgtccccaagagattcagagaaaagaggtcaatgtttagggaacagagatgccagttgaggggagggcattacctgggctattggggaaatgtggtctctttcctactgagcacatattcttgttgtatttgtgccaggctgtgctttctaaggactgctcttagccagtgactgcagagcagggataccaaggcaggcctgttacactctccccaacctccttggactgcaaacaatctaggacacctccaccaaacctcctcttgcactttccctctggcttccctcccagccttccttggtttggatgttttgtcccctccttaatttatgttgaaactctacataaactgtttactgttgaaacagtgtaagtattaggaggtgggacctttgggaagtgattaagtcaagtcacgaagatagagctttgcgaatgggatcaggtgcccttatgaaaaggcttgatagagggagtttgtcctgtggcccttctattttctgctctgtgaggacacaatgctcctcccttccaaaagatgcagcatgaaggcatcatcttggaaacagacatgagccctcaacagacaactgcacctactgatgttttgatgttgaacttcccagcctccagaactctgggaaaataaagtcctctttatacatttcctagtcagtggtattttattataacagctcaaatagactaagtaactgctcccctcatcattctctcacagtcatatctggaaa

SEQ ID NO: 28089 - protein, 751 aa, Homo sapiens; identical to SEQ ID NO: 3853

SEQ ID NO: 28090 - DNA, 3394 bp, Homo sapiens
agatgcgtggtccaccatcggtgacctcaccgcctcggttcgccctcagccgccccgattggccatctgcaagcttcccttctccgtggagagcaggaagacagtcatgggacctcagggagccaggagacagcaggtgactggcctgtgggtgtcactcatcaagtagtgatctgtgtacagatggcagaacctggaatcctccaactgcgtgagtgcaacactgtccctggtgagcatgcctgggttttgtgttacaggctttcttggcatttggggatgtcactgtggatttcacccagaaggaatggaggctgctgagccctgctcagagggccctgtacagggaggtgacactggagaactacagccacctggtctcactaggaattctccattctaaaccagaactcatcaggcggctagagcaaggggaagtgccctggggagaagagagaagacgccggccaggcccctgtgcaggaatatatgcagaacatgtcctgcggcccaagaatcttggacttgcacatcagaggcaacagcaactacaattttctgatcaaagcttccagagtgacacagctgaaggtcaagagaaagaaaaaagcactaagcccatggcattttccagcccacccctaagacatgcagtaagctcaaggaggaggaacagtgtagtggaaatagagtctagtcaaggccagagggaaaatcctacagaaatagacaaagtattgaaaggaatagaaaattcaagatggggagcattcaagtgtgcagagcgtgggcaagacttcagccggaagatgatggtaatcatacacaaaaaagcacattccaggcagaaactttttacatgcagggagtgtcaccagggctttagagatgagtcagcattgctcttgcaccagaacacacacacaggagagaagtcctatgtgtgcagtgtgtgtgggcgaggcttcagcctcaaggccaacctcctcagacaccagaggacacactcaggagagaagccttttctgtgcaaggtgtgtggacgaggctataccagtaagtcatacctcactgtgcatgagagaacacacacaggagagaagccttatgaatgccaggagtgtgggcgaaggtttaacgataagtcctcatacaacaagcacttgaaggcgcattcaggggagaagccttttgtgtgcaaggagtgtgggcgaggctatactaataagtcatacttcgttgtgcacaagagaatacactcaggagagaagccttacagatgccaggagtgtggccgaggctttagcaataagtcacaccttatcacacaccagaggacacactcaggggagaagccctttgcgtgcaggcagtgtaagcaaagttttagcgtgaaaggaagtctcctcagacaccagagaacacactcaggggagaagccttttgtgtgcaaggattgtgagcgaagctttagccaaaagtcaactcttgtctaccaccagagaacacactcaggggagaaaccttttgtttgtagagaatgtgggcaaggatttattcagaagtcaacccttgtgaaacatcagatcacacactcagaggagaagccttttgtgtgcaaggactgtggacgaggctttatccaaaagtcaaccttcactttacaccagaggacacactcagaggagaagccttatggatgtcgggagtgtgggcgaaggtttcgggataagtcctcctataacaagcacctgagggcacacttgggtgagaaacgttttttctgcagggattgtgggcgaggctttaccttgaagccaaatctcaccatacatcagaggacacactcaggagagaagcccttcatgtgcaagcagtgtgagaaaagttttagtttgaaggcaaatcttcttagacatcagtggacacactcgggggaaaggccatttaattgcaaggattgcgggcgaggcttcatcctaaaatcaactctcctcttccaccagaagacacactcaggggagaagcctttcatctgtagtgaatgtgggcaaggatttatctggaagtcaaatcttgtgaaacaccagcttgcacattctggcaagcagccttttgtatgcaaggagtgtgggcgaggcttcaactggaagggaaatctcctcacacaccagaggacacactcaggggagaagcccttcgtgtgtaatgtgtgtgggcaaggcttcagctggaagagaagtctcaccagacaccactggcggatacactcaaaggagaagccttttgtttgccaggagtgtaagcgaggctataccagtaagtcagacctcactgtgcatgaaagaatacacacaggagagaggccttatgaatgccaagagtgtggacgaaagtttagcaataagtcatactacagtaagcacttaaagagacacttacgtgagaagcgtttttgtacagggagtgtgggtgaggcttcatcttgaagttatatctcaccatccatcagaggacacactcaggagagtaactttgctttgttacaagctttagttgaggctgcataacttgttcgtgaagatataacagaggcagacagaatccagagggctacagagaacctgaattcaacccatgtgtccccaagagattcagagaaaagaggtcaatgtttagggaacagagatgccagttgaggggagggcattacctgggctattggggaaatgtggtctctttcctactgagcacatattcttgttgtatttgtgccaggctgtgctttctaaggactgctcttagccagtgactgcagagcagggataccaaggcaggcctgttacactctccccaacctccttggactgcaaacaatctaggacacctccaccaaacctcctcttgcactttccctctggcttccctcccagccttccttggtttggatgttttgtcccctccttaatttatgttgaaactctacataaactgtttactgttgaaacagtgtaagtattaggaggtgggacctttgggaagtgattaagtcaagtcacgaagatagagctttgcgaatgggatcaggtgcccttatgaaaaggcttgatagagggagtttgtcctgtggcccttctattttctgctctgtgaggacacaatgctcctcccttccaaaagatgcagcatgaaggcatcatcttggaaacagacatgagccctcaacagacaactgcacctactgatgttttgatgttgaacttcccagcctccagaactctgggaaaataaagtcctctttatacatttcctagtcagtggtattttattataacagctcaaatagactaagtaactgctcccctcatcattctctcacagtcatatctggaaa

SEQ ID NO: 28091 - protein, 54 aa, Homo sapiens
MPGFCVTGFLGIWGCHCGFHPEGMEAAEPCSEGPVQGGDTGELQPPGLTRNSPF

SEQ ID NO: 28092 - DNA, 3293 bp, Homo sapiens
agatccctgggcgtcagcgagccgtgagatgcgtggtccaccatcggtgacctcaccgcctcggttcgccctcagccgccccgattggccatctgcaagcttcccttctccgtggagagcaggaagacagtcatgggacctcagggagccaggagacaggctttcttggcatttggggatgtcactgtggatttcacccagaaggaatggaggctgctgagccctgctcagagggccctgtacagggaggtgacactggagaactacagccacctggtctcactaggaattctccattctaaaccagaactcatcaggcggctagagcaaggggaagtgccctggggagaagagagaagacgccggccaggcccctgtgcaggaatatatgcagaacatgtcctgcggcccaagaatcttggacttgcacatcagaggcaacagcaactacaattttctgatcaaagcttccagagtgacacagctgaaggtcaagagaaagaaaaaagcactaagcccatggcattttccagcccacccctaagacatgcagtaagctcaaggaggaggaacagtgtagtggaaatagagtctagtcaaggccagagggaaaatcctacagaaatagacaaagtattgaaaggaatagaaaattcaagatggggagcattcaagtgtgcagagcgtgggcaagacttcagccggaagatgatggtaatcatacacaaaaaagcacattccaggcagaaactttttacatgcagggagtgtcaccagggctttagagatgagtcagcattgctcttgcaccagaacacacacacaggagagaagtcctatgtgtgcagtgtgtgtgggcgaggcttcagcctcaaggccaacctcctcagacaccagaggacacactcaggagagaagccttttctgtgcaaggtgtgtggacgaggctataccagtaagtcatacctcactgtgcatgagagaacacacacaggagagaagccttatgaatgccaggagtgtgggcgaaggtttaacgataagtcctcatacaacaagcacttgaaggcgcattcaggggagaagccttttgtgtgcaaggagtgtgggcgaggctatactaataagtcatacttcgttgtgcacaagagaatacactcaggagagaagccttacagatgccaggagtgtggccgaggctttagcaataagtcacaccttatcacacaccagaggacacactcaggggagaagccctttgcgtgcaggcagtgtaagcaaagttttagcgtgaaaggaagtctcctcagacaccagagaacacactcaggggagaagccttttgtgtgcaaggattgtgagcgaagctttagccaaaagtcaactcttgtctaccaccagagaacacactcaggggagaaaccttttgtttgtagagaatgtgggcaaggatttattcagaagtcaacccttgtgaaacatcagatcacacactcagaggagaagccttttgtgtgcaaggactgtggacgaggctttatccaaaagtcaaccttcactttacaccagaggacacactcagaggagaagccttatggatgtcgggagtgtgggcgaaggtttcgggataagtcctcctataacaagcacctgagggcacacttgggtgagaaacgttttttctgcagggattgtgggcgaggctttaccttgaagccaaatctcaccatacatcagaggacacactcaggagagaagcccttcatgtgcaagcagtgtgagaaaagttttagtttgaaggcaaatcttcttagacatcagtggacacactcgggggaaaggccatttaattgcaaggattgcgggcgaggcttcatcctaaaatcaactctcctcttccaccagaagacacactcaggggagaagcctttcatctgtagtgaatgtgggcaaggatttatctggaagtcaaatcttgtgaaacaccagcttgcacattctggcaagcagccttttgtatgcaaggagtgtgggcgaggcttcaactggaagggaaatctcctcacacaccagaggacacactcaggggagaagcccttcgtgtgtaatgtgtgtgggcaaggcttcagctggaagagaagtctcaccagacaccactggcggatacactcaaaggagaagccttttgtttgccaggagtgtaagcgaggctataccagtaagtcagacctcactgtgcatgaaagaatacacacaggagagaggccttatgaatgccaagagtgtggacgaaagtttagcaataagtcatactacagtaagcacttaaagagacacttacgtgagaagcgtttttgtacagggagtgtgggtgaggcttcatcttgaagttatatctcaccatccatcagaggacacactcaggagagtaactttgctttgttacaagctttagttgaggctgcataacttgttcgtgaagatataacagaggcagacagaatccagagggctacagagaacctgaattcaacccatgtgtccccaagagattcagagaaaagaggtcaatgtttagggaacagagatgccagttgaggggagggcattacctgggctattggggaaatgtggtctctttcctactgagcacatattcttgttgtatttgtgccaggctgtgctttctaaggactgctcttagccagtgactgcagagcagggataccaaggcaggcctgttacactctccccaacctccttggactgcaaacaatctaggacacctccaccaaacctcctcttgcactttccctctggcttccctcccagccttccttggtttggatgttttgtcccctccttaatttatgttgaaactctacataaactgtttactgttgaaacagtgtaagtattaggaggtgggacctttgggaagtgattaagtcaagtcacgaagatagagctttgcgaatgggatcaggtgcccttatgaaaaggcttgatagagggagtttgtcctgtggcccttctattttctgctctgtgaggacacaatgctcctcccttccaaaagatgcagcatgaaggcatcatcttggaaacagacatgagccctcaacagacaactgcacctactgatgttttgatgttgaacttcccagcctccagaactctgggaaaataaagtcctctttatacatttcctagtcagtggtattttattataacagctcaaatagactaagtaactgctcccctcatcattctctcacagtcatatctggaaa

SEQ ID NO: 28093 - protein, 751 aa, Homo sapiens; identical to SEQ ID NO: 3853

SEQ ID NO: 28094 - DNA, 3037 bp, Homo sapiens
ggtcctcctgagccttccccctctgattctccctcccttcctgccctgggtggctccagcaaatggcccgtggagcctacaaccaggagtcacctcatggtttttttccctgtgagcaggaattctccattctaaaccagaactcatcaggcggctagagcaaggggaagtgccctggggagaagagagaagacgccggccaggcccctgtgcaggaatatatgcagaacatgtcctgcggcccaagaatcttggacttgcacatcagaggcaacagcaactacaattttctgatcaaagcttccagagtgacacagctgaaggtcaagagaaagaaaaaagcactaagcccatggcattttccagcccacccctaagacatgcagtaagctcaaggaggaggaacagtgtagtggaaatagagtctagtcaaggccagagggaaaatcctacagaaatagacaaagtattgaaaggaatagaaaattcaagatggggagcattcaagtgtgcagagcgtgggcaagacttcagccggaagatgatggtaatcatacacaaaaaagcacattccaggcagaaactttttacatgcagggagtgtcaccagggctttagagatgagtcagcattgctcttgcaccagaacacacacacaggagagaagtcctatgtgtgcagtgtgtgtgggcgaggcttcagcctcaaggccaacctcctcagacaccagaggacacactcaggagagaagccttttctgtgcaaggtgtgtggacgaggctataccagtaagtcatacctcactgtgcatgagagaacacacacaggagagaagccttatgaatgccaggagtgtgggcgaaggtttaacgataagtcctcatacaacaagcacttgaaggcgcattcaggggagaagccttttgtgtgcaaggagtgtgggcgaggctatactaataagtcatacttcgttgtgcacaagagaatacactcaggagagaagccttacagatgccaggagtgtggccgaggctttagcaataagtcacaccttatcacacaccagaggacacactcaggggagaagccctttgcgtgcaggcagtgtaagcaaagttttagcgtgaaaggaagtctcctcagacaccagagaacacactcaggggagaagccttttgtgtgcaaggattgtgagcgaagctttagccaaaagtcaactcttgtctaccaccagagaacacactcaggggagaaaccttttgtttgtagagaatgtgggcaaggatttattcagaagtcaacccttgtgaaacatcagatcacacactcagaggagaagccttttgtgtgcaaggactgtggacgaggctttatccaaaagtcaaccttcactttacaccagaggacacactcagaggagaagccttatggatgtcgggagtgtgggcgaaggtttcgggataagtcctcctataacaagcacctgagggcacacttgggtgagaaacgttttttctgcagggattgtgggcgaggctttaccttgaagccaaatctcaccatacatcagaggacacactcaggagagaagcccttcatgtgcaagcagtgtgagaaaagttttagtttgaaggcaaatcttcttagacatcagtggacacactcgggggaaaggccatttaattgcaaggattgcgggcgaggcttcatcctaaaatcaactctcctcttccaccagaagacacactcaggggagaagcctttcatctgtagtgaatgtgggcaaggatttatctggaagtcaaatcttgtgaaacaccagcttgcacattctggcaagcagccttttgtatgcaaggagtgtgggcgaggcttcaactggaagggaaatctcctcacacaccagaggacacactcaggggagaagcccttcgtgtgtaatgtgtgtgggcaaggcttcagctggaagagaagtctcaccagacaccactggcggatacactcaaaggagaagccttttgtttgccaggagtgtaagcgaggctataccagtaagtcagacctcactgtgcatgaaagaatacacacaggagagaggccttatgaatgccaagagtgtggacgaaagtttagcaataagtcatactacagtaagcacttaaagagacacttacgtgagaagcgtttttgtacagggagtgtgggtgaggcttcatcttgaagttatatctcaccatccatcagaggacacactcaggagagtaactttgctttgttacaagctttagttgaggctgcataacttgttcgtgaagatataacagaggcagacagaatccagagggctacagagaacctgaattcaacccatgtgtccccaagagattcagagaaaagaggtcaatgtttagggaacagagatgccagttgaggggagggcattacctgggctattggggaaatgtggtctctttcctactgagcacatattcttgttgtatttgtgccaggctgtgctttctaaggactgctcttagccagtgactgcagagcagggataccaaggcaggcctgttacactctccccaacctccttggactgcaaacaatctaggacacctccaccaaacctcctcttgcactttccctctggcttccctcccagccttccttggtttggatgttttgtcccctccttaatttatgttgaaactctacataaactgtttactgttgaaacagtgtaagtattaggaggtgggacctttgggaagtgattaagtcaagtcacgaagatagagctttgcgaatgggatcaggtgcccttatgaaaaggcttgatagagggagtttgtcctgtggcccttctattttctgctctgtgaggacacaatgctcctcccttccaaaagatgcagcatgaaggcatcatcttggaaacagacatgagccctcaacagacaactgcacctactgatgttttgatgttgaacttcccagcctccagaactctgggaaaataaagtcctctttatac

SEQ ID NO: 28095 - protein, 622 aa, Homo sapiens [sequence omitted]

SEQ ID NO: 28096 - DNA, 3015 bp, Homo sapiens
cacactccccatgctattaatttgttaaaggctttggtgttgtacagtactgaataactgccaatgccatctgcctgtggccttctcaagtttgtctgcacctgtggttatcctgacttcaaacccggggagacagaggctagaagaggcagacagctcttgtgtattctgtccagtgcaaagaacacctggaactctgagccctaaccttaaatgcaagacctcatctgcaggtgttcctcatccttttagcccctcagtgatgtaagcaacaaacgtcacccagctcctggggcacacttcactcccagatgagcttgtcctggatttgcagggagcctggctccctagaccttttggccagatccccacaggggaattgtgcaggtgcgccctccccagatccccagttggtattggaatcacaccaactgtcacacatggggagggcagctgcacccagccaccctctgacttctctcctcccacagattggccatctgcaagcttcccttctccgtggagagcaggaagacagtcatgggacctcagggagccaggagacaggctttcttggcatttggggatgtcactgtggatttcacccagaaggaatggaggctgctgagccctgctcagagggccctgtacagggaggtgacactggagaactacagccacctggtctcactaggaattctccattctaaaccagaactcatcaggcggctagagcaaggggaagtgccctggggagaagagagaagacgccggccaggcccctgtgcaggaatatatgcagaacatgtcctgcggcccaagaatcttggacttgcacatcagaggcaacagcaactacaattttctgatcaaagcttccagagtgacacagctgaaggtcaagagaaagaaaaaagcactaagcccatggcattttccagcccacccctaagacatgcagtaagctcaaggaggaggaacagtgtagtggaaatagagtctagtcaaggccagagggaaaatcctacagaaatagacaaagtattgaaaggaatagaaaattcaagatggggagcattcaagtgtgcagagcgtgggcaagacttcagccggaagatgatggtaatcatacacaaaaaagcacattccaggcagaaactttttacatgcagggagtgtcaccagggctttagagatgagtcagcattgctcttgcaccagaacacacacacaggagagaagtcctatgtgtgcagtgtgtgtgggcgaggcttcagcctcaaggccaacctcctcagacaccagaggacacactcaggagagaagccttttctgtgcaaggtgtgtggacgaggctataccagtaagtcatacctcactgtgcatgagagaacacacacaggagagaagccttatgaatgccaggagtgtgggcgaaggtttaacgataagtcctcatacaacaagcacttgaaggcgcattcaggggagaagccttttgtgtgcaaggagtgtgggcgaggctatactaataagtcatacttcgttgtgcacaagagaatacactcaggagagaagccttacagatgccaggagtgtggccgaggctttagcaataagtcacaccttatcacacaccagaggacacactcaggggagaagccctttgcgtgcaggcagtgtaagcaaagttttagcgtgaaaggaagtctcctcagacaccagagaacacactcaggggagaagccttttgtgtgcaaggattgtgagcgaagctttagccaaaagtcaactcttgtctaccaccagagaacacactcaggggagaaaccttttgtttgtagagaatgtgggcaaggatttattcagaagtcaacccttgtgaaacatcagatcacacactcagaggagaagccttttgtgtgcaaggactgtggacgaggctttatccaaaagtcaaccttcactttacaccagaggacacactcagaggagaagccttatggatgtcgggagtgtgggcgaaggtttcgggataagtcctcctataacaagcacctgagggcacacttgggtgagaaacgttttttctgcagggattgtgggcgaggctttaccttgaagccaaatctcaccatacatcagaggacacactcaggagagaagcccttcggagtgtgggcgaggcttcaactggaagggaaatctcctcacacaccagaggacacactcaggggagaagcctttgctttgttacaagctttagttgaggctgcataacttgttcgtgaagatataacagaggcagacagaatccagagggctacagagaacctgaattcaacccatgtgtccccaagagattcagagaaaagaggtcaatgtttagggaacagagatgccagttgaggggagggcattacctgggctattggggaaatgtggtctctttcctactgagcacatattcttgttgtatttgtgccaggctgtgctttctaaggactgctcttagccagtgactgcagagcagggataccaaggcaggcctgttacactctccccaacctccttggactgcaaacaatctaggacacctccaccaaacctcctcttgcactttccctctggcttccctcccagccttccttggtttggatgttttgtcccctccttaatttatgttgaaactctacataaactgtttactgttgaaacagtgtaagtattaggaggtgggacctttgggaagtgattaagtcaagtcacgaagatagagctttgcgaatgggatcaggtgcccttatgaaaaggcttgatagagggagtttgtcctgtggcccttctattttctgctctgtgaggacacaatgctcctcccttccaaaagatgcagcatgaaggcatcatcttggaaacagacatgagccctcaacagacaactgcacctactgatgttttgatgttgaacttcccagcctccagaactctgggaaaataaagtcctctttatac

SEQ ID NO: 28097 - protein, 579 aa, Homo sapiens
MGPQGARRQAFLAFGDVTVDFTQKEWRLLSPAQRALYREVTLENYSHLVSLGILHSKPELIRRLEQGEVPWGEERRRRPGPCAGIYAEHVLRPKNLGLAHQRQQQLQFSDQSFQSDTAEGQEKEKSTKPMAFSSPPLRHAVSSRRRNSVVEIESSQGQRENPTEIDKVLKGIENSRWGAFKCAERGQDFSRKMMVIIHKKAHSRQKLFTCRECHQGFRDESALLLHQNTHTGEKSYVCSVCGRGFSLKANLLRHQRTHSGEKPFLCKVCGRGYTSKSYLTVHERTHTGEKPYECQECGRRFNDKSSYNKHLKAHSGEKPFVCKECGRGYTNKSYFVVHKRIHSGEKPYRCQECGRGFSNKSHLITHQRTHSGEKPFACRQCKQSFSVKGSLLRHQRTHSGEKPFVCKDCERSFSQKSTLVYHQRTHSGEKPFVCRECGQGFIQKSTLVKHQITHSEEKPFVCKDCGRGFIQKSTFTLHQRTHSEEKPYGCRECGRRFRDKSSYNKHLRAHLGEKRFFCRDCGRGFTLKPNLTIHQRTHSGEKPFGVWARLQLEGKSPHTPEDTLRGEAFALLQALVEAA

SEQ ID NO: 28098 - DNA, 3258 bp, Homo sapiens
cttgaagtgggcggtggggctgcggcttgccgagcgccccgggtctgggccgccactcagtctccgttcccggttgcgtgtagtggcggctcgggcggtgaacagcccggatttcacaggggcgccgagcaacccagattggccatctgcaagcttcccttctccgtggagagcaggaagacagtcatgggacctcagggagccaggagacaggctttcttggcatttggggatgtcactgtggatttcacccagaaggaatggaggctgctgagccctgctcagagggccctgtacagggaggtgacactggagaactacagccacctggtctcactaggaattctccattctaaaccagaactcatcaggcggctagagcaaggggaagtgccctggggagaagagagaagacgccggccaggcccctgtgcaggaatatatgcagaacatgtcctgcggcccaagaatcttggacttgcacatcagaggcaacagcaactacaattttctgatcaaagcttccagagtgacacagctgaaggtcaagagaaagaaaaaagcactaagcccatggcattttccagcccacccctaagacatgcagtaagctcaaggaggaggaacagtgtagtggaaatagagtctagtcaaggccagagggaaaatcctacagaaatagacaaagtattgaaaggaatagaaaattcaagatggggagcattcaagtgtgcagagcgtgggcaagacttcagccggaagatgatggtaatcatacacaaaaaagcacattccaggcagaaactttttacatgcagggagtgtcaccagggctttagagatgagtcagcattgctcttgcaccagaacacacacacaggagagaagtcctatgtgtgcagtgtgtgtgggcgaggcttcagcctcaaggccaacctcctcagacaccagaggacacactcaggagagaagccttttctgtgcaaggtgtgtggacgaggctataccagtaagtcatacctcactgtgcatgagagaacacacacaggagagaagccttatgaatgccaggagtgtgggcgaaggtttaacgataagtcctcatacaacaagcacttgaaggcgcattcaggggagaagccttttgtgtgcaaggagtgtgggcgaggctatactaataagtcatacttcgttgtgcacaagagaatacactcaggagagaagccttacagatgccaggagtgtggccgaggctttagcaataagtcacaccttatcacacaccagaggacacactcaggggagaagccctttgcgtgcaggcagtgtaagcaaagttttagcgtgaaaggaagtctcctcagacaccagagaacacactcaggggagaagccttttgtgtgcaaggattgtgagcgaagctttagccaaaagtcaactcttgtctaccaccagagaacacactcaggggagaaaccttttgtttgtagagaatgtgggcaaggatttattcagaagtcaacccttgtgaaacatcagatcacacactcagaggagaagccttttgtgtgcaaggactgtggacgaggctttatccaaaagtcaaccttcactttacaccagaggacacactcagaggagaagccttatggatgtcgggagtgtgggcgaaggtttcgggataagtcctcctataacaagcacctgagggcacacttgggtgagaaacgttttttctgcagggattgtgggcgaggctttaccttgaagccaaatctcaccatacatcagaggacacactcaggagagaagcccttcatgtgcaagcagtgtgagaaaagttttagtttgaaggcaaatcttcttagacatcagtggacacactcgggggaaaggccatttaattgcaaggattgcgggcgaggcttcatcctaaaatcaactctcctcttccaccagaagacacactcaggggagaagcctttcatctgtagtgaatgtgggcaaggatttatctggaagtcaaatcttgtgaaacaccagcttgcacattctggcaagcagccttttgtatgcaaggagtgtgggcgaggcttcaactggaagggaaatctcctcacacaccagaggacacactcaggggagaagcccttcgtgtgtaatgtgtgtgggcaaggcttcagctggaagagaagtctcaccagacaccactggcggatacactcaaaggagaagccttttgtttgccaggagtgtaagcgaggctataccagtaagtcagacctcactgtgcatgaaagaatacacacaggagagaggccttatgaatgccaagagtgtggacgaaagtttagcaataagtcatactacagtaagcacttaaagagacacttacgtgagaagcgtttttgtacagggagtgtgggtgaggcttcatcttgaagttatatctcaccatccatcagaggacacactcaggagagtaactttgctttgttacaagctttagttgaggctgcataacttgttcgtgaagatataacagaggcagacagaatccagagggctacagagaacctgaattcaacccatgtgtccccaagagattcagagaaaagaggtcaatgtttagggaacagagatgccagttgaggggagggcattacctgggctattggggaaatgtggtctctttcctactgagcacatattcttgttgtatttgtgccaggctgtgctttctaaggactgctcttagccagtgactgcagagcagggataccaaggcaggcctgttacactctccccaacctccttggactgcaaacaatctaggacacctccaccaaacctcctcttgcactttccctctggcttccctcccagccttccttggtttggatgttttgtcccctccttaatttatgttgaaactctacataaactgtttactgttgaaacagtgtaagtattaggaggtgggacctttgggaagtgattaagtcaagtcacgaagatagagctttgcgaatgggatcaggtgcccttatgaaaaggcttgatagagggagtttgtcctgtggcccttctattttctgctctgtgaggacacaatgctcctcccttccaaaagatgcagcatgaaggcatcatcttggaaacagacatgagccctcaacagacaactgcacctactgatgttttgatgttgaacttcccagcctccagaactctgggaaaataaagtcctctttatac

SEQ ID NO: 28099 - protein, 751 aa, Homo sapiens; identical to SEQ ID NO: 3853

SEQ ID NO: 28100 - DNA, 3305 bp, Homo sapiens
agatgcgtggtccaccatcggtgacctcaccgcctcggttcgccctcagccgccccgattggccatctgcaagcttcccttctccgtggagagcaggaagacagtcatgggacctcagggagccaggagacagcaggtgactggcctgtgggtgtcactcatcaagtagtgatctgtgtacagatggcagaacctggaatcctccaactgcgtgagtgcaacactgtccctggtgagcatgcctgggttttgtgttacaggctttcttggcatttggggatgtcactgtggatttcacccagaaggaatggaggctgctgagccctgctcagagggccctgtacagggaggtgacactggagaactacagccacctggtctcactaggaattctccattctaaaccagaactcatcaggcggctagagcaaggggaagtgccctggggagaagagagaagacgccggccaggcccctgtgcaggaatatatgcagaacatgtcctgcggcccaagaatcttggacttgcacatcagaggcaacagcaactacaattttctgatcaaagcttccagagtgacacagctgaaggtcaagagaaagaaaaaagcactaagcccatggcattttccagcccacccctaagacatgcagtaagctcaaggaggaggaacagtgtagtggaaatagagtctagtcaaggccagagggaaaatcctacagaaatagacaaagtattgaaaggaatagaaaattcaagatggggagcattcaagtgtgcagagcgtgggcaagacttcagccggaagatgatggtaatcatacacaaaaaagcacattccaggcagaaactttttacatgcagggagtgtcaccagggctttagagatgagtcagcattgctcttgcaccagaacacacacacaggagagaagtcctatgtgtgcagtgtgtgtgggcgaggcttcagcctcaaggccaacctcctcagacaccagaggacacactcaggagagaagccttttctgtgcaaggtgtgtggacgaggctataccagtaagtcatacctcactgtgcatgagagaacacacacaggagagaagccttatgaatgccaggagtgtgggcgaaggtttaacgataagtcctcatacaacaagcacttgaaggcgcattcaggggagaagccttttgtgtgcaaggagtgtgggcgaggctatactaataagtcatacttcgttgtgcacaagagaatacactcaggagagaagccttacagatgccaggagtgtggccgaggctttagcaataagtcacaccttatcacacaccagaggacacactcaggggagaagccctttgcgtgcaggcagtgtaagcaaagttttagcgtgaaaggaagtctcctcagacaccagagaacacactcaggggagaagccttttgtgtgcaaggattgtgagcgaagctttagccaaaagtcaactcttgtctaccaccagagaacacactcaggggagaaaccttttgtttgtagagaatgtgggcaaggatttattcagaagtcaacccttgtgaaacatcagatcacacactcagaggagaagccttttgtgtgcaaggactgtggacgaggctttatccaaaagtcaaccttcactttacaccagaggacacactcagaggagaagccttatggatgtcgggagtgtgggcgaaggtttcgggataagtcctcctataacaagcacctgagggcacacttgggtgagaaacgttttttctgcagggattgtgggcgaggctttaccttgaagccaaatctcaccatacatcagaggacacactcaggagagaagcccttcatgtgcaagcagtgtgagaaaagttttagtttgaaggcaaatcttcttagacatcagtggacacactcgggggaaaggccatttaattgcaaggattgcgggcgaggcttcatcctaaaatcaactctcctcttccaccagaagacacactcaggggagaagcctttcatctgtagtgaatgtgggcaaggatttatctggaagtcaaatcttgtgaaacaccagcttgcacattctggcaagcagccttttgtatgcaaggagtgtgggcgaggcttcaactggaagggaaatctcctcacacaccagaggacacactcaggggagaagcccttcgtgtgtaatgtgtgtgggcaaggcttcagctggaagagaagtctcaccagacaccactggcggatacactcaaaggagaagccttttgtttgccaggagtgtaagcgaggctataccagtaagtcagacctcactgtgcatgaaagaatacacacaggagagaggccttatgaatgccaagagtgtggacgaaagtttagcaataagtcatactacagtaagcacttaaagagacacttacgtgagaagcgtttttgtacagggagtgtgggtgaggcttcatcttgaagttatatctcaccatccatcagaggacacactcaggagagtaactttgctttgttacaagctttagttgaggctgcataacttgttcgtgaagatataacagaggcagacagaatccagagggctacagagaacctgaattcaacccatgtgtccccaagagattcagagaaaagaggtcaatgtttagggaacagagatgccagttgaggggagggcattacctgggctattggggaaatgtggtctctttcctactgagcacatattcttgttgtatttgtgccaggctgtgctttctaaggactgctcttagccagtgactgcagagcagggataccaaggcaggcctgttacactctccccaacctccttggactgcaaacaatctaggacacctccaccaaacctcctcttgcactttccctctggcttccctcccagccttccttggtttggatgttttgtcccctccttaatttatgttgaaactctacataaactgtttactgttgaaacagtgtaagtattaggaggtgggacctttgggaagtgattaagtcaagtcacgaagatagagctttgcgaatgggatcaggtgcccttatgaaaaggcttgatagagggagtttgtcctgtggcccttctattttctgctctgtgaggacacaatgctcctcccttccaaaagatgcagcatgaaggcatcatcttggaaacagacatgagccctcaacagacaactgcacctactgatgttttgatgttgaacttcccagcctccagaactctgggaaaataaagtcctctttatac

SEQ ID NO: 28101 - protein, 54 aa, Homo sapiens; identical to SEQ ID NO: 28091

SEQ ID NO: 28102 - DNA, 3204 bp, Homo sapiens
agatccctgggcgtcagcgagccgtgagatgcgtggtccaccatcggtgacctcaccgcctcggttcgccctcagccgccccgattggccatctgcaagcttcccttctccgtggagagcaggaagacagtcatgggacctcagggagccaggagacaggctttcttggcatttggggatgtcactgtggatttcacccagaaggaatggaggctgctgagccctgctcagagggccctgtacagggaggtgacactggagaactacagccacctggtctcactaggaattctccattctaaaccagaactcatcaggcggctagagcaaggggaagtgccctggggagaagagagaagacgccggccaggcccctgtgcaggaatatatgcagaacatgtcctgcggcccaagaatcttggacttgcacatcagaggcaacagcaactacaattttctgatcaaagcttccagagtgacacagctgaaggtcaagagaaagaaaaaagcactaagcccatggcattttccagcccacccctaagacatgcagtaagctcaaggaggaggaacagtgtagtggaaatagagtctagtcaaggccagagggaaaatcctacagaaatagacaaagtattgaaaggaatagaaaattcaagatggggagcattcaagtgtgcagagcgtgggcaagacttcagccggaagatgatggtaatcatacacaaaaaagcacattccaggcagaaactttttacatgcagggagtgtcaccagggctttagagatgagtcagcattgctcttgcaccagaacacacacacaggagagaagtcctatgtgtgcagtgtgtgtgggcgaggcttcagcctcaaggccaacctcctcagacaccagaggacacactcaggagagaagccttttctgtgcaaggtgtgtggacgaggctataccagtaagtcatacctcactgtgcatgagagaacacacacaggagagaagccttatgaatgccaggagtgtgggcgaaggtttaacgataagtcctcatacaacaagcacttgaaggcgcattcaggggagaagccttttgtgtgcaaggagtgtgggcgaggctatactaataagtcatacttcgttgtgcacaagagaatacactcaggagagaagccttacagatgccaggagtgtggccgaggctttagcaataagtcacaccttatcacacaccagaggacacactcaggggagaagccctttgcgtgcaggcagtgtaagcaaagttttagcgtgaaaggaagtctcctcagacaccagagaacacactcaggggagaagccttttgtgtgcaaggattgtgagcgaagctttagccaaaagtcaactcttgtctaccaccagagaacacactcaggggagaaaccttttgtttgtagagaatgtgggcaaggatttattcagaagtcaacccttgtgaaacatcagatcacacactcagaggagaagccttttgtgtgcaaggactgtggacgaggctttatccaaaagtcaaccttcactttacaccagaggacacactcagaggagaagccttatggatgtcgggagtgtgggcgaaggtttcgggataagtcctcctataacaagcacctgagggcacacttgggtgagaaacgttttttctgcagggattgtgggcgaggctttaccttgaagccaaatctcaccatacatcagaggacacactcaggagagaagcccttcatgtgcaagcagtgtgagaaaagttttagtttgaaggcaaatcttcttagacatcagtggacacactcgggggaaaggccatttaattgcaaggattgcgggcgaggcttcatcctaaaatcaactctcctcttccaccagaagacacactcaggggagaagcctttcatctgtagtgaatgtgggcaaggatttatctggaagtcaaatcttgtgaaacaccagcttgcacattctggcaagcagccttttgtatgcaaggagtgtgggcgaggcttcaactggaagggaaatctcctcacacaccagaggacacactcaggggagaagcccttcgtgtgtaatgtgtgtgggcaaggcttcagctggaagagaagtctcaccagacaccactggcggatacactcaaaggagaagccttttgtttgccaggagtgtaagcgaggctataccagtaagtcagacctcactgtgcatgaaagaatacacacaggagagaggccttatgaatgccaagagtgtggacgaaagtttagcaataagtcatactacagtaagcacttaaagagacacttacgtgagaagcgtttttgtacagggagtgtgggtgaggcttcatcttgaagttatatctcaccatccatcagaggacacactcaggagagtaactttgctttgttacaagctttagttgaggctgcataacttgttcgtgaagatataacagaggcagacagaatccagagggctacagagaacctgaattcaacccatgtgtccccaagagattcagagaaaagaggtcaatgtttagggaacagagatgccagttgaggggagggcattacctgggctattggggaaatgtggtctctttcctactgagcacatattcttgttgtatttgtgccaggctgtgctttctaaggactgctcttagccagtgactgcagagcagggataccaaggcaggcctgttacactctccccaacctccttggactgcaaacaatctaggacacctccaccaaacctcctcttgcactttccctctggcttccctcccagccttccttggtttggatgttttgtcccctccttaatttatgttgaaactctacataaactgtttactgttgaaacagtgtaagtattaggaggtgggacctttgggaagtgattaagtcaagtcacgaagatagagctttgcgaatgggatcaggtgcccttatgaaaaggcttgatagagggagtttgtcctgtggcccttctattttctgctctgtgaggacacaatgctcctcccttccaaaagatgcagcatgaaggcatcatcttggaaacagacatgagccctcaacagacaactgcacctactgatgttttgatgttgaacttcccagcctccagaactctgggaaaataaagtcctctttatac

SEQ ID NO: 28103 - protein, 751 aa, Homo sapiens; identical to SEQ ID NO: 3853

SEQ ID NO: 28104 - DNA, 424 bp, Homo sapiens
ctgctctgcagtcactggctaagagcagtccttagaaagcacagcctggcacaaatacaacaagaatatgtgctcagtaggaaagagaccacatttccccaatagcccaggtaatgccctcccctcaactggcatctctgttccctaaacattgacctcttttctctgaatctcttggggacacatgggttgaattcaggttctctgtagccctctggattctgtctgcctctgttatatcttcacgaacaagttatgcagcctcaactaaagcttgtaacaaagcaaagttactctcctgagtgtgtcctctgatggatggtgagatataacttcaagatgaagcctcacccacactccctgtacaaaaacgcttctcacatgaaaggcttctcccctgagtgtgtcttctggtggaagagga

SEQ ID NO: 28105 - protein, 34 aa, Homo sapiens
MVRYNFKMKPHPHSLYKNASHMKGFSPECVFWWK

SEQ ID NO: 28106 - DNA, 735 bp, Homo sapiens
cctttcagaaccggcgatttcttttatttagacaacacctttttgcttttcttccacatcttcacactccttcaggatcaaaaacctaagccacatgactggatgagccgtcacttggccttcattcgggtagtgatggtcctcactgtagtggatgttttgcctccagatatgcttgaatcactgcattttgggaataacttcaaatgcaagtccttgatctaaataaacagagtgacgaggggcctatgtatctataccacctgtctcctgagtatacaccaggccagcataatcagcctcagcaacttctggttggaaagctttaaacataaatttacaaataacattgtcagtgtcctcttttttcttttttgttccctcaatttgtctttcagtagtgacataatattcttcactgtggcttcttccattgtgacccagaccaatctacttaaggtccgcaaatactgctcacgttctcccatgaagtccatcatgtggggagtgttttccttgtaggattacgctgctctcaagtgcatacatgatgatctttttgtccaagcatcagaggtgatcccagcatcttcacagtaccagcctttccccaagatcctcgccagagaaaagggttacccagatcatcctgccactggtgagttgctttgttgtcatgtactgggtggaccttatcatctcatcctcttcatccctgttatggacgtataaccc

SEQ ID NO: 28107 - protein, 40 aa, Homo sapiens
MSRHLAFIRVVMVLTVVDVLPPDMLESLHFGNNFKCKSLI

SEQ ID NO: 28108 - DNA, 622 bp, Homo sapiens
gtagccctatacatacattaagcatattttcccatttctatgatatagtagtgacataatattcttcactgtggcttcttccattgtgacccagaccaatctacttaaggtccgcaaatactgctcacgttctcccatgaagtccatcatgtggggagtgttttccttgtaggattacgctgctctcaagtgcatacatgatgatctttttgtccaagcatcagaggtgatcccagcatcttcacagtaccagcctttccccaagatcctcgccagagaaaagggttacccagatcatcctgccactggtgagttgctttgttgtcatgtactgggtggaccttatcatctcatcctcttcatccctgttatggacgtataacccagtcatcctgagcatctagaaccttgtagcctgtgtctatgccactctcgttccattggtacaaatccgctctgataaaagaatagttaatattctccaaaaaatggaattaaagtgctataattttttaatgtgttggtgatgaaaaatatttctaaaaattagtctcattctatagttaaattgttcaagtagccccagatttagcttactgagtttaaataaaatgcgtggaat

SEQ ID NO: 28109 - protein, 35 aa, Homo sapiens
SFCPSIRGDPSIFTVPAFPQDPRQRKGLPRSSCHW

SEQ ID NO: 28110 - DNA, 295 bp, Homo sapiens
aaggttccagcatttggaggcaaacatgaagctccatcctctccaattctggggcaaccgtgtggagatgatcaaaatgcttcaccttcaaaactttcaaaggaagagttaatacagagtatggatcgtgtagatcgagaaattgcaaaagtagaacagcagatccttaaactgaaaaagaaacaagtaaaagtctttgcctaatatattctaagaatgtatttttttctccctaccgaagatatttttgagttttccatattttgaaacattacataaaaggaatcattcctta

SEQ ID NO: 28111 - protein, 32 aa, Homo sapiens
SKCFTFKTFKGRVNTEYGSCRSRNCKSRTADP

SEQ ID NO: 28112 - DNA, 1003 bp, Homo sapiens
aaagtaggagccctccatggcagtgcttgagtgtcggggctctgagtctccggcctgacctctccacgtggtcgacgggaacgtccccagatgccaggattcgcaaagggctgaccaggatggcgaaaccttaggcagagtccggggaaagcagcacggcatcccagcctcaggcctgcccggacggtgttggttggggtaagattggggaagatgccaggtgatagaatccaccctgcctctgacagcatccaatctggagcaaaggcttatttcaaccctcccccaagctcccaatacaagcccaaattctggaacaggtcctttccaacacctccttcagagaagctccctggctccaggcagtgcttgctcccctcactgcagcaggaagcctaacttgcgaactgcaggtgtgctccaggtggtcactggatgcaagaaatggtgcgagaactttggatgtggaacgtggaggaggaggaacacgaagtggggatctgcacttggggtggtcagcactgcggatgcccagcaaagtcactgcctggtccacatcccggaggggtctctgcgcctcagtcggcatcgcagctgatggtgaaacttttggtgtggcagaagagtgtccacaaacttcggaagaacagaaacgcctacagttgcggccccctgtagtgcaatttgtgtcagtctagggagagtggatttggagcccaaccaccattgaggaaaatccatctgacggacatgagcctcactcaggttctcatctacttccttggggtctgccccgcctccctcagaagtttggaaccacatactgttctggaggggacctctcactgctgcagaacctgtcctccaggataccgacaagtgttcatctcggtcgtggctaattaacttaccatatggtagtgaactcccttctggggccccaatattttgtttatttttaaaaaataaaattagtaccattgtttattttctgaatgtacag

SEQ ID NO: 28113 - protein, 80 aa, Homo sapiens; identical to SEQ ID NO: 5234

SEQ ID NO: 28114 - DNA, 1003 bp, Homo sapiens
aaagcaggagccctccttggcagtgcttgggtgtcggggctctgaggctccggcctgacctcttcacggggtcgacgggatcgtctccggatgccaggagtcccaaagggccgaccaggatgaggaaaccccaggcggagtccgggggaagcagcacggcatcccagcctcaggcctgcccggacggtgatggttggggtaagattggggaagatgccaggtgatagaatccaccctgcctctgacagcatccaatctggagcaaaggcttctttcaaccttcccccaagctcccaatacaagcccaaattctggaacaagtcctttccaacacctccttcagagaagctccctggctccaggcagtgcttgctcccctcactgcagcaggaagcctaacttgcgaactgcaggtgtgctccaggtggtcactggatgcaagaaatggtgcgagaactttggatgtggaacgtggaggaggaggaacacgaagtggggatctgcacttggggtggtcagcactgcggatgcccagcaaagtcactgcctggtccacatcccggaggggtctctgcgcctcagtcggcatcgcagctgatggtgaaacttttggtgtggcagaagagtgtccacaaacttcggaagaacagaaacgcctacagttgcggccccctgtagtgcaatttgtgtcagtctagggagagtggatttggagcccaaccaccattgaggaaaatccatctgacggacatgagcctcactcaggttctcatctacttccttggggtctgccccgcctccctcagaagtttggaaccacatactgttctggaggggacctctcactgctgcagaacctgtcctccaggataccgacaagtgttcatctcggtcgtggctaattaacttaccatatggtagtgaactcccttctggggccccaatattttgtttatttttaaaaaataaaattagtaccattgtttattttctgaatgtacag

SEQ ID NO: 28115 - protein, 80 aa, Homo sapiens; identical to SEQ ID NO: 5234

SEQ ID NO: 28116 - DNA, 3705 bp, Homo sapiens
ctgggaattttttgtgtcagcctggtctctgatgtccacctggggattgggtatccacctaaggcctgatgtttacctggagccagatgtgcacctgagacctgatgtctatctgtggccttatgttcacctggggaccgatgcacacctgaaggataggtattcacctggggcctgatacccacctgtagtatgggtgtcaaccttggggctaatgttcagctggtgtccactgtctacttggggcctggtgtacacatggggcctgggcatccacctgagacttgatgtttaatatggtctggagttcttttggggcctgttgtaccctggagcctgggtgtaaacctggagcctgatgtcccaggtggacacccgggtcccaggtgatcttcaggccctaggtgaaaactccaggctctaagtggacaaccaggccccaggctgatgtttactggggccagatgtctaccaggccccaggtgaaaactccaggctccaagtagacaacatggccccaggttccaggtagacactagaatccaaatcaacaccaggccccagatggacacccaggcctgtggtggacatcagactccagaaggtcatctggctcgaggtggacatcaagccccaggtggatacctagtccccaggtggatatcaggccccacttggacaccagtccctgggtagataccttggcctcaggtggatatccagtctctagctaagcatcaggctccagggggacccaggccctagctgactggggactagtgtttatatggggccacatgtccgtctgggccctaggtgtcaacttgtagcctgatgtcaacctgggagctggtgatcaccagagaggactagtcctcctggtgcctgatgtccaacttgggactttgtgtccacctggagaccgatgtccatttgggaccagatgtccaactggagcaagatgtccacctgtagcctagaacttcacctaaggcctgatgttccccagggcctacagagcctatgtatctacctagggacttgtgtccaggtggggcctgaattccacctggggcctggaattaacctgggacctgatgtccacctgagacgtgggtgttcctctggagtctgatatctatctggggcccgggtgtcctcctgtggtctgatgtccacttgtaggctggtgtccacctggggcctgggtgtccacctaggaacctgatgtatacctgaagtccagtgtctacgtgggtactgatgtctaccaggaaagtgatataaacctggggcctgatagccacctgggccctgagtgtccacatatgttctgatttctcttttggcctgatgttcagttgctgactaggaattccactaaagcttgatgtccacctggggcataggtaaccacttgtggcctagtgttgccctgaagcctaggtgtcaacccagggcataatgtccccttggggcctgctgtccacctgcagactggtgtctacatagggcctggtatccacctggggtctggtgtctgcctggggcctagtgtccacctgaagactgagtatagacctcagatctgatgtatgcctggggcctatttatccacctggggactagcattcatctggggcctcatgtccacttaagccctgggtgtcaacctggtgcctaatggccaccagggatctatgtactcacttggggcctggtgctcccacagggcctaggtataaacctggagaatgatgtgcaggtggaggtggatgtcttcctgggtgctggtgttcacctggggacaagggtctccctggggaccagtgtttatcgggagcctcatatgcaccttgaacctgctgtctacctagggcccgatgtccatgttaaggctgggtgtccacctgggacctggttgtccacttggggcctaatgtccacctaagacctagtgttcacctagggcctgggtgtccacctggagcctgatgttcagctggagatgcatccatccgaaacctaggtatccacccaggttctggtgtcgacctggggtcttatgtccacctggggactagatatctacctgaggcttgatgtccacctggagcccgatatccacctcagagctgggtgtccacccaagttctggtatccacccggagcctggtgttcatctggggcccagtgcccacctggaacctgggtatcaccatggggcctgggtgtccacttggaacgtgatgtgcacctgggacctgagtttccacctagggcctgatgaccaccggagacccaggtgtccacctggggtctgatgtctacctgaagcctaggtaaccacctgtgccttggtgttacctgtgccttgatttccacctgagcctgatgtacacctggggcctgggtgtccatctgaggcctgatgtacacctcaagtccagtgtccacttgtggcctgatgtcaacttggaagctgatatccacctggggactgatgttctcctggggtctgatatccaactgggatcagatgttcacctaaggcctggagttaatctggggcctgatggtcaccagggacccaggtgtccacctagggcctagtgaccaactagggcctgatgtccacctggagtctagtatccgccttggccctgatgctacttgaggcctgggtgtcttcctagaacctgagtccccaactgggccctgatgtccacctgaggcctggtgtccttgtagggcctgatatctacctaaggcctgggtatcctcctgcagcctgatgctcacctgtaggctggtgtccatatggggcctgggtgttcacctgtgagcctgatgtacacctggagtccggtgtccccttggttactaatacgtaccaggaaaatggtatatacctggggcctgatatacacctggagcctgtgtgtccacttgagccctgatgtccacctggggcctggtgtttacctggggcctctatccacccactaccgaaagtcaagttaggaaaagggcccaggataggtgaggagcacagaacagggacctcattcataagaaattctgctgtagaatgtgtgctctaagctcttaaaacagctctgcctcaggaaagactgtccagggcataggaagcccacacacagggtgggatgacaagtttgcatctggcatggctgggagccctgggggcctctgcccttttggccgcgttgtctcctggcttttagggtggtgggattctcggctctgattgcagcaggtggattcacttagctctcctccccttttagcattactgtcttctgtaataaacctctcactttgatctgccaggctgtcaaatgctttgattgccctctctgttttgttccaatggttcatcaatccaaatatccacaacacaaggacagattttagtctcttcatacagtgggatatttcacagctattaaaacaaatcaaataaatgcttgtgtattgatatgcaaagttgtcctgcatcaataacttttaaacacattttatgatcccacatctatatctatacataatgtttgccactgcttaaacaaaacaaaatctaagctttagactccaaatggaattacaggggaatcttgatgtctgtgttctgcagttctgtcatgtttgaaattgtcaaataaacatggtgcctttccagta

SEQ ID NO: 28117 - protein, 73 aa, Homo sapiens
MSTWGLDIYLRLDVHLEPDIHLRAGCPPKFWYPPGAWCSSGAQCPPGTWVSPWGLGVHLERDVHLGPEFPPRA

SEQ ID NO: 28118 - DNA, 3144 bp, Homo sapiens
tgaaataggagccaaggtatgctatgagccaaggattatgagtaatccagttttgtgcactttaagccatttgaaaaacagaaaagcaaaacaacaaaataatttttaagaaattgaatatagggtgttatgctctgaatgtgtccccctaaaattaatcaccaatgtcataagattaggaagtagggctttaaggtagtgattcagtcatgaagggagagtgttcacgaatgagtttaggatccttacacaaggactggatggagtgggcttcccctgttttgcccttccaccttctgccatgtgaggacacagtgcatctcctcctgaagacacagtgcacaagataccatcttggatgcagagaccagaccctcaccagacaccaatcctgctggcaccttgatcttggacttctagcctatggaactgtaagattggggaagatgccaggtgatagaatccaccctgcctctgacagcatccaatctggagcaaaggcttatttcaaccctcccccaagctcccaatacaagcccaaattctggaacaggtcctttccaacacctccttcagagaagctccctggctccaggcagtgcttgctcccctcactgcagcaggaagcctaacttgcgaactgcaggtgtgctccaggtggtcactggatgcaaggcattgacagatggatcccatcgatacccccactgcaaaaccatagtgcagtgaatagaagacacttctctgcaccccaaaagctccatgctgattgtgagaaggaaatgctggatggaggggttcctggaactactgtgagggtttcttttgatttctcctgcttagaaatggtgcgagaactttggatgtggaacgtggaggaggaggaacacgaagtggggatctgcacttggggtggtcagcactgcggatgcccagcaaagtcactgcctggtccacatcccggaggggtctctgcgcctcagtcggcatcgcagctgatggtgaaacttttggtgtggcagaagagtgtccacaaacttcggaagatcgctgctcagagtgatgaatggagttgtgttttgaataaaatatctatgcatccttttgtgagcaaggagcatgatggtacttagacctaccatttctcgttacggtggttacggttacagaggggctggggtgtttacctggagcctggacatccactgggacatgatacccactgggaattttttgtgtcagcctggtctctgatgtccacctggggattgggtatccacctaaggcctgatgtttacctggagccagatgtgcacctgagacctgatgtctatctgtggccttatgttcacctggggaccgatgcacacctgaaggataggtattcacctggggcctgatacccacctgtagtatgggtgtcaaccttggggctaatgttcagctggtgtccactgtctacttggggcctggtgtacacatggggcctgggcatccacctgagacttgatgtttaatatggtctggagttcttttggggcctgttgtaccctggagcctgggtgtaaacctggagcctgatgtcccaggtggacacccgggtcccaggtgatcttcaggccctaggtgaaaactccaggctctaagtggacaaccaggccccaggctgatgtttactggggccagatgtctaccaggccccaggtgaaaactccaggctccaagtagacaacatggccccaggttccaggtagacactagaatccaaatcaacaccaggccccagatggacacccaggcctgtggtggacatcagactccagaaggtcatctggctcgaggtggacatcaagccccaggtggatacctagtccccaggtggatatcaggccccacttggacaccagtccctgggtagataccttggcctcaggtggatatccagtctctagctaagcatcaggctccagggggacccaggccctagctgactggggactagtgtttatatggggccacatgtccgtctgggccctaggtgtcaacttgtagcctgatgtcaacctgggagctggtgatcaccagagaggactagtcctcctggtgcctgatgtccaacttgggactttgtgtccacctggagaccgatgtccatttgggaccagatgtccaactggagcaagatgtccacctgtagcctagaacttcacctaaggcctgatgttccccagggcctacagagcctatgtatctacctagggacttgtgtccaggtggggcctgaattccacctggggcctggaattaacctgggacctgatgtccacctgagacgtgggtgttcctctggagtctgatatctatctggggcccgggtgtcctcctgtggtctgatgtccacttgtaggctggtgtccacctggggcctgggtgtccacctaggaacctgatgtatacctgaagtccagtgtctacgtgggtactgatgtctaccaggaaagtgatataaacctggggcctgatagccacctgggccctgagtgtccacatatgttctgatttctcttttggcctgagtgtagggcctgagtgccacctgcttcctgatgttcaccaggaacctaggtattcacttggggcccctgggggcctctgcccttttggccgcgttgtctcctggcttttagggtggtgggattctcggctctgattgcagcaggtggattcacttagctctcctccccttttagcattactgtcttctgtaataaacctctcactttgatctgccaggctgtcaaatgctttgattgccctctctgttttgttccaatggttcatcaatccaaatatccacaacacaaggacagattttagtctcttcatacagtgggatatttcacagctattaaaacaaatcaaataaatgcttgtgtattgatatgcaaagttgtcctgcatcaataacttttaaacacattttatgatcccacatctatatctatacataatgtttgccactgcttaaacaaaacaaaatctaagctttagactccaaatggaattacaggggaatcttgatgtctgtgttctgcagttctgtcatgtttgaaattgtcaaataaacatggtgcctttccagta

SEQ ID NO: 28119 - protein, 154 aa, Homo sapiens; identical to SEQ ID NO: 5236

SEQ ID NO: 28120 - DNA, 1054 bp, Homo sapiens
aacacgaagtggggatctgcacttggggtggtcagcactgcggatgcccagcaaagtcactgcctggtccacatcccggaggggtctctgcgcctcagtcggcatcgcagctgatggtgaaacttttggtgtggcagaagagtgtccacaaacttcggaagggccgcggcggcaaggtccttgctcccatggcgtgactccagggtgcaggagcctgggctgagcaggtggagtagggtgagctccgccaagaacccagcgagagtggcgccccagggcggcacaggaggccgcatttaacatgtcaatcatctgaaagattttatggcatcttttttttgacatcttataatatctataatgtttattatatcttgtgatataattattaacaccacttcagtgtgattattatgattatttttataccaacacatcttcaattattaatattcccagttgctagagaaaactgaaaactactagttttgaaagcctcacttctgccaatggaagcacattccagcatgtcgccaacgcaatccactttccaccactttcacaaaaaacgttactgcacaattatactatcctacccttatatactttttgtgtgtgtgtgtacttgtatgtatgtatgttacataggtcatatatatatatatatatatatatatatatgccagagatgaacaagcattagaaaattaaatgcacacaggtcatgtcagtgctatgtataatgtggtatactaagtatagatgttcaacagtgtgggatctaggctggaacaagactcctagtcttaagcaattctttctaggttcagtctctggaaataatgccttggatcaaatgtgtgagaaaatcaatgggttttaaagactattctatgtcaactataacatttaatttggggatttctgtcccttataatgtctacctcattttggatggaatccttgaggcctggtttatttttcttttcctttctacacatcgctgctcagagtgatgaatggagttgtgttttgaataaaatatctatgcatc

SEQ ID NO: 28121 - protein, 59 aa, Homo sapiens
MPSKVTAWSTSRRGLCASVGIAADGETFGVAEECPQTSEGPRRQGPCSHGVTPGCRSLG

SEQ ID NO: 28122 - DNA, 877 bp, Homo sapiens
cagtgcttgctcccctcactgcagcaggaagcctaacttgcgaactgcaggtgtgctccaggtggtcactggatgcaagaaatggtgcgagaactttggatgtggaacgtggaggaggaggaacacgaagtggggatctgcacttggggtggtcagcactgcggatgcccagcaaagtcactgcctggtccacatcccggaggggtctctgcgcctcagtcggcatcgcagctgatggtgaaacttttggtgtggcagaagagtgtccacaaacttcggaagttgctagagaaaactgaaaactactagttttgaaagcctcacttctgccaatggaagcacattccagcatgtcgccaacgcaatccactttccaccactttcacaaaaaacgttactgcacaattatactatcctacccttatatactttttgtgtgtgtgtgtacttgtatgtatgtatgttacataggtcatatatatatatatatatatatatatatatgccagagatgaacaagcattagaaaattaaatgcacacaggtcatgtcagtgctatgtataatgtggtatactaagtatagatgttcaacagtgtgggatctaggctggaacaagactcctagtcttaagcaattctttctaggttcagtctctggaaataatgccttggatcaaatgtgtgagaaaatcaatgggttttaaagactattctatgtcaactataacatttaatttggggatttctgtcccttataatgtctacctcattttggatggaatccttgaggcctggtttatttttcttttcctttctacacatcgctgctcagagtgatgaatggagttgtgttttgaataaaatatctatgcatc

SEQ ID NO: 28123 - protein, 78 aa, Homo sapiens
MQEMVRELWMWNVEEEEHEVGICTWGGQHCGCPAKSLPGPHPGGVSAPQSASQLMVKLLVWQKSVHKLRKLLEKTENY

SEQ ID NO: 28124 - DNA, 1680 bp, Homo sapiens
gacctctcctcggggtcgacgggaaggtctccggatgccaggactcgcaaagggccgaccagaatgaggaaatcccaggcggagtccgggggaggcagcacggcatcccagcctcagggctgcccggacggtgttggttggggtaagattggggaagatgccaggtgatagaatccaccctgcctctgacagcatccaatctggagcaaaggcttctttcaaccttcccccaagctcccaatacaagcccaaattctggaacaagtcctttccaacacctccttcagagaagctccctggctccaggcagtgcttgctcccctcactgcagcaggaagcctaacttgcgaactgcaggtgtgctccaggtggtcactggatgcaagaaatggtgcgagaactttggatgtggaacgtggaggaggaggaacacgaagtggggatctgcacttggggtggtcagcactgcggatgcccagcaaagtcactgcctggtccacatcccggaggggtctctgcgcctcagtcggcatcgcagctgatggtgaaacttttggtgtggcagaagagtgtccacaaacttcggaaggtatccgctacatcctccatagccgtgtatccctgcccagggcaatcttctgggggagcggaaagtcctgctcccgggccagggctggctggctggagccacttgtgcggcgcagccctggcggaggttcaggcggccccggtgtcgcaagcggctgtgagtgatgcctccctggggccggagtggtcccaggaaggctgcagaccagggctgaccagcgggcagcatggtggccgcgatggaaggtgacggggttcgcagcgccaggggacccagcagagcccgagcccgggcatcccgcatctccagcagcatcgcaggtaggcctggtgctggtgaagtggcggccagtgcacaaggcctacgacccagtcccagaggccagcccattgtcagctaacttcaggaaccccgggccagctgaggccccgggccccatgggcaagacaaagggcagagggtccgcaggcggggccgagtgcaggcagtgcaggcctggctccaccgccgcggagctcgcagggcgcagcaggcatcgggcagtgaccagggcttccagaggaggctgtgcacccctgcaaaggctcctgccctgcgtccagcctatccgcggggactccacgtgcaccccctcctcattgtccttgtctagggccgcggcggcaaggtccttgctcccatggcgtgactccagggtgcaggagcctgggctgagcaggtggagtagggtgagctccgccaagaacccagcgagagtggcgccccagggcggcacaggaggccgcatttaacatgtcaatcatctgaaagattttatggcatcttttttttgacatcttataatatctataatgtttattatatcttgtgatataattattaacaccacttcagtgtgattattatgattatttttataccaacacatcttcaattattaatattcccagttgctagagaaaactgaaaactactagttttgaaagcctcacttctgccaatggaagcacattccagcatgtcgccaacgcaatccactttccaccactttcacaaaaaacgttactgcacaattatactatcctaccctt

SEQ ID NO: 28125 - protein, 152 aa, Homo sapiens
MQEMVRELWMWNVEEEEHEVGICTWGGQHCGCPAKSLPGPHPGGVSAPQSASQLMVKLLVWQKSVHKLRKVSATSSIAVYPCPGQSSGGAESPAPGPGLAGWSHLCGAALAEVQAAPVSQAAVSDASLGPEWSQEGCRPGLTSGQHGGRDGR

SEQ ID NO: 28126 - DNA, 970 bp, Homo sapiens
tgcttgtgtgtcggagctctgaggctccggcctgacctctcctcggggtcgacgggaacgtctccggatgccaggactcgcaaagggctgacaagaatgaggaaatcccaggcggagtccgggggaggcagcacggcatcccagcctcagggctgcccggacggtgttggttggggtaagattggggaagatgccaggtgatagaatccaccctgcctctgacagcatccaatctggagcaaaggcttctttcaaccttcccccaagctcccaatacaagcccaaattctggaacaagtcctttccaacacctccttcagagaagctccctggctccaggcagtgcttgctcccctcactgcagcaggaagcctaacttgcgaactgcaggtgtgctccaggtggtcactggatgcaagaaatggtgcgagaactttggatgtggaacgtggaggaggaggaacacgaagtggggatctgcacttggggtggtcagcactgcggatgcccagcaaagtcactgcctggtccacatcccggaggggtctctgcgcctcagtcggcatcgcagctgatggtgaaacttttggtgtggcagaagagtgtccacaaacttcggaaggtatccgctacatcctccatagccgtgtatccctgcccagggcaatcttctgggggagcggaaagtcctgctcccgggccagggctggctggctggagccacttgtgcggcgcagccctggcggaggttcaggcggccccggtgtcgcaagcggctgtgagtgatgcctccctggggccggagtggtcccaggaaggctgcagaccagggctgaccagcgggcagcatggtggccgcgatggaaggtgacggggttcgcagcgccaggggacccagcagagcccgagcccgggcatcccgcatctccagcagcatcgcaggtaggcctggtgctggtgaagtggcggc

SEQ ID NO: 28127 - protein, 152 aa, Homo sapiens; identical to SEQ ID NO: 28125

SEQ ID NO: 28128 - DNA, 1554 bp, Homo sapiens
gtttcactcttgttgcccaggctggagtgcaatggcatgaactctgctcactgcaacttctgcctcccaggttcaagtgattctcctgcttcagcctcccaagtagctgggattagaggctctaaccatggaatactgggaatgtccctttctgtgaaggaggtttgtcagccacaacaggaatattcatgaacatgaaggggttgggcatgttccaggatctgtctatcgacttctctcaggaggaatgggagggcctggacactgctcagaaggacttatagagagatgtaatgatggagaactatagcagcctggtctcactaggtctctctatcccaaagcctgatgtgatttccttactggagcaagggaaagagtcctgcatggtttcaagggacgtaccaggaggatggtgcccagttttcctttaatgcagccatttcatgcatcaatggatattcattcagcactctttttttttttttggatacagagtctcactctgtagcccgggctggagtgcagtggtgtgatcttgtctcactggaagccaataagaaacgcttggggatgacctccctacaagcacaggaaaaccattcctgcgcatttctgcgctggaacgcctacctttagtgccgtttcctgcgctttcttgcagatttgtatcaggcactggagaacctcccacctggtccatgcccggctcccggtgagcaccgagacccaaccttgtgcacagccagtcttgtcatcaacaaacagggtagtaaattataaaaaataaaataaaggaaatgtagctgggcgtggtggcatgcgcctgtaatcccagctactccggaggctgatgcaggagaatcgcttgaacccaggaggtgaaggttgcagtgaggcgagatcgcgccactgcgctccagcgtggatggcaagagcgaaactccttctcgaaataataaataaaataaaggaaatagggccgggcatggtggctcacgcctgtaattccagcacttttggtggccgaggcgggcagatcacttgaggtcagaagttcgagaccagtctggccaacatggtgaaaccccttctctactaaaaataaacaattagccaggcatggtggcgggagcctgtaatcccagctatttgtgaggcggagacacaagaatcgcttgaatcccggagacagaggttgcagtgagccgagctcgtgccactgcgctccagcctgggcgacagagcaagactccatcttaaaataaaataggccggccgagggtgctcatgcctgtaatcacagcattttggaggctgaggcgggtggattgcctgagctcaggagttcaagaccatcctggcctacatggtgaaaccccatctctactaaaaatgcaaaaattagccgggcatggtggcgcatgcctgtaatcctagctactttggaggctgaggcaggagaacagtttcaacccaggaggcggaagttgcagtgagccgagaccgccacattgcactccagcttgggcaagaggattgaaactccatcac

SEQ ID NO: 28129 - protein, 51 aa, Homo sapiens
MNSAHCNFCLPGSSDSPASASQVAGIRGSNHGILGMSLSVKEVCQPQQEYS

SEQ ID NO: 28130 - DNA, 6282 bp, Homo sapiens
actgttgccgtggatgggtccctgagactttgcgaagtaggagccctgtgtgatagtgcgtcagagtcgggcctgagagcagtcctggccagggctttaacaggatggtctccggagcctgggattctcggagggctgaccaccaggaagaaacctcagaaggtagaaacctcaggcggatcgccgggcggcagcgcgagatcccagcctcaggcccggattcgggaagggtcgacgaagcccttttcccaatcttcacttcacccgccgccgccccagtccccgcagccgccgctccgcggtcatttttcttttctatctttttttttttaatagtcggaatctcactctgtcactcagtcgagtgcagtggcgggatctcagctgactgcaaactctgccgcccaggttcaagtgattctcttgcctccgcctcccgagtacctggtactagagggattagtcagtgtcggggctaagaccagtcctggccagggcatcaacaggatagtctctggaggccgggattcacggagggtcgtccaggaggaagaaactgcaggtggagggccgggcaagcagcgcgggatcccaggttcaggcctgcacggacggtgtgccagtgagtctcttcaaaaaaggagaggtttgcttgtgtgcccgtgggctgctctctcactagtgggttgtagtcgtggagagcagaaccctgaaaattcaggggctgcctgggtgtaggtgttaccgtgccactgctgtatgtctgtgcgtttgtgtgtgtgcgtatgtctctctcttgtttctctctctcccttttctcactcttttgctctgtgtccctgtgtgcgtgtgtgtgtgtgtgtgttgggacatatgtgccctgtgcgccagaggacggtatcttctacgtccgcctttcttgtggtcagcctctccccgcgtctctgcctggcttgcgtggcccgttgtcagtcatttttctggcggttccagtttaggtttgtgaaggtccagatgagatggggagctgcgtctctctcataagaatttaaatcacctccccaccctgagaggcctcttttccaggataaaggcctccacccccaagccaaggataatagcctcaccggagaggtcattgtctacctgcaggagcagtgcagagcgacctgaaagaaggtggttctcattcgtctctctctttcatctccttgagaaatctagccacagggtaacacaggttttgagaggatgggaacgggacgtggcaaggatctgtgagtgtgcaggctgtgtttcacatatcattaaacatagtctagtgagggttctgcagataactggcatttaagtttgttttattgaatcaaggaaaaagaaaaaatactgagaaaaaaatgacgcaacttgcctgccagcccatctgactgttacaaatttaatagtaattttaatttatcatctcatgtaaaggtccttggcagtgatacctaatttcctaagatagccttgctttatattgtgtgattaagatgtcatgcatatcagagtatctggaaattcttcccaacgtcctttacatacgtgattaatcacatttccaaaataacataccaaaacgaataacagaaaatcattttaagttgtggttccttcatgcacaaaacatttcatgtgtgtctggccctcttccggccacagatttcatcttaacctaagtattgaaatgcttgtgccctttgattaatttttctgtgtaaatactttgataataagctacattgaggccgggtgcagtggctcacacctctcatcccagttctttgggaggctgaggccagcggatcacgaagtcaggagatcaagaccatcctggccaacacagtgaaaccctgtctcttcaaatatacaaagaattagccagagaagcagggaatctggaattttgggtgaaatgtctgtttccagaagctgaaaatgctctcaaatggaaaattcaggtaagattggggaagatgccaggtgatagaatccaccctgcctctgacagcatccaatctggagcaaaggcttctttcaaccttcccccaagctcccaatacaagcccaaattctggaacaagtcctttccaacacctccttcagagaagctccctggctccaggcagtgcttgctcccctcactgcagcaggaagcctaacttgcgaactgcaggtgtgctccaggtggtcactggatgcaaggtattgacagatggatcccattgatacccccactgcataaccatgtaagcctatcatcccccacttgcacatgaggaaacggaggtccacagggtggggaagggaagacataatttgtccttcaaatgcgataccggtgagatgtgagaggcagcatccctcataactcagcaaggcagtgggcacactaggaccctcccaggcagatcgggtgcgtggtcgcccccattgcatagcatgggtgggagttggggagaccagacatgggtctcaccacctctgcactggcccgacctctctgcaggcccccaggacagggttagcatctgcttgctggcaggcctggccaccagaagtatttgcttatgtctaaggtccctgtagttgtggttcacaggattggggctgctcctgagattcagcaccacacaggcactgcatggaactgtgctatggtggtgggcactcgctttccagatagggcccatgttgccagcaggcatgatgcatcatttaccctaccctgagtgcaatatgtggttttatagaaaaaaacttgggccagatgcggtggctcacacctgtaatcccagcagtttaggaggccaaggtaggcggatcaaaaggtcaggaactcaagaccagcctggctaatatagtgaaaccttgtctctatgaaaaatacaagaattagccagatgtggtggtgggcacctgtagtcccagctacaccggatactccggaggctgaggcaggagaatcgcttgaacccaggaggcagaagttgcggtgagccaagatcatgccactgcactccagcctaggcgacagagcaaaactccttctcaaaaaaaaaaaaaaaaaaaaaaaaaagaaagaaaaggaaaagtatttgtagatgaatgaaggtgattcctttgaatattgaaaatgattttattttagccattggtctgacactcattccgatggggtgacatgtgtccctgccttagtcatcagagcacaggagtttgctacacctcccctcatctgaagattcagcccatgagcaggaacgcctgtctttgtgtcataccaacagagaggatgtgtctggtttcaccattcactgcagaggcagaaattacccagaaagaagagacagtctgttcccgggagtgtgtccttttgaccccgcatgggggtcatctcccttccttggccaggacccccaacctgaacacagaggtagagaacatgtgaagggctcccattcccaggtggtccagggtgcaagctctgagcctgtggtcctggtcactgcccttttctccacagcatggcagtcaccatcctgggctggggtacagaggggctttgcagagatcagcataacaaaagcatcactgagatgctgcaataggaaaccgtgataccttcgtgggctgccaaggcagcctaagctatttgttgctgcactcagtgtccccagacagctgtgtggctgtcactgcctctgatgtgtccattttacttctcttctcctgcctcagcttctgctctgaactctgtctctaacttacaagaaatcaagctcactggattctgagctcttcggggtcaaggactgtgtcagtagttcatgtctctttctagagatcacagcttagtatctggcacagagcagatactcagccaatgccaaatgattcatttgccagaaggctgaatatcatccataatcctagtcaatgcaaatacattttgccggtggggtgtgtttgtcctctgaaggcgttttcccaggctttgtaaatacatacaggccatttagaaatttgaatgtcaaagagtaaaggagcttagaaagtaagcattggagaagtgtgggagggtggtattatttacaaaacattcctgggtccttgtgagttctatacacccttgatgagcactgattctgggccaggccagacacccagctggacccaggagatactgaggtgagtaaagccaaaatgcctccattcagcaggaggcgggcagtcacaccaaagtgataaaggcacaaaatgcagaggcagcagaggagcaatgactaccttgttccaggactctgtgacctcagggagagctttcagaggaggacatctgtgcaaggcttggaaggatgaacacaaatttgcctagcagaaaagggagccaagcaaatcctgatggagaacagcttgggtgagagtgtgagccacaggattgaggggctcaggcatgtaactggaggagcagaaagaatgaggggagataaagttgggaggtcagcagaggtcagtcacagaaggttttgaatcctggtgaggaagcaatgggtgctgcacaagggacatgggcctggaggagatgcagttagctctgagtgaagatggagcatgccatccaccagggaaccacaagatgcaatagaaataagaaccctgagaagcctgcacaaagaatgaggggcccaggggtagcaccaagaaggtccctgtcagaggccagctttgaacggagacagaaaagactcttgagggcctcagctgctgcaaacctcctcaataaatcatattttaccttccaatatttgctaaagaatactaactattggaagagcaatggcccattgataataattattccctcaatgtacattttttacaattctcaaaatgctctcggtccagtctctcattggaacccccataaaatcccattttacaaatagggaaatgaggccctgtgatgtcacaccgaggtttgcagcagttccaggatagaaaataggaagcactttcatctcagccctgggtataagtctcaaaattccttttcggggaggggatccttgaggccatccagcagcccatagtccaagtctttttcttcctccttgggcttctccacacctgtatccaaagcttccttctcctcctttgttctcaggtaccactaccagttgttgggcagggagacctcctgctgctgcccatcctatgttgcatcctccaacatgggtgcactgtggttcagccagcacctataccacctgcagcccagggctcctgtggtgggcctgaggttcctccctatcaaatggagatatgctggggttgctgcctttgctgaagcccatgtccaggtcatcttgggggtggccaaggttacagggtcctggggacaggccagagggctgcaggagcaaaaaccaagaggatgaggggatctgtgagacagaccgcctgaatccacatcctagagactaggtgcaaggcctggggaagactggttcacctctctgggcgtcagtttcctcccctgtaaagtgggagttataacagattcactcctacagttgtctctgagctttatggcaggtaatgtgtgcaaagtacttcgcacaaggcctggcacatggtaggtgataaataataaacagggttactatgatatcatcatctgagctaggtcactcatgcacttctccaatgcttcagggtgcccctccatccctcacagggtagcagcaagtgctaccccagcaggatgtgataaggaagtcaggcggttggggaggatgtttctcgcagcccaaaccccagtggaatgtttccctctgaacagggtctgtgaaatggtgggggcttacaaatcggtgcagcttggactaacaggctccggcggccactttgttttctggacatgctttggactgtgagccgagcctctatgaatcatcacttcagcctctgattggtcctgggccaaactttcacttcagcccctgattggtcttgggccaaaatttcacttcagcctctgattggtcccaggctaaggtcccgggccaagcgaagtcgtgctatctccaagacagctcacagaccagtgagcacattcttcctcttcccagttcacaaaacccccagattcagcctcctagttggcaaccctctttcgggtcccctctctgctggggagagctttcttcttttgcttattaaacttctgttccaaactca

SEQ ID NO: 28131 - protein, 124 aa, Homo sapiens
MVSGAWDSRRADHQEETSEGRNLRRIAGRQREIPASGPDSGRVDEALFPIFTSPAAAPVPAAAAPRSFFFSIFFFLIVGISLCHSVECSGGISADCKLCRPGSSDSLASASRVPGTRGISQCRG

SEQ ID NO: 28132 - DNA, 437 bp, Homo sapiens
attggggaagatgccaggtgatagaatccaccctgcctctgacagcatccaatctggagcaaaggcttctttcaaccttcccccaagctcccaatacaagcccaaattctggaacaagtcctttccaacacctccttcagagaagctccctggctccaggcagtgcttgctcccctcactgcagcaggaagcctaacttgcgaactgcaggtgtgctccaggtggtcactggatgcaaggtaccactaccagttgttgggcagggagacctcctgctgctgcccatcctatgttgcatcctccaacatgggtgcactgtggttcagccagcacctataccacctgcagcccagggctcctgtggtgggcctgaggttcctccctatcaaatggagatatgctggggttgctgcctttgctgaagcccatgtccaggt

SEQ ID NO: 28133 - protein, 46 aa, Homo sapiens [sequence omitted]

SEQ ID NO: 28134 - DNA, 4598 bp, Homo sapiens
ccatacttcaaccactcttacactactgagtgttcaaactgtgctcaactaagatggtgtcagaagtaggatctgaagaagagacttaacaatccccaggagtgctgagtgaacaagcaaggtacctgcaaggacctacttttgtcccttgatctctcaaagtggctggggatcatggatggatacatgtgaccaagcattgcaagttaaagatatttctgaatcttggacctcttatttacagtgaagccccctcatgcatagtaaagcagagaggaatgtaaaaggttgctgcatggataatcaatttctgatggagtctcactctgttgcccaagctggagtgcaacagcatgatcttggcttactgcaacctctgcctcccgggttcaagcgattctgctgcctcagcctcctgaatagctggaattacaggcacccaccaccatacccagctaattttttgtatttttagtagagacggggtttcaccgtgttagccaggatggtcttaatctgctgacctcttgatccacccaccttgccctcccaaagtgcttagattactggcatgagccattgcaccaggtcttatttatctttttgagacaggttttagctctgtcactcaggctggagtgcagtggtgcaatgatggctcaatgcagcaccaacctccagggctcaagtaaccctcccacctcagcttcctgagtagctgggaccacaagcgtgtgtcaccatacctgacacatttcttagacctcagaaaagatgctcaacaccataagtcactaggaatattcagtattcaaatagaggcttcaatgggctccgaactatcccctcctgaactctataaaaagcgtgtttccaaccggctgaatgaaaacaaaggtttacatctgtgagatgaattcacacatcagaaagcattttcaccaagaacttttctagttttatagcaagatgttcattttttcaatattggtctcaatgggctccaaaatgtccctttgtacagtctacaaaaatttttgccaaagtactgaatcaaaacaaatgtttaacactgtgagatgaattttcaagtcaccaaacatttttacagatagtttgtatctactttttaatcacaaaacttagaattgttcactataagcctcaaagggctctaaattgtcccccttagcttctactaaaagagagttttgaacctagtgtgtagaaacaaaagtttaagtctgtgaaataaatccccacattgcaaagctatttcacagatagcttgcttctagtttttatcatgaattattcaacttttcactacaggcctcaatgggctctgaaatgtcccttcatacattctacaaaaagagtgtttccaacttagctgaatcaaaaggaagtttaaactgtatgagatgaaaccgcaaattgcaaagcattttcacatatagcttctatagtttctatcatataatattcagtttttcactgtaggcctccatgggctatgaaatgtcccctcataggttctacagaaaggtgtttccaacatgctgaatgaaaacaaagatttaactttgtgagatgaacccacacatcacaaaacatttttatggatggattttctctagtttttattgcagaatatttgatttcatgctgtaggtctcaattttctccaaaatttccccttgtagattctacaaaaagaatatttccaatctgctgaatcaaaaccgatgttcaattctgtgagatgatatgcaaagctttttcacagatagcctgtttctagtttttattgtgggatatttggtttttcactataagcatcagtgggctctgaaattgtccctttgtagattctacaaaaagagggtttccaacctgttgaatcaaaataaagttttaactttgtaagatgaacccacacatcgcaaagcattttcacccatagcttgtttctaatttttaccatgggttattggtttttcactaaatgcctcagtggactaggaattgttgccttgtagattgtacaaccaaagagtttccaacctgctgaagcaaaacacaggtttaactttgtaagatgaatctacacattgcaaagcatttttacagataggttgctttgagtttttatcaagagatatttgatttttcacagtatgcttcaatgggttatgaaatctccccttgtagattctacaaaaaaagtttccaaactgatgaatcaaaagaaaagttcaacttgtgagatgaaatcacacattacaaagtattttcagaaatagcttctttatagtatttctcgcaggatattagattttccaatattagcctcaacgagctctgaaatgtccctttgtagattgtacaaaatgagtgtttccaacctatggaataaaaaggaaggtttaactctgtgagataaatccacacatcacaaagcatcttcacagatggcttgtttctaatttttattgtgggatattcggtttttcactaaaggcctcaagcactccgaaatgtccttttgtagattctataacaagagtgttttaaaactgctgaatcaaaacaaacgtgtaactctttgagaggaacccacacatcacaaagcatattttcagatcacttgtttctagtttttaaagcatgatattcggtttttcactatatgcctcatcagactcagaaatgtctcatagtagattttacaaaaacagtgtttcctacctgctgaatcaaaacaacagtttaaatctgtgagatgactccaaacctcgcaaagcattttcacagatagttttttcctagtttttttcgcaggatatttggtttttcagtataggcctcaatgaactctgaaatgtccattcataggttctataaaagtgtgttcccaactccctgtataatagcaaaggtttaactctgtgaaatgaatctatacattggaaaacattttcacaaatagcttgttcctagcttttatgatgagacatttgattttttactattggcctcaatgggttcagaaatgtctctttgcagattctacaaaaaaaaaagtttttcatttttctgaacaaaaataaaggtttaactctttgatatgaaatcagacatcacaaagaattttcacacatagcttgtttctagggttcatcactggatattgtgtttttcattataggcttcaaaggagtcttaattgtaacttcctaattctacaaaaagagtgtcccccaacctgctgtatgtaaataaaggtttacctctgtgagataaatcttcacattgcaaagcattttccccgatagcttgtttctagtttttatatcgggatattgatttttcactataggcttcaatgggctttgaaagattcctctgtagattgtacaaaaagagtgttttaacctgctgaatcaaaacaacgtttaactttttgagatacatccacacatcacaaagtattttcacggataggtttttattttattttattttattttttttagatggagtctcactcagtcacccaggctggagtgcagtggcacgatcttggcttcccgggttcatgccattctcctgcctcagcctcccaagtagctgagactacaggtgtctgccaccaggccaggctaattttttgtgtttttagtagagatggggtttcaccatgttagccaggatggtctcgatctcctgacctcgtgatccacccgcctcagcctttcaaagtgctgggactacaggcgtgagccaccatgcctggccaatagcttttttttacttttattgtggaatattggtttttcactacaggctgatattggcttcaaattgtaccctcacagattctacaaacagtgaattttcaagcttctgaagcaaaataaaggtttaaccttgtaagatgaatctgcacattattgctggatattcggtttttcaccgtaggcatcgattttctctgaaatgtcctattgaagattttgccaaaagagtgtttctaccctgctgaatcaaaagaatggtttaattctgtgagatgaaatcacccatcgtaaattattttcagagacatcttcatatagtttttacctcagaatattcggtttttcactataagcctcaatgggctttgaaatgtctcccataaattgtacaaaaaaaaaaaggaatttccaacctgttgaatcaaaacaaatatttaatgttgtgagataaattcaaatatcgcaaagcattttcacagattttttttctactttttatcacggaatatttggtttttcactatagtcctcagtgggctcagaaatgccccttgtagattctacaaaaagaatgtttctaacctgctgaaccaaaacaatactttaactctttgaggtgaatccacacattgcaaacattttcacagatagcttgtttttagttttgatcacgtaatattggatgttttacaataggcctcaacgggctcagaattgtcccctcttagattctactaaaagagtgtttccaaaatgctgtgtaaaaataaaggcttaacactgtgagatgaatcg

SEQ ID NO: 28135 - protein, 72 aa, Homo sapiens
MHSKAERNVKGCCMDNQFLMESHSVAQAGVQQHDLGLLQPLPPGFKRFCCLSLLNSWNYRHPPPYPANFLYF

SEQ ID NO: 28136 - DNA, 3577 bp, Homo sapiens
atgcgcgaggcgcgaggcgcgagccgcttctcccatcacagtgattcccacggttgtcttagaaaccagtccaggaggcttggcaaagcaggagccctccgtggcagtacttgggcgtcgggactccgaggctctggcctgacctctccacggggtcgacaggaacgtctctggatgccaagagtcacaaagggcctaccaggacgaagaaaccccctggcggagtccgtgggaagcaccgcggcagcctagcctcaggcctgcccagacggtgttcagggtcaagatgaccacactccacccgaggacaaaagccccacaggagctcactgtcctgcaggagaggagcagacacacgtccaagaagatgattgcatcttttcatggctcttctctgagaaatgaagccacaccatgatacagtcttgaagaggaagccgggaatgggagatggcaacaatccctgtcacgggaacgctggcctctctggacaagtcactggttaggcccccctccccttgtgcccatgggggtggcaaagtgctgtatcctacctgagctctggcccctgctctgtcctccctcttgctctgtctcccctgtttctgtggtgcctagatgcatctaggtctagctgaatgtcttcaacaaagatcactttccagtccatcagggagacacttgatggacatgcgcatcactattttttctctctgccaatctgtttctgcttaattgggctggttggatgaccctggagagattgacttccatagctgtctcagataagcaagctaccttggtctccatgttccacctcatcggttggtggattgcctagaatgagcggtaggccactgtgaccagcctagtcttctaagacaggcagtgtcacatttcatctgcacttccagtctcattattgagaaacattctctcctctgctcctgggtggactgactccctgaatcttttggcctcctcctggatccaggtgttctttgattttccttggcattgatggaaaggtcacttgtgccccccttccacctggcacatgcctgaacaccatcttgtgtttcaccatcaccccatatgccttcagtgacacacattcacaccatctgctctgggatacgccagtgccacgcatgttggaattgactccacttcggaatcgcccttgtccctgtttgcatgtgtcctgaaaagaggtgtcagcttgcaagggccccagagcttttacaagtgggacaggcgactgctctttcaaaggaggagggaggcagagggctcatgggttagtgatttttctgctgacaccacaccttgaggcccatgtgatcattgtgccctgcaaggaggcccttcttttctcagcagatgtggtgagcccatccgtcttcacccggaggggtccaaaatcggatcttaagaggggtcttcagatgccagcaggtgccctgaagctctccctccaccggtggaagtcagcttaaggaagtctttgagacaggactcctcgggatttggccctgggacccccgtggccctctctcccctgccgccccctactggaacctgcatcccgccatcgccgcggctgcagcaggattccccctgccactgtgcagtcgccattgtttaaagaggccacagcctgccttccaggagcgcaacgcgagtcggcccagcaaatgcgtatccgcgaggctctagctgattctcccatcacattgatttccatggttgtcttagaatccagtccctgaggcttggcaaagcaggagttctctgtggccctgcttcgttattggggccctgagcctccagcctgactcgcaagggttttaatacccttcccatcctcagctgcctctttgctaggatcaagatgaccacaacccagccaaggacaaaggcctcacaggtgctcattgtccacccccaggagggtgcccacagaccttcaagaaggcggttttcactcctctcgcactttgccctcattcagaaatccaggaagaagcgaaactccttctcgaaataataaataaaataaaggaaatagggccgggcatggtggctcacgcctgtaattccagcacttttggtggccgaggcgggcagatcacttgaggtcagaagttcgagaccagtctggccaacatggtgaaaccccttctctactaaaaataaacaattagccaggcatggtggcgggagcctgtaatcccagctatttgtgaggcggagacacaagaatcgcttgaatcccggagacagaggttgcagtgagccgagctcgtgccactgcgctccagcctgggcgacagagcaagactccatcttaaaataaaataggccggccgagggtgctcatgcctgtaatcacagcattttggaggctgaggcgggtggattgcctgagctcaggagttcaagaccatcctggcctacatggtgaaaccccatctctactaaaaatgcaaaaattagccgggcatggtggcgcatgcctgtaatcctagctactttggaggctgaggcaggagaacagtttcaacccaggaggcggaagttgcagtgagccgagaccgccacattgcactccagcttgggcaagaggattgaaactccatcacaaaaataaataaataaataaataaataaataaatataaaagaaatagacaaagcaaatcttaatgcatgaactcaaacaaatgctttcactgccaggctccatctttgcaaaactgaacctaggacaatgtgaacgtttctaactagcaattctggaggacagatcagggaggcagcgtgagcttgcttttctgcaatttaattgactggtcagtaaagtcagtgtttgcaggcattttcaatgttctatagtgggcttcagtgcctgtggcaggccaggtttgcaatagcaaccagaacagtttctactaaccctttactataattttgatgaatgcataagttaacgttaaagaaatggagaaactggtgcctgagtatcacggatggaatgtgaaaacaaacccactgagaccccgtctgggttttctcagaccctaaaatctgatcgaataatgatagcgttcgtacacattcacctcggcctgtcttaagattcaaaaactttccaagactctagggaaatctttccagacgctagacccgagttaaagattagatgttgattgaatgaaacactcctgcttgtaggtgcaatcccacatggagcttaagatatatataagcactagaaaaaaaaacttgtaactttgagttgatctggtgatttacctggcgcttctccctgtaagtggctgcagaaataaacttccttctttcccagtctgtctgtatcttagtattgaacaattgcgatggagctgcccagcaaagtcctcttctatgtggttatctgggactccttttggagggaacattttaaattttccatttcaaagcattctgttggccttcttacactgtttttctctgcctatcctgggacctgagttctcctggacatgaatctgcagccacagagcctagaagct

SEQ ID NO: 28137 - protein, 51 aa, Homo sapiens [sequence omitted]

SEQ ID NO: 28138 - DNA, 542 bp, Homo sapiens
caatagtgatgtaatacattgccactatttcacaatcactcctattgagcaataattcaattcaaagatgcattaatgagatgtcaggtaataccaaagagtagctgattaatcaagtaagtttcctattcagatcaatgaaatcagttactgagagtaaggcctgacaataggacatgtttgttatttcaataatgactgcaaactagaagaagagatattgtttgtaaaatctttagacgctgaccgtaccagagcatctatttggctgtgaggcagagggtaagtggatatagggaggcatgtgtgtgattggaactttgtgtgtccccttgagagaaaaaaacctttagggagttagagcgggtccttggtaaaactcctttaaacagagaaacagccagaaaaatcaggctgcaggcacagagaaggaaaactagcaaagggggttgtcctaaagacattcctcagctgcactgataagggaccgaggcccaacatagaaatgcctttgtcctttgtgtgaccagcgggcttccagg

SEQ ID NO: 28139 - protein, 37 aa, Homo sapiens
GLTIGHVCYFNNDCKLEEEILFVKSLDADRTRASIWL

SEQ ID NO: 28140 - DNA, 418 bp, Homo sapiens
gcgccttggagtccggagtaacttggccaggctggccccgagcggaactggagaaagctgagggtctctctatcccaaagcctgatgtgatttccttactggagcaagggaaagagtcctgcatggtttcaagggacgtaccaggaggatggtgcccagatatatatatatggaaaagagaaggtccaagaatatcaaagacattgaagaagaggaaagatttgtcctgccaaatatcagaacttttataaagctacagcaattaagacagtgtggtcctcactgataaactgactaatgaaacagaatagagagctcccaagcaaatctctacaaatttaatcttcgatacgtgatgtaggtgacatggcagatcagtaaggaaagaaaggacttttcaataaatagaatagaaaaa

SEQ ID NO: 28141 - protein, 45 aa, Homo sapiens [sequence omitted]

SEQ ID NO: 28142 - DNA, 3146 bp, Homo sapiens
tgaaataggagccaaggtatgctatgagccaaggattatgagtaatccagttttgtgcactttaagccatttgaaaaacagaaaagcaaaacaacaaaataatttttaagaaattgaatatagggtgttatgctctgaatgtgtccccctaaaattaatcaccaatgtcataagattaggaagtagggctttaaggtagtgattcagtcatgaagggagagtgttcacgaatgagtttaggatccttacacaaggactggatggagtgggcttcccctgttttgcccttccaccttctgccatgtgaggacacagtgcatctcctcctgaagacacagtgcacaagataccatcttggatgcagagaccagaccctcaccagacaccaatcctgctggcaccttgatcttggacttctagcctatggaactgtaagattggggaagatgccaggtgatagaatccaccctgcctctgacagcatccaatctggagcaaaggcttatttcaaccctcccccaagctcccaatacaagcccaaattctggaacaggtcctttccaacacctccttcagagaagctccctggctccaggcagtgcttgctcccctcactgcagcaggaagcctaacttgcgaactgcaggtgtgctccaggtggtcactggatgcaaggcattgacagatggatcccatcgatacccccactgcaaaaccatagtgcagtgaatagaagacacttctctgcaccccaaaagctccatgctgattgtgagaaggaaatgctggatggaggggttcctggaactactgtgagggtttcttttgatttctcctgcttagaaatggtgagagaactttggatgtggaacgtggaggaggaggaacacgaagtggggatctccacttggggtggtcagcactgcgggtgcccagcaaagtcactgcctggtccacatcccggaggggtctctgcgcctcagtcggcatcgcagctgatggtgaaacttttggtgtggcagaagagtgtccacaaacttcggaagatcgctgctcagagtgaggaatggagttgtgttttgaataaaatatccacgcatccttttgtgagcaaggagcatgatggtacttagacctaccatttctcgttatggtggttgcggttacagtggggctggggtgtttacctggagcctggacatccactgggacatgatacccactgggaattttttgtgtcaatctggtctctgatgtccacctggggattgggtatccacctaaggcctgatgtttacctggagccagatgtgcacctgagacctgatgtctatctgtggccttatgttcccctggggaccgatgcacacctgaaggataggtattcatctggggcctgatacccaccagtagtatgggtgtcaaccttggggctagtgttcagctggcgtccactgtctacttggggcctggtgtacacatggggcctgggcatccacctgagacttgatgtttaatatggtctggagttcttttggggcctgttgtaccctggagcctgggtgtacacctggagcctgatgtcccaggtgaacaactgggtcccaggtgatcttcaggccctaggtgaaaactccaggctctaagtggacaaccaggctccaggctgatgtttactggggccagatgtctaccaggccccaggtgaaatccccaggctccaaatggacaacatagccccaggttccaggtagacattggaatccaaatcaacaccaggccccagatggacacccaggcctgtggtggacatcagactgcagaaggtcatctggctcgaggtggacatcaagccccaggtggatacctagtccccaggtggatatcaggccccactttgacaccagtccctgggtagataccttggcctcaggtggatatccagtctctagctaagcatcaggctccagggggacccaggccctagctgactggggactagtgttcatatggggccacatgtccatctgggccctaggtgtcaacttgtagcctgatgtcaacctggaagctggtgttcaccagagaggactaaagtcctcctggtgcctggtgtccaacttgggactttgtgtccacctggagaccgatgtccacttgggaccagatgtccagctggagcaagatgtccacctgcagcctaaaacttcacctaaggcctgatgttccccagggcctacagagcctatgtatctacctagggacttgtgtccaggtggggcctgaattccacctggggcctggaattaacctgggacctgatgtccacctgagacgtgggtgttcctctggagtctgatatctatctggggcccgggtgtcctcctgtggtctgatgtccacttgtaggctggtgtccacctggggcctgggtgtccacctaggaacctgatgtatacctgaagtccagtgtctacgtgggtactgatgtctaccaggaaagtgatataaacctggggcctgatagccacctgggccctgagtgtccacatatgttctgatttctcttttggccttagtgtagggcctgagtgccacctgcttcctgatgttcaccaggaacctaggtattcacttgggagccctgggggcctctgcccttttggccgcgttgtctcctggcttttagggtggtgggattctcggctctgattgcagcaggtggattcacttagctctcctccccttttagcattactgtcttctgtaataaacctctcactttgatctgccaggctgtcaaatgctttgattgccctctctgttttgttccaatggttcatcaatccaaatatccacaacacaaggacagattttagtctcttcatacagtgggatatttcacagctattaaaacaaatcaaataaatgcttgtgtattgatatgcaaagttgtcctgcatcaataacttttaaacacattttatgatcccacatctatatctatacataatgtttgccactgcttaaacaaaacaaaatctaagctttagactccaaatggaattacaggggaatcttgatgtctgtgttctgcagttctgtcatgtttgaaattgtcaaataaacatggtgcctttccagta

SEQ ID NO: 28143 - protein, 154 aa, Homo sapiens
MQGIDRWIPSIPPLQNHSAVNRRHFSAPQKLHADCEKEMLDGGVPGTTVRVSFDFSCLEMVRELWMWNVEEEEHEVGISTWGGQHCGCPAKSLPGPHPGGVSAPQSASQLMVKLLVWQKSVHKLRKIAAQSEEWSCVLNKISTHPFVSKEHDGT

SEQ ID NO: 28144 - DNA, 430 bp, Homo sapiens
cgagggagcgtggctcccctcgctgtggttgttggcagcaacggagagatagcagcgcggctggaacgcattcatcaacaacttttgaaacatatacgaaaattatctaaaaatcctcaaaataccaattcagaaggaacatctacaggaacacctgacgaggctgcacccttggcaggaagaacacctgacacggctgaaagcttggtggaaaaaacacctgatgaggctgcacccttagtggagggaacatctgacaaaattcaatgtctggggaaagcaacatctggaaagtttgaacagtcagcagaagaatatgttaggccatgtgtctctataacagctattgaactctgcattgtacagtgaaagcagtcatagataatgtgtgagcaaataggcatgattgcactccaataaaactttgtat

SEQ ID NO: 28145 - protein, 122 aa, Homo sapiens
RGSVAPLAVVVGSNGEIAARLERIHQQLLKHIRKLSKNPQNTNSEGTSTGTPDEAAPLAGRTPDTAESLVEKTPDEAAPLVEGTSDKIQCLGKATSGKFEQSAEEYVRPCVSITAIELCIVQ

SEQ ID NO: 28146 - DNA, 398 bp, Homo sapiens
caggatgcagaaacagcagacggagtccagggaaagcagtgcggcatcccagcctcaggcctgcccgtacggtgttcgggcacctcctacgaaccaggatctgtacttgctgtcccagttataaagtaaaacagcctgtccttcctgcactcaaggagacagctccataagcggggagcttgttaaaaatgcagaatttggggaactattcacagagatttttactaagttacgtggaaaaaagcctgggactagctacgatctcccctctggtgatttggatgtgatagtctcttaaacatattttgaaatatactcgcccaaagaatggagaaagacccagccggccctcctcatgtggctgctgagggagatatatgtataattaaaaaactgcc

SEQ ID NO: 28147 - protein, 39 aa, Homo sapiens
MQKQQTESRESSAASQPQACPYGVRAPPTNQDLYLLSQL

SEQ ID NO: 28148 - DNA, 804 bp, Homo sapiens
cagtgtttcttacaagatgactgatacatttcaaagcaccatttcttgttataacggcactcaagcattcatcaacaacttttgaaacatatacgaaaattatctaaaaatcctcaaaataccaattcagaaggaacatctacaggaacacctgacgaggctgcacccttggcaggaagaacacctgacacggctgaaagcttggtggaaaaaacacctgatgaggctgcacccttagtggagggaacatctgacaaaattcaatgtctggggaaagcaacatctggaaagtttgaacagtcagcagaagaatatgttaggccatgtgtctctataacagctattgaactctgcattgtacagtgaaagcagtcatagataatgtgtgagcaaataggcatgattgcactccaataaaactttgtataaaaaaccatttggtaagctgaatttggcctgtgatatatagtttcctggcccttcacacagaagatagatggagtgtaattacataaaaagttttaaagacaaagtaagcttttgtagtagttcatgctgtagtcttttttttttttgtcaccaatctgtggcctagtatcaatctattatgaaaatctgacccatccagggtaaaatgaatcaagttcagaagctcaatttacagatttaaacctgtaggtctttctttgccattattttattttgatttgtttaactgaattttttttaacttaaaaaataacaatagtatttggtagggtttctttttcatggtgaaagccatcagttaaggggccatgtcta

SEQ ID NO: 28149 - protein, 32 aa, Homo sapiens
MECNYIKSFKDKVSFCSSSCCSLFFFCHQSVA

SEQ ID NO: 28150 - DNA, 625 bp, Homo sapiens
catgaaggcaataagaatgaagacctctatgtataataattgacttccacttaataaatacctgaacagatgttgagtacaagctgatccacctacgttcaacctgagagagtccacatccacagactgtttcatttccctttttcaatttacatagaagcatagattcttgctggcatatacaaatgcgccatttaaggcaatcaaaaatggttccacatctcatctgatttccacaattgttgctgtaacgatggactactgaggagagagacaatttctctggcacatcttcccacattttagcaacatgttcatggagagccaatattcagtaattacagcccaattcctcacaatttcacaattcgctaacaatatgcattttcacaatgtaaagctgattttcctttaaccaaatcaaacatgaaaagatagctgcatgcaatgggcaatctagatcattagaagattgatgtaaaattagaggacactgagactggaatagattgcaaacttcagggagctcagaaaacttgtaaactctacattttgaggaaatatgttgtcgatgcttttgcaactctatgcagtaacttaacaaataaagccttaaagtaactta

SEQ ID NO: 28151 - protein, 34 aa, Homo sapiens
MFMESQYSVITAQFLTISQFANNMHFHNVKLIFL

SEQ ID NO: 28152 - DNA, 1817 bp, Homo sapiens
gtccggcgagtgacccccctccgccgcgagtcagctctccgcccgctcccttgccgagtcgcgaccggtgcggacgacggcgtttgcgtggcacgtggtcgggccgcctggccctgggaaagcgtcccacggtgggggcgcgccggtctcccggagcgggaccgggtcggaggatggacgagaatcacgagcgatgtggccctggcgttgagtttgtggctgtggtcgcttcggggccccggtggcgggaccaggggctcgtgaggcaggtcttggtgggtgccgagggccttccggcgtcccaggcggggcgccgcgggaccgccctcgtgtctgtggcggtgggatcccgcggccgtgttttcctggtggcccggccatgcctgaggtttctccctcagccgcccctctgcgggctcccaggtgcccttgccctcgcggtccccggcccttgcctgtctgcgcccccttccccgcccgccgcccgccgatcctctctcctccccgagcggctcaccggctttacgtcggttggtggccgcgtctgggaccgaaccgggcaccgccttgtggaaaaaaaagaatagaatataccctgttaaatcagacatgatacttgcttttgtggagcttatgctttagtgcagaaacagaaagtcaagcaaaaactcaaactatgtaactttaaattggatatgtgctaatgaaggaaaatgtggcactgtaagaaaaaataatagggagttaaaggataaataggagtttgctggatgaaatttatgaagagctgaagatttcaaacaaaagaaactgatgcaggagggtgcagctttggagtcaagaatgaagttctaggagatagagagcaaagaaatggtgggagaggaggtcaaacaagacaaatctctcctctgccttctccttatcagactactcaacatgaaggcaataagaatgaagacctctatgtataataattgacttccacttaataaataaggttacttggtacactggtcgacaaaaccttgaaatgttgatgtttaagggctgttgattgctggcagcaaagaagtccaactgtgctggtacccgagatagcgtctccacattttcttccaggatcatcacctttgttctaaatagctcccacatagtgtgaacagaagtcatatgttttagattttctgccttggcacccaggaaaccagtatgattgagtaaacatattaaacttcctctgcatttccagcctgaacagatgttgagtacaagctgatccacctacgttcaacctgagagagtccacatccacagactgtttcatttccctttttcaatttacatagaagcatagattcttgctggcatatacaaatgcgccatttaaggcaatcaaaaatggttccacatctcatctgatttccacaattgttgctgtaacgatggactactgaggagagagacaatttctctggcacatcttcccacattttagcaacatgttcatggagagccaatattcagtaattacagcccaattcctcacaatttcacaattcgctaacaatatgcattttcacaatgtaaagctgattttcctttaaccaaatcaaacatgaaaagatagctgcatgcaatgggcaatctagatcattagaagattgatgtaaaattagaggacactgagactggaatagattgcaaacttcagggagctcagaaaacttgtaaactctacattttgaggaaatatgttgtcgatgcttttgcaactctatgcagtaacttaacaaataaagccttaaagtaactta

SEQ ID NO: 28153 - protein, 35 aa, Homo sapiens
MVGEEVKQDKSLLCLLLIRLLNMKAIRMKTSMYNN

SEQ ID NO: 28154 - DNA, 1542 bp, Homo sapiens
ggcccgtcgtgctgccctcccggggagtttgcgcgagcgttggctccccctgggcctttgcggtgctcctggagcgctccgggttgtccctcaggttcccgaggccgagcggtggtgtgtcgttcccacccccagcgccccctcctccggtcggcgcctcggtgtccgcgcgtgggtcctgagggagctcgtcggtgtggggttcgaggcggttgagtgagacgagacgcgcccctcccacgcggggaagggcgcccgcctggtccggcgagcgcacgtccggtgctcccctctggcgggtgcgcacgggccctgtgagcgatcgcggtgggcttgggctggtgacgcgtgcgccggccggccgccgaggggctaccgttctgcctccgaccggtcgtgtgtgggtttactcggaggtgctttgcctctgaagaaaagagaaatactaggctttagaatttcaccatatgaattttgggagagaggagcacagttcagcccataactaacacacgacggaatgaagttgataatagtgagaccttgttggtacaagactatgtaacataacctgcgcttctcaacaaagaattgcttttctgacttctgcactcaatagcaagacaaatctctcctctgccttctccttatcagactactcaacatgaaggcaataagaatgaagacctctatgtataataattgacttccacttaataaataaggttacttggtacactggtcgacaaaaccttgaaatgttgatgtttaagggctgttgattgctggcagcaaagaagtccaactgtgctggtacccgagatagcgtctccacattttcttccaggatcatcacctttgttctaaatagctcccacatagtgtgaacagaagtcatatgttttagattttctgccttggcacccaggaaaccagtatgattgagtaaacatattaaacttcctctgcatttccagcctgaacagatgttgagtacaagctgatccacctacgttcaacctgagagagtccacatccacagactgtttcatttccctttttcaatttacatagaagcatagattcttgctggcatatacaaatgcgccatttaaggcaatcaaaaatggttccacatctcatctgatttccacaattgttgctgtaacgatggactactgaggagagagacaatttctctggcacatcttcccacattttagcaacatgttcatggagagccaatattcagtaattacagcccaattcctcacaatttcacaattcgctaacaatatgcattttcacaatgtaaagctgattttcctttaaccaaatcaaacatgaaaagatagctgcatgcaatgggcaatctagatcattagaagattgatgtaaaattagaggacactgagactggaatagattgcaaacttcagggagctcagaaaacttgtaaactctacattttgaggaaatatgttgtcgatgcttttgcaactctatgcagtaacttaacaaataaagccttaaagtaactta

SEQ ID NO: 28155 - protein, 34 aa, Homo sapiens; identical to SEQ ID NO: 28151

SEQ ID NO: 28156 - DNA, 950 bp, Homo sapiens
ccgccactgcgactgccacagaacccccgccacgtgttgctgaacctgtttaaagcggccacagccggagttcgaagagcaaagcaggagtccgcctgggcaatgcgcatgcgggaggcacgagcccattctcccgtgacggtgactccaacggttggctgaggacgattccctgagccttgacaaagcaggagccctccgtggcggtgcgtcggtgtcgaggctccagtctgactaatccagggggtcgacaaaacagattcgggacactatgctacacggagggcctaccaggatgcagaaacagcagacggagtccagggaaagcagtgcggcatcccagcctcaggcctgcccgtacggtgttcgggaggggaggagaccaatgtgaaaggagatggttctatctcctcgcggctcttctctgagaaatgaagccacgatacgaaacaatcttcaagaagaagctgaaaaccggatatgacacggatgtccccagaacacagcaggcatcctgaagctccgcctcctgaagctccccctccctcggtggaagtcggctcagggaggtcctgaggacaggactcctgggggtttggctgcagaatgaattcattaggactttatataatttttcaaatcatgaaattgcgcaagcttttgaatatggaattgggagggctttcagttcattcagtagaaaactggaacatttttgaaaggtgatctgcttgacacctttcaaagagcacaaaaccttgtgaagtagcagatgcaatgattaccaatgtactttataaaatgactttcagagtttgagatgaaattggcttttctgaaatatgtaagtctctggaaaaactcaacatttctaatcttgctttggaaagcctttaagtatgtaaaaatcaatttcttatatcttctctgaaataaacatggaatatcct

SEQ ID NO: 28157 - protein, 39 aa, Homo sapiens
MLHGGPTRMQKQQTESRESSAASQPQACPYGVREGRRPM

SEQ ID NO: 28158 - DNA, 851 bp, Homo sapiens
agttttttcctgtgctcctacttccctctcttctgtcaccttgtgaagaaggtgcctgcttcctcttcaccttccgccatgattgtcagcttcctgaggccaccccagacatgcagagctgtctgaagtctcagtgggctcaaccagctcccctgttcaacatccggcaaggtccaaacgaaggtgacaatcaacagggatcttattgggaagctctggtaaaaatggtgtcagaagtgggatctgaagtagagccttaacaatctccaggactgctgagtgaacaagcaaggtacctgcaaggacctacttttgtcccttgatctctcaaagtggctggggatcatggatggatacatgtgaccaagcattgcaagttaaagatatttctgaatcttggacctcttatttacagtgaagccccctcatgcatagtaaagcagagaggaatgtaaaaggttgctgcatcgataatcaatttctggtgagcaataattataggtaatgtaaaatgggacaattattgcttttcatcatatcttgaaagaactcttacagtccatgattttgaaaaaaaaaatctaagttcactctttttttttctattaaaaaaagacattatcctgtagaagttcaagagtaaaatctgaaggcagcttatctgacctggccacatggtcttgccacttgttaaatataactttctacacactaacttctccagacctcagatcttcaactctctaaaatggaaacctagtagtatttgtctctagacctgcagctgaactgagcattttagggaaggaacaaacatacacacgatatatatatagtcagattatgaaccc

SEQ ID NO: 28159 - protein, 49 aa, Homo sapiens; identical to SEQ ID NO: 5244

SEQ ID NO: 28160 - DNA, 3327 bp, Homo sapiens
atagatatctgcagagggccaactggaaacactgtatctgccctctaggaaaccagctaggagagttgtgtacttacggagggatggagttacaaaaggtaacccctgagactgcgggattctactctcgacgagaacgaccctcggatgagagagcagcccaggggcacgcaggccgacctgtcttagagatcacggatggcggcacgacttttggggagagtcaacccaaccaacacggtccgggcaggcctgaggctgggatgctgtgctgcttttcccggactccgcctggggtttcctcatcctgtttggcgctttgcgactcctggcatctggagacgttcccgtcgaccccgtggagaggtcaggccggagcctcagaaccctgacacccatggactgccgcggagggctcctgcttttctaagcctcggggactggtttctaagacaaccgtggaaccactgtgatgggaaaagccactcgcgcctcgcccaggagcattggctgggcggactcgcgctccgctcctggcagtcaggctgcgtcccctttaaataatggcagcgctgcggggtggcagcgaggctcctgctgcagccgcggagtcggctgcatccggggtccaatttgaggcagcgtgggagaggggccccgggtatattgtcccagggcaaaagccccaggagtcctgtcctcaggacctccttgagccgacttccaccgatggagcgggagcttcaggaggcttgctgtgttctcaggactccccttcagatccattttggcctgctgaatgagataggatgggctcactacatctggtgaggccgtagggcctcgctgcagcacagaataatcccataagtctcaaggcctagtgtcagctgcactttcactgatccatcagccctctgcttccttcctcctttgaaagagcagtggcctgccccgcttctaaaagccctggggctccggaaagccgaccgcgctttatgggactggtagaaagaggatcaggggtgaatccgagatggagaccatgtgaccacgcgtggcactggtgtatcccacagcagatggtgtgaatgtgtgtcaccggaggcatacattgtgatggcgaaaccaacaatggtgtccaggaatgtgcccggtcgaaggggggaatgagtgacctttccatcaatgccaaggaaaatcaaagaacacctgggaacgaggagggtgcctgtgccttagtccaagccacattttgaaatgcctgccagaggattaaagaggttttggcaaaattcaccccacccccaaccctccatggcccaggtagccctgacccaacctcccctgcaaccagccgcagacccagccccagccccagcccagtccctttggttcctttccccgacattcgttatggtcaaaagatccagagactcagtccacccaggagcagaggagaggatgtctctcacgaatgagacatgaagtgcagaggaaatgcgacaccacctgtcctagaagacaaggtctgtcacggtcgactagcgctcattccaggcaatccacccacccatgaggtgaaacacggagaggaaggaagcttccctgtctgagagaagtatggaagccaagagctccagggtcgtctatcctgccccatcaagcagaaacaggttgaaagagataaacgatcacgacagggatctccagtaagtgtctacctgacggactgggttgtgatcattgttgaagacattcagcgagagcgagaggcatctaggcccctcagaaacaggggagacagagcaagaggcaggacaaagcagaggccaaagcccaggcaggatacagcactgtgccactgccacggccatgaggggaggggtaccaaaaaggtggcttttccagaaaggccagcgttccagtgactatctgtgaaaatgctttgtgatgcgtgggttatccctcagagttaaacatttgttttgacttagcagtttggaaacactcttttttaagaatcaatgaagggatattttgaagcccatggatgagtatattgagaaactaaatatcccaccatagaaactagcaagaaattattagtgaaaatgctctgtgatgtgtggattcatctcacagagttagacttttgtttttattctgcaggtttcaaacacttttttgtggaatctacaaaggaacatttcagagcccacagaggcctatagtgaaaactgaatatcttgtgataaaagctagaaacaagctatctgtgaaaatgtttgtgatgtgtggatttatctcatagagttatacctatgtttatatacagcaggttggaaacactcttttagtagaatttaaaataagaaatttctgagtccttgaggcctattataaagaaatgaatatccctgataaaaactgacaacaaattatctgtgaaaatgctttgagatatgtggattcatctcgcaaagttaaacccttgttttggttcagaaggttgaaaatactctttttgtaatatctatgaagggatattttggagcccatagaggcctatactaaaaaccaaatatcccaggataaaaactagaaacaaggtatgtgagaaaatgttttgcaatgtgtagaatcatctcacagagttaaaccttgttttgattgggcaggttggaaacattctttttgtagaataaaagaagggacattttggagctcattgaggcctatagtgaaaaaccacatatgccatgataaaaactagaacaagctatctgtaaaaatcttttgcaatgtgtggtttcatctcacagagtttaacctttattttgacttagcgctttggaaacactatttttctagaatctgcaagggtacatttcaaacccaatgaggcctgtagtaaaaaactgaatatcccacgatgaaaactagaaactagctatctgtgaaaatgctttgagatgtgtggattcatctaatggagttgaatgttagttttgattcagcaggttggaaacttagcagtttggaaacattcattttgtagaatcaaagaggggacttttcttagccccctgaggcctatagtgaaaaatcaaatatcccgtgataaaaactagaaacaagttatctgtaaaaatgctttgcaatttgtggatttgtctcacaatgttaaacctttgttttgatttagtaggttggaaactctctttttgtacaattgatgaggagatatttcaaagcccattgattgaggcttgtagtgaaaaacctaaaatcctaataaacactataaagaagctgtctctgaaa

SEQ ID NO: 28161 - protein, 102 aa, Homo sapiens
MELQKVTPETAGFYSRRERPSDERAAQGHAGRPVLEITDGGTTFGESQPNQHGPGRPEAGMLCCFSRTPPGVSSSCLALCDSWHLETFPSTPWRGQAGASEP

SEQ ID NO: 28162 - DNA, 1231 bp, Homo sapiens
atggagtgtgaggacatcagaggatccctaatgactgtgggctatctgaggatgtgcatctccaagcgcttttccttccatgggtgtggagtaccaggggatactgtacatctttatcccactgtgacaatgcccccacttccacctacagcttgccatcctgtgagtataactcctgtatgggtgctggacacagtgttggggaagactgtgcaacaggggtacagctgttgggagctgcatctcctaccctcagtctccctgtctgtggttccagagggaagaagaggggaaaaaaaggatgaagagaattgtttcagtgctgggggagggcagagttcaaggactgccttcaagaggggctggcctcagtttgcctgttacagaagccaagggctaacagaggctcccctctgcctcacaaagaaggagataaatgggtccactggagagcaacggtcacaatcaagtcttaatgatgaattaataattcataattaccccagacttgcagataagcacaagcctactggaattatttcccagggaggaacacagtcagaaaggccgatttttcatgaagcaagcaaagaccgcggtcccggatcctgcaacttctacctcattttctccaggcctctccacttgcccgagctctcagccaccaggagacagacggaaggggcttctggattgcgttgggagcgggcactgtcccctacccactcctgctcagtttcccaaagtccagcgacttccgaccctccttggggggaaaaataccagtacccagacacctttgcaccctgttatatgactgggcttgcttcaggaatatcttacaaagaagaagaagaagaaagaacggcttggagtcatgtttacatctagttctactgatccgttcacatctggagagtttatttataactccctctataactctctgtttggagacactgtggctctattgacagactgatatctaggaaatattgctctatgtctaaccgtacctaaatgtgctgtggttgtatttacagatttatgtttgagggaaatataactatttccattgtatttgtgcatatacagtagttataggagcagatttatatatgggaaaatatacgactctcttacagccatccagctttatgtacatttgatatcctgacagatttatatctctgaacagctatatagataaaaacgtatattgttagaatta

SEQ ID NO: 28163 - protein, 296 aa, Homo sapiens [sequence omitted]

SEQ ID NO: 28164 - DNA, 717 bp, Homo sapiens
gcacccccagtctttccatcctcctcattcgtctaggtgcacccgaatcccctattccttatttcccgtatcactcaggcactggcagcgtcctttgcccactcctgttggccgcggcggctccaaagcgagctgggcagatgtgcctgagacaggtttgaccaggcaactgaaaagatatccctaagagaagacaaagcaaaggtatgaaaggaacacacgtccctgactgactaggaggaacagagctgcctgctgtctggaaccgcttcctcccagactaaggtttcccagaggaagagagagaatttggacaaatgaatgaggaacaacgctctcctgagggttttctttaaggggcgaggatcactgccgctagctcctttgaaagcaaagttaagaggcagcgcaggaaggcacagcaggaaggctcatggttagactacagagaaggaagcagccactgctggggacctaccctgtgctggtcactgacaagctgtctcattaaaccttcccggaccctcaacccctcctagtatcttatcctcattttacagatgagaagactgcggccaagagaggtccaatgccagtgggatcagcttcgatgggatgcgcacagactgacctcttctccccagccccttcaacttcccagagctgcagggggcctgggagttcttggtaacagcacattaaacctctgtttgtggg

SEQ ID NO: 28165 - protein, 51 aa, Homo sapiens
MRRLRPREVQCQWDQLRWDAHRLTSSPQPLQLPRAAGGLGVLGNSTLNLCL

SEQ ID NO: 28166 - DNA, 632 bp, Homo sapiens
acgccccgccccccccccccctcccggcagaaacctggaagtggaaatctcgggcattcaccgtttgggtgaagacggaggcgggttctggacagacgtaggctgtcagggagtgtttacttcgcctccacttctgttcctccctgccctggtgctgctccaggtcacatactcgtcctgagccggcttcagcctgtccgcgcagaagtctcccggagccatggcctagtactcttatgtgaagtctagcaagctcgtgctcaagggaaccgaggtgaagagctgggtcctgcagctctggtgggagcctcctcagttcttttcggatgcactccacccccgcgaatccggtggaagccgtggtgcagagagccggctttgtggcctcccaggcttcgctctgaccctgtctgggctggacggaggccggaccgcggttcctggcgcctgtgcagagaggggcagcctcccgtgctgacgaccctggaaacaggatagacgggcgggtgacccgtggccccgtacccacgagtttgggtcccctgaggcatctctccaggcctctgcctggcgagatggaaagaaagtatcaaggagtgagctgaagccactgcccttgagaaccctctcga

SEQ ID NO: 28167 - protein, 50 aa, Homo sapiens
RPWKQDRRAGDPWPRTHEFGSPEASLQASAWRDGKKVSRSELKPLPLRTL

SEQ ID NO: 28168 - DNA, 2196 bp, Homo sapiens
acgccccgccccccccccccctcccggcagaaacctggaagtggaaatctcgggcattcaccgtttgggtgaagacggaggcgggttctggacagacgtaggctgtcagggagtgtttacttcgcctccacttctgttcctccctgccctggtgctgctccaggtcacatactcgtcctgagccggcttcagcctgtccgcgcagaagtctcccggagccatggcctagtactcttatgtgaagtctagcaagctcgtgctcaagggaaccgaggtgaagagctgggtcctgcagctctggtgggagcctcctcagttcttttcggatgcactccacccccgcgaatccggtggaagccgtggtgcagagagccggctttgtggcctcccaggcttcgctctgaccctgtctgggctggacggaggccggaccgcggttcctggcgcctgtgcagagaggggcagcctcccgtgctgacgaccctggaaacaggatagacgggcgggtgacccgtggccccgtacccacgagtttgggtcccctgaggcatctctccaggcctctgcctgtaagaagaaaaagagcaaagataagaagagaaaaagagaagatgaagaaacccagcttgatacgttggaatctggtgaacagtaacaaactttggtgaaatttcaggaaccatagccattgaaatggatgagggaacctatatacatgcactcgacaatggtctttttaccctgggagctccacacaaagaaggggaaaatggctttgttggcctcaaatagctgctttattagatgcaatgaagcaggggacatagaagcaaaaagtaaaacagcaggagaagaagaaatgatcaagattagatcctgtgctgaaaaagaaaccaagaaaaaagatgacattccagaagaagacaaaggaaatgtaaaacaatgtgaaatcaattatgtaaagaaatttcagagcttccaagaccacaaacttaaaataagtaaagaagagagtaaaattcttaaaaaggctcagaaagatggatttttgcatgagacgcttctggacagagaaccaaattgaaagccgacagatactgcaaatgactggaatttttgtttctgccttatctttttgtgttttttttttctgaataaaatattcagaggaaatgcttttacagagttcttgagttgttgtgaaattattgtttagctagtagctagtttaaccaggattaaacaagtttaatcaggattcttcatggatgtacttccttggctaactacagtttttcacatggaaatgaaacttacagtacacacttaacgtatcacagaatttttttctggatttcctgtcctgaagcatgaagtgtactagaaaccaattcttcctgcgctacttgtggaatctttcttactggatcataatcttactttactttatacaatagatgcttaatcagtgcctttaataggaagttggaaactccaaatccaatcaacaaggctttgattctgcctcctaagtactacccagatcacagacaatccaaatatcagaactaggggtctgggcagagaggacaaatcatctattagggagtgggacagaaagtggaaacattacaaaggagcaagtaggctcagaacagaggggagagtagtactggggaaactccctacggaggacaggttagccacagtggatatgtatgtgatgcttttgtcctcgtgggctggaatggaagctgataaagaagttcagacgctacgtgttgcttaggtctgcttcgttgaagcctgtctctttcagagttcctaaacacaatattcccatggcatctaatcccagtgagtgctccaaagccaggctgtgtatcagatgccacgggaaattctgcctcaggactgaggttggttcaagcatctggatgatgtcaaaagtccacattgtgtgctggcctaacctgaaagaccctatctagttctagcctttaaattccttctgtcaccaaatctggagttacatggcatctgtacaatctgggtagctgaggcatgggatcagccctttaaaggagattttggagctttcattgtaggtctagcttcaacttggcactcccagttccaatagctggactttctctcatcgtgtgttctgatccttggattgggaaaaaagtaacc

SEQ ID NO: 28169 - protein, 128 aa, Homo sapiens
MREPIYMHSTMVFLPWELHTKKGKMALLASNSCFIRCNEAGDIEAKSKTAGEEEMIKIRSCAEKETKKKDDIPEEDKGNVKQCEINYVKKFQSFQDHKLKISKEESKILKKAQKDGFLHETLLDREPN

SEQ ID NO: 28170 - DNA, 736 bp, Homo sapiens
gcagaaacctggaagtggaaatctcgggcattcaccgtttgggtgaagacggaggcgggttctggacagacgtaggctgtcagggagtgtttacttcgcctccacttctgttcctccctgccctggtgctgctccaggtcacatactcgtcctgagccggcttcagcctgtccgcgcagaagtctcccggagccatggcctagtactcttatgtgaagtctagcaagctcgtgctcaagggaaccgaggtgaagaggcgagatggaaagaaagtatcaaggagtgagctgaagccactgcccttgagaaccctctcgaggagtctggcctcatgaagatgccagaataagtggcagagctaagaagtgacagaatcaggatttaaaatctggcagtgtggctctacaatctgctttgaactttaacataatatgtacaaagcctgaagcaaattctcagtactgtatttaagagggcatagcaattaagaagaaaaagagcaaagataagaagagaaaaagagaagatgaagaaacccagcttgatacgttggaatctggtgaacagtaacaaactttggtgaaatttcaggaaccatagccattgaaatggatgagggaacctatatacatgcactcgacaatggtctttttaccctgggagctccacacaaagaagtattgatgagggccctagtcctccagagcagtttatggctgtcaaattatctgattcc

SEQ ID NO: 28171 - protein, 41 aa, Homo sapiens
MDEGTYIHALDNGLFTLGAPHKEVLMRALVLQSSLWLSNYL

SEQ ID NO: 28172 - DNA, 2191 bp, Homo sapiens
gcagaaacctggaagtggaaatctcgggcattcaccgtttgggtgaagacggaggcgggttctggacagacgtaggctgtcagggagtgtttacttcgcctccacttctgttcctccctgccctggtgctgctccaggtcacatactcgtcctgagccggcttcagcctgtccgcgcagaagtctcccggagccatggcctagtactcttatgtgaagtctagcaagctcgtgctcaagggaaccgaggtgaagagctgggtcctgcagctctggtgggagcctcctcagttcttttcggatgcactccacccccgcgaatccggtggaagccgtggtgcagagagccggctttgtggcctcccaggcttcgctctgaccctgaaacaggatagacgggcgggtgacccgtggccccgtacccacgagtttgggtcccctgaggcatctctccaggcctctgcctgtaagaagaaaaagagcaaagataagaagagaaaaagagaagatgaagaaacccagcttgatacgttggaatctggtgaacagtaacaaactttggtgaaatttcaggaaccatagccattgaaatggatgagggaacctatatacatgcactcgacaatggtctttttaccctgggagctccacacaaagaagaatcgccctgaaatctggctatggaaaatatcttggtataaattcagatgaacttgttgggcattcagatgcaattggaccaagagaacaatgggaaccagtctttcaaaatgggaaaatggctttgttggcctcaaatagctgctttattagatgcaatgaagcaggggacatagaagcaaaaagtaaaacagcaggagaagaagaaatgatcaagattagatcctgtgctgaaaaagaaaccaagaaaaaagatgacattccagaagaagacaaaggaaatgtaaaacaatgtgaaatcaattatgtaaagaaatttcagagcttccaagaccacaaacttaaaataagtaaagaagagagtaaaattcttaaaaaggctcagaaagatggatttttgcatgagacgcttctggacaggtagctatttatttacttattttcactattttcagtagctaatagaaatggcatgtagaaaacctatattctcttaaattactgtagttttcacatttttgtctttatttataatttatgagtgtggcaatattacctagagaggacatcatgagtttgggaaaagactgtcaagaaagaatatctaaaaattataaccgattataagtatatactttaagaaattcaggtttgactgtatctacttcataaatttatcattataggatgtttatcatagcacattattcatatttattactcttcctatgtagataagtaatgtcctagatttacaacatagaaaaacaggtagagacgtttagctgtgagtgtaaaagtataaatcaattaagtgccagattttgataatcaccagccgctcatttaagtcctatgttacaaagttactcttaccctttttttacattacttgataaaggcaatgtttaattacatatttcctgttaactagctggtagagttcatacctaaagtcagtaaataatgttaagaattttttccagctgagcaaatggatatgtatctagttgtaagaaatcaagaagaggatataaaatataatcaggatgtggactctgaaacggaataacctctttgtcctgtaacttttttcacttgtaataatacagcattctcaccctattaaatggaaatttagagcacccttaaattccggaataattaaaattgctatttggattgaaaaagcccttaggcaatatttattgaatattaggaaataacttttataagattagaatccattttttatagaaaccaaatttaaaagtatacatattttaatatgtgttgtggtaatacaataaccacaattgaacacacagttttaaagctttttatatttagtagcagttgaatatatatggcatgttttacatagattaattttactatttttctttgtttaaacaagagaaccaaattgaaagccgacagatactgcaaatgactggaatttttgtttctgccttatctttttgtgttttttttttctgaataaaatattcagaggaaatgcttttacagag

SEQ ID NO: 28173 - protein, 101 aa, Homo sapiens
MALLASNSCFIRCNEAGDIEAKSKTAGEEEMIKIRSCAEKETKKKDDIPEEDKGNVKQCEINYVKKFQSFQDHKLKISKEESKILKKAQKDGFLHETLLDR

SEQ ID NO: 28174 - DNA, 3427 bp, Homo sapiens
gcagaaacctggaagtggaaatctcgggcattcaccgtttgggtgaagacggaggcgggttctggacagacgtaggctgtcagggagtgtttacttcgcctccacttctgttcctccctgccctggtgctgctccaggtcacatactcgtcctgagccggcttcagcctgtccgcgcagaagtctcccggagccatggcctagtactcttatgtgaagtctagcaagctcgtgctcaagggaaccgaggtgaagagctgggtcctgcagctctggtgggagcctcctcagttcttttcggatgcactccacccccgcgaatccggtggaagccgtggtgcagagagccggctttgtggcctcccaggcttcgctctgaccctgaaacaggatagacgggcgggtgacccgtggccccgtacccacgagtttgggtcccctgaggcatctctccaggcctctgcctgtaagaagaaaaagagcaaagataagaagagaaaaagagaagatgaagaaacccagcttgatacgttggaatctggtgaacagtaacaaactttggtgaaatttcaggaaccatagccattgaaatggatgagggaacctatatacatgcactcgacaatggtctttttaccctgggagctccacacaaagaagaatcgccctgaaatctggctatggaaaatatcttggtataaattcagatgaacttgttgggcattcagatgcaattggaccaagagaacaatgggaaccagtctttcaaaatgggaaaatggctttgttggcctcaaatagctgctttattagatgcaatgaagcaggggacatagaagcaaaaagtaaaacagcaggagaagaagaaatgatcaagctctcctaatctctgtcagcccttcatctttatgaccttgccttgtctaccagaacacacatccctcttactaaagattagatcctgtgctgaaaaagaaaccaagaaaaaagatgacattccagaagaagacaaaggaaatgtaaaacaatgtgaaatcaattatgtgtatgtatgcttttccttttagacctacagatttgacagtgaagtgcttctcaaagtgctttcaaaataaattacctaattagctggggatggtgttgcatgcctgtaggcccagctactcaggaggctgagacaggaggattgtttgagcccaggagttcaaggctgcagtgacctctgatcaccactgtattccagcctgggtgacagagcaagaccgtgtctgaaaaaatgaaaactgatagacaagaagaggcaacacaatgtagcctctaggacagagcactgagctaaatgcttttcttgaggtttcaggtttcctaatcatcctaccagctcccaaagctagtcacttgggttagtcaatctctctattcattcatagaatgggcgtgatgccagtcaaaggctgtgctatggtcaggacagaggggactccagccagcatgccctaatagaagtggggccttctgctacccagtcaatgagtggccctcctcttgagaggtcatgaaggtcatctttgttgttcaaaagctccagcttattaaaaaaatacaattagactttttttttctcccccaagacagagtctcactctgtcccccagactggagtgcagtgccactatctcggctcattgcaacctctgcctcccaggttcatgtgattctcctgcctcagcctcccgagtagctgggactacaggcacgcgccactacgctcggctaatttttgtatttttagtagagacggggtttcaccatgttggccaggctgttctcaaactcctgacctcgagtgatctgcctgccttggcctcccaaagtgctgggattgcaggcatgagccactgcacctggcctacagttagacttttttaataagtgaaaaaagaaattaacagtatttataaatttaatagtaaatatgtgtaatcagagtttgaggtatttttcaatgaagacattttctttgcagaaagaaatttcagagcttccaagaccacaaacttaaaataagtaaagaagagagtaaaattcttaaaaaggctcagaaagatggatttttgcatgagacgcttctggacaggtagctatttatttacttattttcactattttcagtagctaatagaaatggcatgtagaaaacctatattctcttaaattactgtagttttcacatttttgtctttatttataatttatgagtgtggcaatattacctagagaggacatcatgagtttgggaaaagactgtcaagaaagaatatctaaaaattataaccgattataagtatatactttaagaaattcaggtttgactgtatctacttcataaatttatcattatctttttataactattagaaccagagttagaaagaagcagtttgactaatataaaaattctgtggattctgttagagtagttcatgttccttaaaataagcatagatcaactaaaaaactaagtataaaagctaaacaagtgaaattgaagcagttttattgtaagatttggaagagtgcaggatgtttatcatagcacattattcatatttattactcttcctatgtagataagtaatgtcctagatttacaacatagaaaaacaggtagagacgtttagctgtgagtgtaaaagtataaatcaattaagtgccagattttgataatcaccagccgctcatttaagtcctatgttacaaagttactcttaccctttttttacattacttgataaaggcaatgtttaattacatatttcctgttaactagctggtagagttcatacctaaagtcagtaaataatgttaagaattttttccagctgagcaaatggatatgtatctagttgtaagaaatcaagaagaggatataaaatataatcaggatgtggactctgaaacggaataacctctttgtcctgtaacttttttcacttgtaataatacagcattctcaccctattaaatggaaatttagagcacccttaaattccggaataattaaaattgctatttggattgaaaaagcccttaggcaatatttattgaatattaggaaataacttttataagattagaatccattttttatagaaaccaaatttaaaagtatacatattttaatatgtgttgtggtaatacaataaccacaattgaacacacagttttaaagctttttatatttagtagcagttgaatatatatggcatgttttacatagattaattttactatttttctttgtttaaacaagagaaccaaattgaaagccgacagatactgcaaatgactggaatttttgtttctgccttatctttttgtgttttttttttctgaataaaatattcagaggaaatgcttttacagag

SEQ ID NO: 28175 - protein, 52 aa, Homo sapiens
MTLPCLPEHTSLLLKIRSCAEKETKKKDDIPEEDKGNVKQCEINYVYVCFSF

SEQ ID NO: 28176 - DNA, 4437 bp, Homo sapiens
gcagaaacctggaagtggaaatctcgggcattcaccgtttgggtgaagacggaggcgggttctggacagacgtaggctgtcagggagtgtttacttcgcctccacttctgttcctccctgccctggtgctgctccaggtcacatactcgtcctgagccggcttcagcctgtccgcgcagaagtctcccggagccatggcctagtactcttatgtgaagtctagcaagctcgtgctcaagggaaccgaggtgaagagctgggtcctgcagctctggtgggagcctcctcagttcttttcggatgcactccacccccgcgaatccggtggaagccgtggtgcagagagccggctttgtggcctcccaggcttcgctctgaccctgaaacaggatagacgggcgggtgacccgtggccccgtacccacgagtttgggtcccctgaggcatctctccaggcctctgcctgtaagaagaaaaagagcaaagataagaagagaaaaagagaagatgaagaaacccagcttgatacgttggaatctggtgaacagtaacaaactttggtgaaatttcaggaaccatagccattgaaatggatgagggaacctatatacatgcactcgacaatggtctttttaccctgggagctccacacaaagaagaatcgccctgaaatctggctatggaaaatatcttggtataaattcagatgaacttgttgggcattcagatgcaattggaccaagagaacaatgggaaccagtctttcaaaatgggaaaatggctttgttggcctcaaatagctgctttattagatgcaatgaagcaggggacatagaagcaaaaagtaaaacagcaggagaagaagaaatgatcaagctctcctaatctctgtcagcccttcatctttatgaccttgccttgtctaccagaacacacatccctcttactaaagattagatcctgtgctgaaaaagaaaccaagaaaaaagatgacattccagaagaagacaaaggaaatgtaaaacaatgtgaaatcaattatgtgtatgtatgcttttccttttagacctacagatttgacagtgaagtgcttctcaaagtgctttcaaaataaattacctaattagctggggatggtgttgcatgcctgtaggcccagctactcaggaggctgagacaggaggattgtttgagcccaggagttcaaggctgcagtgacctctgatcaccactgtattccagcctgggtgacagagcaagaccgtgtctgaaaaaatgaaaactgatagacaagaagaggcaacacaatgtagcctctaggacagagcactgagctaaatgcttttcttgaggtttcaggtttcctaatcatcctaccagctcccaaagctagtcacttgggttagtcaatctctctattcattcatagaatgggcgtgatgccagtcaaaggctgtgctatggtcaggacagaggggactccagccagcatgccctaatagaagtggggccttctgctacccagtcaatgagtggccctcctcttgagaggtcatgaaggtcatctttgttgttcaaaagctccagcttattaaaaaaatacaattagactttttttttctcccccaagacagagtctcactctgtcccccagactggagtgcagtgccactatctcggctcattgcaacctctgcctcccaggttcatgtgattctcctgcctcagcctcccgagtagctgggactacaggcacgcgccactacgctcggctaatttttgtatttttagtagagacggggtttcaccatgttggccaggctgttctcaaactcctgacctcgagtgatctgcctgccttggcctcccaaagtgctgggattgcaggcatgagccactgcacctggcctacagttagacttttttaataagtgaaaaaagaaattaacagtatttataaatttaatagtaaatatgtgtaatcagagtttgaggtatttttcaatgaagacattttctttgcagaaagaaatttcagagcttccaagaccacaaacttaaaataagtaaagaagagagtaaaattcttaaaaaggctcagaaagatggatttttgcatgagacgcttctggacaggtagctatttatttacttattttcactattttcagtagctaatagaaatggcatgtagaaaacctatattctcttaaattactgtagttttcacatttttgtctttatttataatttatgagtgtggcaatattacctagagaggacatcatgagtttgggaaaagactgtcaagaaagaatatctaaaaattataaccgattataagtatatactttaagaaattcaggtttgactgtatctacttcataaatttatcattatctttttataactattagaaccagagttagaaagaagcagtttgactaatataaaaattctgtggattctgttagagtagttcatgttccttaaaataagcatagatcaactaaaaaactaagtataaaagctaaacaagtgaaattgaagcagttttattgtaagatttggaagagtgcaggatgtttatcatagcacattattcatatttattactcttcctatgtagataagtaatgtcctagatttacaacatagaaaaacaggtagagacgtttagctgtgagtgtaaaagtataaatcaattaagtgccagattttgataatcaccagccgctcatttaagtcctatgttacaaagttactcttaccctttttttacattacttgataaaggcaatgtttaattacatatttcctgttaactagctggtagagttcatacctaaagtcagtaaataatgttaagaattttttccagctgagcaaatggatatgtatctagttgtaagaaatcaagaagaggatataaaatataatcaggatgtggactctgaaacggaataacctctttgtcctgtaacttttttcacttgtaataatacagcattctcaccctattaaatggaaatttagagcacccttaaattccggaataattaaaattgctatttggattgaaaaagcccttaggcaatatttattgaatattaggaaataacttttataagattagaatccattttttatagaaaccaaatttaaaagtatacatattttaatatgtgttgtggtaatacaataaccacaattgaacacacagttttaaagctttttatatttagtagcagttgaatatatatggcatgttttacatagattaattttactatttttctttgtttaaacaagagaaccaaattgaaagccgacagatactgcaaatgactggaatttttgtttctgccttatctttttgtgttttttttttctgaataaaatattcagaggaaatgcttttacagagttcttgagttgttgtgaaattattgtttagctagtagctagtttaaccaggattaaacaagtttaatcaggattcttcatggatgtacttccttggctaactacagtttttcacatggaaatgaaacttacagtacacacttaacgtatcacagaatttttttctggatttcctgtcctgaagcatgaagtgtactagaaaccaattcttcctgcgctacttgtggaatctttcttactggatcataatcttactttactttatacaatagatgcttaatcagtgcctttaataggaagttggaaactccaaatccaatcaacaaggctttgattctgcctcctaagtactacccagatcacagacaatccaaatatcagaactaggggtctgggcagagaggacaaatcatctattagggagtgggacagaaagtggaaacattacaaaggagcaagtaggctcagaacagaggggagagtagtactggggaaactccctacggaggacaggttagccacagtggatatgtatgtgatgcttttgtcctcgtgggctggaatggaagctgataaagaagttcagacgctacgtgttgcttaggtctgcttcgttgaagcctgtctctttcagagttcctaaacacaatattcccatggcatctaatcccagtgagtgctccaaagccaggctgtgtatcagatgccacgggaaattctgcctcaggactgaggttggttcaagcatctggatgatgtcaaaagtccacattgtgtgctggcctaacctgaaagaccctatctagttctagcctttaaattccttctgtcaccaaatctggagttacatggcatctgtacaatctgggtagctgaggcatgggatcagccctttaaaggagattttggagctttcattgtaggtctagcttcaacttggcactcccagttccaatagctggactttctctcatcgtgtgttctgatccttggattgggaaaaaagtaacc

SEQ ID NO: 28177 - protein, 52 aa, Homo sapiens; identical to SEQ ID NO: 28175

SEQ ID NO: 28178 - DNA, 2204 bp, Homo sapiens
gcagaaacctggaagtggaaatctcgggcattcaccgtttgggtgaagacggaggcgggttctggacagacgtaggctgtcagggagtgtttacttcgcctccacttctgttcctccctgccctggtgctgctccaggtcacatactcgtcctgagccggcttcagcctgtccgcgcagaagtctcccggagccatggcctagtactcttatgtgaagtctagcaagctcgtgctcaagggaaccgaggtgaagagctgggtcctgcagctctggtgggagcctcctcagttcttttcggatgcactccacccccgcgaatccggtggaagccgtggtgcagagagccggctttgtggcctcccaggcttcgctctgaccctgaaacaggatagacgggcgggtgacccgtggccccgtacccacgagtttgggtcccctgaggcatctctccaggcctctgcctgtaagaagaaaaagagcaaagataagaagagaaaaagagaagatgaagaaacccagcttgatacgttggaatctggtgaacagtaacaaactttggtgaaatttcaggaaccatagccattgaaatggatgagggaacctatatacatgcactcgacaatggtctttttaccctgggagctccacacaaagaagaatcgccctgaaatctggctatggaaaatatcttggtataaattcagatgaacttgttgggcattcagatgcaattggaccaagagaacaatgggaaccagtctttcaaaatgggaaaatggctttgttggcctcaaatagctgctttattagatgcaatgaagcaggggacatagaagcaaaaagtaaaacagcaggagaagaagaaatgatcaagattagatcctgtgctgaaaaagaaaccaagaaaaaagatgacattccagaagaagacaaaggaaatgtaaaacaatgtgaaatcaattatgtaaagaaatttcagagcttccaagaccacaaacttaaaataagtaaagaagagagtaaaattcttaaaaaggctcagaaagatggatttttgcatgagacgcttctggacagagaaccaaattgaaagccgacagatactgcaaatgactggaatttttgtttctgccttatctttttgtgttttttttttctgaataaaatattcagaggaaatgcttttacagagttcttgagttgttgtgaaattattgtttagctagtagctagtttaaccaggattaaacaagtttaatcaggattcttcatggatgtacttccttggctaactacagtttttcacatggaaatgaaacttacagtacacacttaacgtatcacagaatttttttctggatttcctgtcctgaagcatgaagtgtactagaaaccaattcttcctgcgctacttgtggaatctttcttactggatcataatcttactttactttatacaatagatgcttaatcagtgcctttaataggaagttggaaactccaaatccaatcaacaaggctttgattctgcctcctaagtactacccagatcacagacaatccaaatatcagaactaggggtctgggcagagaggacaaatcatctattagggagtgggacagaaagtggaaacattacaaaggagcaagtaggctcagaacagaggggagagtagtactggggaaactccctacggaggacaggttagccacagtggatatgtatgtgatgcttttgtcctcgtgggctggaatggaagctgataaagaagttcagacgctacgtgttgcttaggtctgcttcgttgaagcctgtctctttcagagttcctaaacacaatattcccatggcatctaatcccagtgagtgctccaaagccaggctgtgtatcagatgccacgggaaattctgcctcaggactgaggttggttcaagcatctggatgatgtcaaaagtccacattgtgtgctggcctaacctgaaagaccctatctagttctagcctttaaattccttctgtcaccaaatctggagttacatggcatctgtacaatctgggtagctgaggcatgggatcagccctttaaaggagattttggagctttcattgtaggtctagcttcaacttggcactcccagttccaatagctggactttctctcatcgtgtgttctgatccttggattgggaaaaaagtaacc

SEQ ID NO: 28179 - protein, 104 aa, Homo sapiens
MALLASNSCFIRCNEAGDIEAKSKTAGEEEMIKIRSCAEKETKKKDDIPEEDKGNVKQCEINYVKKFQSFQDHKLKISKEESKILKKAQKDGFLHETLLDREPN

SEQ ID NO: 28180 - DNA, 2046 bp, Homo sapiens
gcagaaacctggaagtggaaatctcgggcattcaccgtttgggtgaagacggaggcgggttctggacagacgtaggctgtcagggagtgtttacttcgcctccacttctgttcctccctgccctggtgctgctccaggtcacatactcgtcctgagccggcttcagcctgtccgcgcagaagtctcccggagccatggcctagtactcttatgtgaagtctagcaagctcgtgctcaagggaaccgagtaagaagaaaaagagcaaagataagaagagaaaaagagaagatgaagaaacccagcttgatacgttggaatctggtgaacagtaacaaactttggtgaaatttcaggaaccatagccattgaaatggatgagggaacctatatacatgcactcgacaatggtctttttaccctgggagctccacacaaagaagtattgatgagggccctagtcctccagagcagtttatggctgtcaaattatctgattccagaatcgccctgaaatctggctatggaaaatatcttggtataaattcagatgaacttgttgggcattcagatgcaattggaccaagagaacaatgggaaccagtctttcaaaatgggaaaatggctttgttggcctcaaatagctgctttattagatgcaatgaagcaggggacatagaagcaaaaagtaaaacagcaggagaagaagaaatgatcaagattagatcctgtgctgaaaaagaaaccaagaaaaaagatgacattccagaagaagacaaaggaaatgtaaaacaatgtgaaatcaattatgtaaagaaatttcagagcttccaagaccacaaacttaaaataagtaaagaagagagtaaaattcttaaaaaggctcagaaagatggatttttgcatgagacgcttctggacagagaaccaaattgaaagccgacagatactgcaaatgactggaatttttgtttctgccttatctttttgtgttttttttttctgaataaaatattcagaggaaatgcttttacagagttcttgagttgttgtgaaattattgtttagctagtagctagtttaaccaggattaaacaagtttaatcaggattcttcatggatgtacttccttggctaactacagtttttcacatggaaatgaaacttacagtacacacttaacgtatcacagaatttttttctggatttcctgtcctgaagcatgaagtgtactagaaaccaattcttcctgcgctacttgtggaatctttcttactggatcataatcttactttactttatacaatagatgcttaatcagtgcctttaataggaagttggaaactccaaatccaatcaacaaggctttgattctgcctcctaagtactacccagatcacagacaatccaaatatcagaactaggggtctgggcagagaggacaaatcatctattagggagtgggacagaaagtggaaacattacaaaggagcaagtaggctcagaacagaggggagagtagtactggggaaactccctacggaggacaggttagccacagtggatatgtatgtgatgcttttgtcctcgtgggctggaatggaagctgataaagaagttcagacgctacgtgttgcttaggtctgcttcgttgaagcctgtctctttcagagttcctaaacacaatattcccatggcatctaatcccagtgagtgctccaaagccaggctgtgtatcagatgccacgggaaattctgcctcaggactgaggttggttcaagcatctggatgatgtcaaaagtccacattgtgtgctggcctaacctgaaagaccctatctagttctagcctttaaattccttctgtcaccaaatctggagttacatggcatctgtacaatctgggtagctgaggcatgggatcagccctttaaaggagattttggagctttcattgtaggtctagcttcaacttggcactcccagttccaatagctggactttctctcatcgtgtgttctgatccttggattgggaaaaaagtaacc

SEQ ID NO: 28181 - protein, 152 aa, Homo sapiens; identical to SEQ ID NO: 5246

SEQ ID NO: 28182 - DNA, 1986 bp, Homo sapiens
gcagaaacctggaagtggaaatctcgggcattcaccgtttgggtgaagacggaggcgggttctggacagacgtaggctgtcagggagtgtttacttcgcctccacttctgttcctccctgccctggtgctgctccaggtcacatactcgtcctgagccggcttcagcctgtccgcgcagaagtctcccggagccatggcctagtactcttatgtgaagtctagcaagctcgtgctcaagggaaccgagtaagaagaaaaagagcaaagataagaagagaaaaagagaagatgaagaaacccagcttgatacgttggaatctggtgaacagtaacaaactttggtgaaatttcaggaaccatagccattgaaatggatgagggaacctatatacatgcactcgacaatggtctttttaccctgggagctccacacaaagaagaatcgccctgaaatctggctatggaaaatatcttggtataaattcagatgaacttgttgggcattcagatgcaattggaccaagagaacaatgggaaccagtctttcaaaatgggaaaatggctttgttggcctcaaatagctgctttattagatgcaatgaagcaggggacatagaagcaaaaagtaaaacagcaggagaagaagaaatgatcaagattagatcctgtgctgaaaaagaaaccaagaaaaaagatgacattccagaagaagacaaaggaaatgtaaaacaatgtgaaatcaattatgtaaagaaatttcagagcttccaagaccacaaacttaaaataagtaaagaagagagtaaaattcttaaaaaggctcagaaagatggatttttgcatgagacgcttctggacagagaaccaaattgaaagccgacagatactgcaaatgactggaatttttgtttctgccttatctttttgtgttttttttttctgaataaaatattcagaggaaatgcttttacagagttcttgagttgttgtgaaattattgtttagctagtagctagtttaaccaggattaaacaagtttaatcaggattcttcatggatgtacttccttggctaactacagtttttcacatggaaatgaaacttacagtacacacttaacgtatcacagaatttttttctggatttcctgtcctgaagcatgaagtgtactagaaaccaattcttcctgcgctacttgtggaatctttcttactggatcataatcttactttactttatacaatagatgcttaatcagtgcctttaataggaagttggaaactccaaatccaatcaacaaggctttgattctgcctcctaagtactacccagatcacagacaatccaaatatcagaactaggggtctgggcagagaggacaaatcatctattagggagtgggacagaaagtggaaacattacaaaggagcaagtaggctcagaacagaggggagagtagtactggggaaactccctacggaggacaggttagccacagtggatatgtatgtgatgcttttgtcctcgtgggctggaatggaagctgataaagaagttcagacgctacgtgttgcttaggtctgcttcgttgaagcctgtctctttcagagttcctaaacacaatattcccatggcatctaatcccagtgagtgctccaaagccaggctgtgtatcagatgccacgggaaattctgcctcaggactgaggttggttcaagcatctggatgatgtcaaaagtccacattgtgtgctggcctaacctgaaagaccctatctagttctagcctttaaattccttctgtcaccaaatctggagttacatggcatctgtacaatctgggtagctgaggcatgggatcagccctttaaaggagattttggagctttcattgtaggtctagcttcaacttggcactcccagttccaatagctggactttctctcatcgtgtgttctgatccttggattgggaaaaaagtaacc

SEQ ID NO: 28183 - protein, 104 aa, Homo sapiens; identical to SEQ ID NO: 28179

SEQ ID NO: 28184 - DNA, 3201 bp, Homo sapiens
gcagaaacctggaagtggaaatctcgggcattcaccgtttgggtgaagacggaggcgggttctggacagacgtaggctgtcagggagtgtttacttcgcctccacttctgttcctccctgccctggtgctgctccaggtcacatactcgtcctgagccggcttcagcctgtccgcgcagaagtctcccggagccatggcctagtactcttatgtgaagtctagcaagctcgtgctcaagggaaccgaggtgaagagctgggtcctgcagctctggtgggagcctcctcagttcttttcggatgcactccacccccgcgaatccggtggaagccgtggtgcagagagccggctttgtggcctcccaggcttcgctctgaccctgaaacaggatagacgggcgggtgacccgtggccccgtacccacgagtttgggtcccctgaggcatctctccaggcctctgcctgtaagaagaaaaagagcaaagataagaagagaaaaagagaagatgaagaaacccagcttgatacgttggaatctggtgaacagtaacaaactttggtgaaatttcaggaaccatagccattgaaatggatgagggaacctatatacatgcactcgacaatggtctttttaccctgggagctccacacaaagaagaatcgccctgaaatctggctatggaaaatatcttggtataaattcagatgaacttgttgggcattcagatgcaattggaccaagagaacaatgggaaccagtctttcaaaatgggaaaatggctttgttggcctcaaatagctgctttattagatgcaatgaagcaggggacatagaagcaaaaagtaaaacagcaggagaagaagaaatgatcaagattagatcctgtgctgaaaaagaaaccaagaaaaaagatgacattccagaagaagacaaaggaaatgtaaaacaatgtgaaatcaattatgtaaagaaatttcagagcttccaagaccacaaacttaaaataagtaaagaagagagtaaaattcttaaaaaggctcagaaagatggatttttgcatgagacgcttctggacaggtagctatttatttacttattttcactattttcagtagctaatagaaatggcatgtagaaaacctatattctcttaaattactgtagttttcacatttttgtctttatttataatttatgagtgtggcaatattacctagagaggacatcatgagtttgggaaaagactgtcaagaaagaatatctaaaaattataaccgattataagtatatactttaagaaattcaggtttgactgtatctacttcataaatttatcattataggatgtttatcatagcacattattcatatttattactcttcctatgtagataagtaatgtcctagatttacaacatagaaaaacaggtagagacgtttagctgtgagtgtaaaagtataaatcaattaagtgccagattttgataatcaccagccgctcatttaagtcctatgttacaaagttactcttaccctttttttacattacttgataaaggcaatgtttaattacatatttcctgttaactagctggtagagttcatacctaaagtcagtaaataatgttaagaattttttccagctgagcaaatggatatgtatctagttgtaagaaatcaagaagaggatataaaatataatcaggatgtggactctgaaacggaataacctctttgtcctgtaacttttttcacttgtaataatacagcattctcaccctattaaatggaaatttagagcacccttaaattccggaataattaaaattgctatttggattgaaaaagcccttaggcaatatttattgaatattaggaaataacttttataagattagaatccattttttatagaaaccaaatttaaaagtatacatattttaatatgtgttgtggtaatacaataaccacaattgaacacacagttttaaagctttttatatttagtagcagttgaatatatatggcatgttttacatagattaattttactatttttctttgtttaaacaagagaaccaaattgaaagccgacagatactgcaaatgactggaatttttgtttctgccttatctttttgtgttttttttttctgaataaaatattcagaggaaatgcttttacagagttcttgagttgttgtgaaattattgtttagctagtagctagtttaaccaggattaaacaagtttaatcaggattcttcatggatgtacttccttggctaactacagtttttcacatggaaatgaaacttacagtacacacttaacgtatcacagaatttttttctggatttcctgtcctgaagcatgaagtgtactagaaaccaattcttcctgcgctacttgtggaatctttcttactggatcataatcttactttactttatacaatagatgcttaatcagtgcctttaataggaagttggaaactccaaatccaatcaacaaggctttgattctgcctcctaagtactacccagatcacagacaatccaaatatcagaactaggggtctgggcagagaggacaaatcatctattagggagtgggacagaaagtggaaacattacaaaggagcaagtaggctcagaacagaggggagagtagtactggggaaactccctacggaggacaggttagccacagtggatatgtatgtgatgcttttgtcctcgtgggctggaatggaagctgataaagaagttcagacgctacgtgttgcttaggtctgcttcgttgaagcctgtctctttcagagttcctaaacacaatattcccatggcatctaatcccagtgagtgctccaaagccaggctgtgtatcagatgccacgggaaattctgcctcaggactgaggttggttcaagcatctggatgatgtcaaaagtccacattgtgtgctggcctaacctgaaagaccctatctagttctagcctttaaattccttctgtcaccaaatctggagttacatggcatctgtacaatctgggtagctgaggcatgggatcagccctttaaaggagattttggagctttcattgtaggtctagcttcaacttggcactcccagttccaatagctggactttctctcatcgtgtgttctgatccttggattgggaaaaaagtaacc

SEQ ID NO: 28185 - protein, 101 aa, Homo sapiens; identical to SEQ ID NO: 28173

SEQ ID NO: 28186 - DNA, 980 bp, Homo sapiens
gcagaaacctggaagtggaaatctcgggcattcaccgtttgggtgaagacggaggcgggttctggacagacgtaggctgtcagggagtgtttacttcgcctccacttctgttcctccctgccctggtgctgctccaggtcacatactcgtcctgagccggcttcagcctgtccgcgcagaagtctcccggagccatggcctagtactcttatgtgaagtctagcaagctcgtgctcaagggaaccgagtaagaagaaaaagagcaaagataagaagagaaaaagagaagatgaagaaacccagcttgatacgttggaatctggtgaacagtaacaaactttggtgaaatttcaggaaccatagccattgaaatggatgagggaacctatatacatgcactcgacaatggtctttttaccctgggagctccacacaaagaaggggaaaatggctttgttggcctcaaatagctgctttattagatgcaatgaagcaggggacatagaagcaaaaagtaaaacagcaggagaagaagaaatgatcaagattagatcctgtgctgaaaaagaaaccaagaaaaaagatgacattccagaagaagacaaaggaaatgtaaaacaatgtgaaatcaattatgtaaagaaatttcagagcttccaagaccacaaacttaaaataagtaaagaagagagtaaaattcttaaaaaggctcagaaagatggatttttgcatgagacgcttctggacagtactccaggtcattctgaagcaagcgatacaaaccacagaatgaggaacaccgccttcaagagactgagtcttgcttcccaacactagcttggtatctgagaccatctgcctgctgactggcttttctggcacaaacattctgcatgtaggcccagtgtgttcctcgactccatatcaacccgttcaccctcatgttcccttggttcctgtccccagtccagcgagcagaa

SEQ ID NO: 28187 - protein, 153 aa, Homo sapiens
MREPIYMHSTMVFLPWELHTKKGKMALLASNSCFIRCNEAGDIEAKSKTAGEEEMIKIRSCAEKETKKKDDIPEEDKGNVKQCEINYVKKFQSFQDHKLKISKEESKILKKAQKDGFLHETLLDSTPGHSEASDTNHRMRNTAFKRLSLASQH

SEQ ID NO: 28188 - DNA, 536 bp, Homo sapiens
tcccccaagacagagtctcactctgtcccccagactggagtgcagtgccactatctcggctcattgcaacctctgcctcccaggttcatgtgattctcctgcctcagcctcccgatgatctgcctgccttggcctcccaaagtgctgggattgcaggcatgagccactgcacctggcctacagttagacttttttaataagtgaaaaaagaaattaacagtatttataaatttaatagtaaatatgtgtaatcagagtttgaggtatttttcaatgaagacattttctttgcagaaagaaatttcagagcttccaagaccacaaacttaaaataagtaaagaagagagtaaaattcttaaaaaggctcagaaagatggatttttgcatgagacgcttctggacaggtagctatttatttacttattttcactattttcagtagctaatagaaatggcatgtagaaaacctatattctcttaaattactgtagttttcacatttttgtctttatttataatttatgagtgtggcaat

SEQ ID NO: 28189 - protein, 38 aa, Homo sapiens
PPRQSLTLSPRLECSATISAHCNLCLPGSCDSPASASR

SEQ ID NO: 28190 - DNA, 405 bp, Homo sapiens
atgcggcatccgctggtcctgctgctgctcctctctgccctggtgacctccttcactgcagcctctatccacgatgctcatgcccaagagagctccttgggtcttacaggcctccagagcctactccaaggcttcagccgacttttcctgaaagatgacctgcttcggggcatagacagcttcttctctgcccccatggacttccggggcctccctaggaactaccaacaagaggagaacgaggagcaccagctgaggaacaacaccctctccagccacctccatattgacaaggtgaccgacaataagacaggagaggtgctgatctccgagaaggtggtggcatccatccagccggcggaggggagcttcgagggtaactggaaggtacccaggatggagtag

SEQ ID NO: 28191 - protein, 134 aa, Homo sapiens
MRHPLVLLLLLSALVTSFTAASIHDAHAQESSLGLTGLQSLLQGFSRLFLKDDLLRGIDSFFSAPMDFRGLPRNYQQEENEEHQLRNNTLSSHLHIDKVTDNKTGEVLISEKVVASIQPAEGSFEGNWKVPRME

SEQ ID NO: 28192 - DNA, 5054 bp, Homo sapiens
cccgcagccgcatctggggcgccgcgccggccggaggagaggcatggggcgcccgcgggccggagccggggcgggggccggggcctaggcgcgcggacctgcgagcggacccgagaggcggcggcggcgcagcggaacggcagagcgggccggaggcggccgaggcgcccggcgcaggcacccgtgcctcccctctgccaggaaccttggggccttgtgtgtgaccaggacctggtggcccccgggcggtggcagagcccctgtcccaagctgcttcctgccggcacctctgatcaagtgcctagagggatgtgtgtgccagccctcggtccagtgcccgctcctgagctgactcctgctgggccccgacagcttgccgtgtttcctgtgcctgtagctccctggttggatagctgccgcccgggagaggtgacccgggcgccctgctagggtgaaggcccctgccctcggcccgggatcatgaaaggcctcggtgacagccgcccccgccacctctccgacagcctagacccaccccacgagcccctgtttgcagggaccgaccgcaacccctacctgctgtcgcccacggaggccttcgcccgcgaggcccgcttccccgggcagaacaccctgccaggagatggcctctttcccctcaacaaccagctgcccccgcccagcagcacctttccccgcatccactacaactcccacttcgaggtgccagaggagagccccttccccagccatgcccaagccaccaagatcaaccggctgcccgccaacctcctggaccagtttgagaagcagctgcccatccaccgtgatggcttcagcaccctccaatttccccgtggcgaggccaaggcccgtggtgagagccctggccgcatccgccacctggtccactcagtccagcggcttttcttcaccaaggcaccctcactggagggcacagcgggcaaggtcggtggcaatggcagcaagaagggtggcatggaggacggcaagggccggagggccaaaagcaaggagcgggccaaggctggggagcccaaacggcgcagccgctccaacatctcaggctggtggagctccgatgacaacttggacggcgaggccggcgccttccgcagcagtggcccagcctctgggctgatgacactaggccgccaggcagaacgcagccagccacgctacttcatgcacgcctacaacaccatcagtgggcacatgctcaaaaccaccaagaacaacactactgagctgactgccccaccacccccgcccgcacccccagccacctgccccagccttggggtgggcactgacaccaactacgtcaaacggggctcctggtccactctgaccctcagccacgcccacgaggtctgccagaagacctcagccaccttggataagagcctgctcaagtccaaatcctgccaccagggtctagcctaccattacctgcaggtgcccggcggcggcggcgagtggagcaccacgctgctgtccccacgcgagacggatgccgcggccgagggccctatcccgtgccggcgcatgcgcagcggcagctacatcaaggccatgggcgacgaggacagcgacgagtccggcggcagccccaagccctcacccaagaccgcggcgcggcgccagagctatctgagggccacgcagcagtcgctgggagagcagagcaacccccgcaggagtctggaccgcctggattcagtggacatgctgctgccctccaagtgtccgagctgggaagaggactacacccccgtcagcgacagcctcaacgactccagctgcatcagccagatttttggacaggcctccctgatcccccagttgtttggccatgagcagcaggtacgggaggcagagctgagtgaccagtatgaggcggcctgcgagtcagcctgcagtgaagcggagtccacagcggcagagacgcttgacttgccactgcccagctacttccgctcccgcagccacagctacctgcgtgccatccaggcaggctgctcgcaggaggaggacagtgtctccctgcagtccctctccccaccgcccagtaccggcagcctcagcaatagtcgcacgcttccgagttcatcatgcctagtggcgtataagaagaccccgccaccggtccctccacgcaccacttcaaagccgttcatctcagtcacagtccagagcagtactgagtctgcccaggacacctacctggacagccaggaccacaagagcgaggtgactagccagtcgggcctgagcaactcgtcggacagcctggacagcagtacccgaccgcccagcgtgacacggggtggagtcgccccagcccctgaggccccagagccacccccaaaacatgcagctctgaaaagtgaacaagggacgctgaccagctctgagtcccaccccgaggccgcccccaaaaggaaactgtcatcgataggaatacaagagaggactagaaggaacggttcccacctctcggaggacaacggacccaaagcgatcgatgtgatggcaccctcctcagaaagcagcgtcccctctcacagtatgtcctcccgacgggacacagactcggatacccaggatgccaatgactcaagctgtaagtcatctgagaggagcctcccggactgtacccctcaccccaactccatcagcatcgatgccggtccccggcaggcccccaagattgcccagatcaagcgcaacctctcctatggagacaacagcgaccctgccctagaggcgtcctcgctgcccccacccgacccctggctcgagacctcctccagctccccagcagagccggcacagccaggggcctgccgccgagacggctactggttcctaaagctactgcaggcagaaacagagcggctggaaggctggtgctgccagatggacaaggagaccaaagagaacaacctctctgaagaagtcttaggaaaagtcctcagtgctgtgggcagtgcccagctactgatgtcccagaaattccagcagttccggggcctctgtgagcaaaacttgaaccctgatgccaacccacgccccacagcccaggacctggcagggttctgggacctgctacagctgtccatcgaggatatcagcatgaagttcgatgaactctaccacctcaaggccaacagctggcagctggtggagacccccgagaagaggaaggaagagaagaaaccaccccctccggtcccaaagaagccagccaaatccaagccggcagtgagccgcgacaaggcctcagacgccagcgacaagcagcgccaggaggcccgcaagagactcctggcggccaagcgggcagcttctgtgcggcagaactcagccaccgagagcgcagacagcatcgagatttatgtcccggaggcccagaccaggctctgagaccatgcaggaggaaagaaacgattttaaatcattaaaaacacaaaaactaagtgcgaacggaacagagttttctcaacctttgctatggttattctgtctagagaccctgagccaactttcaaattgacgcatacaagggctcacaatttggcttttttgggtccctcccagctttaggttatgaagattttactcacaaaaaaaatcaacaaaaatcacgaaactagaaaactttttttttcctcttgctggccgtggtggactagatagatggacgtcggcaactcccggcccagcctccatactgcggtctttttactcgttctatctgatgagaactcacactagcttgtttacaagatgacgacagtccaagggcagccttgggcacctgccatgtccctcctttccccagctatccccgctctgaccttgattttcattcttatgtttttctcttttcccttcagagctcacacagtggtcaccattgtggcaagcggctttctgggtctcagccctctctgcggttgagggcccagaggacagagagatggacatgcgtcccctccctccccccgccaagtgctcacacacaacctcacgcgcacacacacacacgcagatggaggcgcctcactgggaggtgccccgccagccctgggcagtgtcaggcaggactcactcaccgctgagcagatgagggaagttttagtcttggcgggtggaaatgagacgaagccacagttatcacactccagactcctgcccttttattttctccagccccttcttccttcagcaaaatctaggactcccgagtggcttccagggggccgtcagtcctcagccgcgcctgtgtccggtgcccgaggggcgggcggcggtgtctgtatgtatgtgtacatatgcacatagaccttagagtgtatagttaacaaacgcccatctgctcacccatgcccacccagcgccgccgccgctggctctcggggcacctggcaggaggcgggtgtgtgaatagcatatatttttacatgtactatatctaggtgtgtgtacaagtgtgtgtaaaaatatataccttgtgtgtaagcagccctttttttttttggtctccacccccctccccccgccccgcactcctaagggcccatctgcccagcctctgagttttctgttctattttttttttaaccccaattatccttctctctctcctgcccccgcatcccactcccagggtgtcacgagccctgagctgcaatggcccgggcctgcagggcggggtaggggagggcaggggctgagccccgaagccagctcagtacctgaggggctgctctatgctgtgtatgcgcctctctggcatccgagacatcctcttggctggcgcttgctgcagggggggacccccccccgtccccaggtgaaccaagggtctgctccggggcccatttccagcttggccgccgtctgtgaccttgggcaagtcacttgacctctgtgtgcctcaacttcctcctctgtaaaacggggacagtccctgcccctccctacctcacaggcatgttgtgagaataaatgaggtaacgtgtacc

SEQ ID NO: 28193 - protein, 989 aa, Homo sapiens; identical to SEQ ID NO: 3865

SEQ ID NO: 28194 - DNA, 5600 bp, Homo sapiens
cccgcagccgcatctggggcgccgcgccggccggaggagaggcatggggcgcccgcgggccggagccggggcgggggccggggcctaggcgcgcggacctgcgagcggacccgagaggcggcggcggcgcagcggaacggcagagcgggccggaggcggccgaggcgcccggcgcaggcacccgtgcctcccctctgccaggaaccttggggccttgtgtgtgaccaggacctggtggcccccgggcggtggcagagcccctgtcccaagctgcttcctgccggcacctctgatcaagtgcctagagggatgtgtgtgccagccctcggtccagtgcccgctcctgagctgactcctgctgggccccgacagcttgccgtgtttcctgtgcctgtagctccctggttggatagctgccgcccgggagaggtgacccgggcgccctgctagggtgaaggcccctgccctcggcccgggatcatgaaaggcctcggtgacagccgcccccgccacctctccgacagcctagacccaccccacgagcccctgtttgcagggaccgaccgcaacccctacctgctgtcgcccacggaggccttcgcccgcgaggcccgcttccccgggcagaacaccctgccaggagatggcctctttcccctcaacaaccagctgcccccgcccagcagcacctttccccgcatccactacaactcccacttcgaggtgccagaggagagccccttccccagccatgcccaagccaccaagatcaaccggctgcccgccaacctcctggaccagtttgagaagcagctgcccatccaccgtgatggcttcagcaccctccaatttccccgtggcgaggccaaggcccgtggtgagagccctggccgcatccgccacctggtccactcagtccagcggcttttcttcaccaaggcaccctcactggagggcacagcgggcaaggtcggtggcaatggcagcaagaagggtggcatggaggacggcaagggccggagggccaaaagcaaggagcgggccaaggctggggagcccaaacggcgcagccgctccaacatctcaggctggtggagctccgatgacaacttggacggcgaggccggcgccttccgcagcagtggcccagcctctgggctgatgacactaggccgccaggcagaacgcagccagccacgctacttcatgcacgcctacaacaccatcagtgggcacatgctcaaaaccaccaagaacaacactactgagctgactgccccaccacccccgcccgcacccccagccacctgccccagccttggggtgggcactgacaccaactacgtcaaacggggctcctggtccactctgaccctcagccacgcccacgaggtctgccagaagacctcagccaccttggataagagcctgctcaagtccaaatcctgccaccagggtctagcctaccattacctgcaggtgcccggcggcggcggcgagtggagcaccacgctgctgtccccacgcgagacggatgccgcggccgagggccctatcccgtgccggcgcatgcgcagcggcagctacatcaaggccatgggcgacgaggacagcgacgagtccggcggcagccccaagccctcacccaagaccgcggcgcggcgccagagctatctgagggccacgcagcagtcgctgggagagcagagcaacccccgcaggagtctggaccgcctggattcagtggacatgctgctgccctccaagtgtccgagctgggaagaggactacacccccgtcagcgacagcctcaacgactccagctgcatcagccagatttttggacaggcctccctgatcccccagttgtttggccatgagcagcaggtacgggaggcagagctgagtgaccagtatgaggcggcctgcgagtcagcctgcagtgaagcggagtccacagcggcagagacgcttgacttgccactgcccagctacttccgctcccgcagccacagctacctgcgtgccatccaggcaggctgctcgcaggaggaggacagtgtctccctgcagtccctctccccaccgcccagtaccggcagcctcagcaatagtcgcacgcttccgagttcatcatgcctagtggcgtataagaagaccccgccaccggtccctccacgcaccacttcaaagccgttcatctcagtcacagtccagagcagtactgagtctgcccaggacacctacctggacagccaggaccacaagagcgaggtgactagccagtcgggcctgagcaactcgtcggacagcctggacagcagtacccgaccgcccagcgtgacacggggtggagtcgccccagcccctgaggccccagagccacccccaaaacatgcagctctgaaaagtgaacaagggacgctgaccagctctgagtcccaccccgaggccgcccccaaaaggaaactgtcatcgataggaatacaagagaggactagaaggaacggttcccacctctcggaggacaacggacccaaagcgatcgatgtgatggcaccctcctcagaaagcagcgtcccctctcacagtatgtcctcccgacgggacacagactcggatacccaggatgccaatgactcaagctgtaagtcatctgagaggagcctcccggactgtacccctcaccccaactccatcagcatcgatgccggtccccggcaggcccccaagattgcccagatcaagcgcaacctctcctatggagacaacagcgaccctgccctagaggcgtcctcgctgcccccacccgacccctggctcgagacctcctccagctccccagcagagccggcacagccaggggcctgccgccgagacggctactggttcctaaagctactgcaggcagaaacagagcggctggaaggctggtgctgccagatggacaaggagaccaaagagaacaacctctctgaagaagtcttaggaaaagtcctcagtgctgtgggcagtgcccagctactgatgtcccagaaattccagcagttccggggcctctgtgagcaaaacttgaaccctgatgccaacccacgccccacagcccaggacctggcagggttctgggacctgctacagctgtccatcgaggatatcagcatgaagttcgatgaactctaccacctcaaggccaacagctggcagctggtggagacccccgagaagaggaaggaagagaagaaaccaccccctccggtcccaaagaagccagccaaatccaagccggcagtgagccgcgacaaggcctcagacgccagcgacaagcagcgccaggaggcccgcaagagactcctggcggccaagcgggcagcttctgtgcggcagaactcagccaccgagagcgcagacagcatcgagatttatgtcccggaggcccagaccaggctctgagaccatgcaggaggaaagaaacgattttaaatcattaaaaacacaaaaactaagtgcgaacggaacagagttttctcaacctttgctatggttattctgtctagagaccctgagccaactttcaaattgacgcatacaagggctcacaatttggcttttttgggtccctcccagctttaggttatgaagattttactcacaaaaaaaatcaacaaaaatcacgaaactagaaaactttttttttcctcttgctggccgtggtggactagatagatggacgtcggcaactcccggcccagcctccatactgcggtctttttactcgttctatctgatgagaactcacactagcttgtttacaagatgacgacagtccaagggcagccttgggcacctgccatgtccctcctttccccagctatccccgctctgaccttgattttcattcttatgtttttctcttttcccttcagagctcacacagtggtcaccattgtggcaagcggctttctgggtctcagccctctctgcggttgagggcccagaggacagagagatggacatgcgtcccctccctccccccgccaagtgctcacacacaacctcacgcgcacacacacacacgcagatggaggcgcctcactgggaggtgccccgccagccctgggcagtgtcaggcaggactcactcaccgctgagcagatgagggaagttttagtcttggcgggtggaaatgagacgaagccacagttatcacactccagactcctgcccttttattttctccagccccttcttccttcagcaaaatctaggactcccgagtggcttccagggggccgtcagtcctcagccgcgcctgtgtccggtgcccgaggggcgggcggcggtgtctgtatgtatgtgtacatatgcacatagaccttagagtgtatagttaacaaacgcccatctgctcacccatgcccacccagcgccgccgccgctggctctcggggcacctggcaggaggcgggtgtgtgaatagcatatatttttacatgtactatatctaggtgtgtgtacaagtgtgtgtaaaaatatataccttgtgtgtaagcagccctttttttttttggtctccacccccctccccccgccccgcactcctaagggcccatctgcccagcctctgagttttctgttctattttttttttaaccccaattatccttctctctctcctgcccccgcatcccactcccagggtgtcacgagccctgagctgcaatggcccgggcctgcagggcggggtaggggagggcaggggctgagccccgaagccagctcagtacctgaggggctgctctatgctgtgtatgcgcctctctggcatccgagacatcctcttggctggcgcttgctgcagggggggacccccccccgtccccaggtgaaccaagggtctgctccggggcccatttccagcttggccgccgtctgtgaccttgggcaagtcacttgacctctgtgtgcctcaacttcctcctctgtaaaacggggacagtccctgcccctccctacctcacaggcatgttgtgagaataaatgaggtaacgtgtaccaagggcttgtggcattattgcagggggatgagcagagtgggcccaggaaactgaaccagacccctcccaaaaggcagctctgtggagacagcctgatgggagtgccagccgggatgccagctgtcacatgccagctctgtgatctggggcgggaagatggagctgaccgtcccctctcccgaaaatcagtgtgcagcacttaccagcttcctgtttgaaataaacccttgaaagatagatgctatcacaggagccaggataggctgataaagacgaccctagaggacagtttacaccccccacagatccacagtctgcacattctccagggtggggtactcggtatccccctgcctggcagctgcttccactctgtcaggtgcgagccctgagtgcatctccagagcacctcctctacaggcccagtgctggggcagagctcgctctggtgagggagacagatattgaacgtgacagataaggtcaagtcaatgacaggtggtaaaaaacaagacgcagcagaatgaggctgcaggaccccgcagc

SEQ ID NO: 28195 - protein, 989 aa, Homo sapiens; identical to SEQ ID NO: 3865

SEQ ID NO: 28196 - DNA, 3108 bp, Homo sapiens
acatgccaagcgggctgcgcgcgcccctgcccggcccgggagtccctgacgacgcgcgcgcggctgacgcggggggcggggaggggcggggcaggtgcgggactttaacccggagccccgcccctcgggcgtacaaaaccggagcctcgggccgggctgcgtgagggaggagggttcatcatgcctagtggcgtataagaagaccccgccaccggtccctccacgcaccacttcaaagccgttcatctcagtcacagtccagagcagtactgagtctgcccaggacacctacctggacagccaggaccacaagagcgaggtgactagccagtcgggcctgagcaactcgtcggacagcctggacagcagtacccgaccgcccagcgtgacacggggtggagtcgccccagcccctgaggccccagagccacccccaaaacatgcagctctgaaaagtgaacaagggacgctgaccagctctgagtcccaccccgaggccgcccccaaaaggaaactgtcatcgataggaatacaagttgactgcattcagccagtgccaaaagaggagcccagtcccgctaccaaattccagtccatcggggttcaggtagaggacgactggcgaagcagcgtcccctctcacagtatgtcctcccgacgggacacagactcggatacccaggatgccaatgactcaagctgtaagtcatctgagaggagcctcccggactgtacccctcaccccaactccatcagcatcgatgccggtccccggcaggcccccaagattgcccagatcaagcgcaacctctcctatggagacaacagcgaccctgccctagaggcgtcctcgctgcccccacccgacccctggctcgagacctcctccagctccccagcagagccggcacagccaggggcctgccgccgagacggctactggttcctaaagctactgcaggcagaaacagagcggctggaaggctggtgctgccagatggacaaggagaccaaagagaacaacctctctgaagaagtcttaggaaaagtcctcagtgctgtgggcagtgcccagctactgatgtcccagaaattccagcagttccggggcctctgtgagcaaaacttgaaccctgatgccaacccacgccccacagcccaggacctggcagggttctgggacctgctacagctgtccatcgaggatatcagcatgaagttcgatgaactctaccacctcaaggccaacagctggcagctggtggagacccccgagaagaggaaggaagagaagaaaccaccccctccggtcccaaagaagccagccaaatccaagccggcagtgagccgcgacaaggcctcagacgccagcgacaagcagcgccaggaggcccgcaagagactcctggcggccaagcgggcagcttctgtgcggcagaactcagccaccgagagcgcagacagcatcgagatttatgtcccggaggcccagaccaggctctgagaccatgcaggaggaaagaaacgattttaaatcattaaaaacacaaaaactaagtgcgaacggaacagagttttctcaacctttgctatggttattctgtctagagaccctgagccaactttcaaattgacgcatacaagggctcacaatttggcttttttgggtccctcccagctttaggttatgaagattttactcacaaaaaaaatcaacaaaaatcacgaaactagaaaactttttttttcctcttgctggccgtggtggactagatagatggacgtcggcaactcccggcccagcctccatactgcggtctttttactcgttctatctgatgagaactcacactagcttgtttacaagatgacgacagtccaagggcagccttgggcacctgccatgtccctcctttccccagctatccccgctctgaccttgattttcattcttatgtttttctcttttcccttcagagctcacacagtggtcaccattgtggcaagcggctttctgggtctcagccctctctgcggttgagggcccagaggacagagagatggacatgcgtcccctccctccccccgccaagtgctcacacacaacctcacgcgcacacacacacacgcagatggaggcgcctcactgggaggtgccccgccagccctgggcagtgtcaggcaggactcactcaccgctgagcagatgagggaagttttagtcttggcgggtggaaatgagacgaagccacagttatcacactccagactcctgcccttttattttctccagccccttcttccttcagcaaaatctaggactcccgagtggcttccagggggccgtcagtcctcagccgcgcctgtgtccggtgcccgaggggcgggcggcggtgtctgtatgtatgtgtacatatgcacatagaccttagagtgtatagttaacaaacgcccatctgctcacccatgcccacccagcgccgccgccgctggctctcggggcacctggcaggaggcgggtgtgtgaatagcatatatttttacatgtactatatctaggtgtgtgtacaagtgtgtgtaaaaatatataccttgtgtgtaagcagccctttttttttttggtctccacccccctccccccgccccgcactcctaagggcccatctgcccagcctctgagttttctgttctattttttttttaaccccaattatccttctctctctcctgcccccgcatcccactcccagggtgtcacgagccctgagctgcaatggcccgggcctgcagggcggggtaggggagggcaggggctgagccccgaagccagctcagtacctgaggggctgctctatgctgtgtatgcgcctctctggcatccgagacatcctcttggctggcgcttgctgcagggggggacccccccccgtccccaggtgaaccaagggtctgctccggggcccatttccagcttggccgccgtctgtgaccttgggcaagtcacttgacctctgtgtgcctcaacttcctcctctgtaaaacggggacagtccctgcccctccctacctcacaggcatgttgtgagaataaatgaggtaacgtgtacc

SEQ ID NO: 28197 - protein, 285 aa, Homo sapiens; identical to SEQ ID NO: 3863

SEQ ID NO: 28198 - DNA, 3654 bp, Homo sapiens
acatgccaagcgggctgcgcgcgcccctgcccggcccgggagtccctgacgacgcgcgcgcggctgacgcggggggcggggaggggcggggcaggtgcgggactttaacccggagccccgcccctcgggcgtacaaaaccggagcctcgggccgggctgcgtgagggaggagggttcatcatgcctagtggcgtataagaagaccccgccaccggtccctccacgcaccacttcaaagccgttcatctcagtcacagtccagagcagtactgagtctgcccaggacacctacctggacagccaggaccacaagagcgaggtgactagccagtcgggcctgagcaactcgtcggacagcctggacagcagtacccgaccgcccagcgtgacacggggtggagtcgccccagcccctgaggccccagagccacccccaaaacatgcagctctgaaaagtgaacaagggacgctgaccagctctgagtcccaccccgaggccgcccccaaaaggaaactgtcatcgataggaatacaagttgactgcattcagccagtgccaaaagaggagcccagtcccgctaccaaattccagtccatcggggttcaggtagaggacgactggcgaagcagcgtcccctctcacagtatgtcctcccgacgggacacagactcggatacccaggatgccaatgactcaagctgtaagtcatctgagaggagcctcccggactgtacccctcaccccaactccatcagcatcgatgccggtccccggcaggcccccaagattgcccagatcaagcgcaacctctcctatggagacaacagcgaccctgccctagaggcgtcctcgctgcccccacccgacccctggctcgagacctcctccagctccccagcagagccggcacagccaggggcctgccgccgagacggctactggttcctaaagctactgcaggcagaaacagagcggctggaaggctggtgctgccagatggacaaggagaccaaagagaacaacctctctgaagaagtcttaggaaaagtcctcagtgctgtgggcagtgcccagctactgatgtcccagaaattccagcagttccggggcctctgtgagcaaaacttgaaccctgatgccaacccacgccccacagcccaggacctggcagggttctgggacctgctacagctgtccatcgaggatatcagcatgaagttcgatgaactctaccacctcaaggccaacagctggcagctggtggagacccccgagaagaggaaggaagagaagaaaccaccccctccggtcccaaagaagccagccaaatccaagccggcagtgagccgcgacaaggcctcagacgccagcgacaagcagcgccaggaggcccgcaagagactcctggcggccaagcgggcagcttctgtgcggcagaactcagccaccgagagcgcagacagcatcgagatttatgtcccggaggcccagaccaggctctgagaccatgcaggaggaaagaaacgattttaaatcattaaaaacacaaaaactaagtgcgaacggaacagagttttctcaacctttgctatggttattctgtctagagaccctgagccaactttcaaattgacgcatacaagggctcacaatttggcttttttgggtccctcccagctttaggttatgaagattttactcacaaaaaaaatcaacaaaaatcacgaaactagaaaactttttttttcctcttgctggccgtggtggactagatagatggacgtcggcaactcccggcccagcctccatactgcggtctttttactcgttctatctgatgagaactcacactagcttgtttacaagatgacgacagtccaagggcagccttgggcacctgccatgtccctcctttccccagctatccccgctctgaccttgattttcattcttatgtttttctcttttcccttcagagctcacacagtggtcaccattgtggcaagcggctttctgggtctcagccctctctgcggttgagggcccagaggacagagagatggacatgcgtcccctccctccccccgccaagtgctcacacacaacctcacgcgcacacacacacacgcagatggaggcgcctcactgggaggtgccccgccagccctgggcagtgtcaggcaggactcactcaccgctgagcagatgagggaagttttagtcttggcgggtggaaatgagacgaagccacagttatcacactccagactcctgcccttttattttctccagccccttcttccttcagcaaaatctaggactcccgagtggcttccagggggccgtcagtcctcagccgcgcctgtgtccggtgcccgaggggcgggcggcggtgtctgtatgtatgtgtacatatgcacatagaccttagagtgtatagttaacaaacgcccatctgctcacccatgcccacccagcgccgccgccgctggctctcggggcacctggcaggaggcgggtgtgtgaatagcatatatttttacatgtactatatctaggtgtgtgtacaagtgtgtgtaaaaatatataccttgtgtgtaagcagccctttttttttttggtctccacccccctccccccgccccgcactcctaagggcccatctgcccagcctctgagttttctgttctattttttttttaaccccaattatccttctctctctcctgcccccgcatcccactcccagggtgtcacgagccctgagctgcaatggcccgggcctgcagggcggggtaggggagggcaggggctgagccccgaagccagctcagtacctgaggggctgctctatgctgtgtatgcgcctctctggcatccgagacatcctcttggctggcgcttgctgcagggggggacccccccccgtccccaggtgaaccaagggtctgctccggggcccatttccagcttggccgccgtctgtgaccttgggcaagtcacttgacctctgtgtgcctcaacttcctcctctgtaaaacggggacagtccctgcccctccctacctcacaggcatgttgtgagaataaatgaggtaacgtgtaccaagggcttgtggcattattgcagggggatgagcagagtgggcccaggaaactgaaccagacccctcccaaaaggcagctctgtggagacagcctgatgggagtgccagccgggatgccagctgtcacatgccagctctgtgatctggggcgggaagatggagctgaccgtcccctctcccgaaaatcagtgtgcagcacttaccagcttcctgtttgaaataaacccttgaaagatagatgctatcacaggagccaggataggctgataaagacgaccctagaggacagtttacaccccccacagatccacagtctgcacattctccagggtggggtactcggtatccccctgcctggcagctgcttccactctgtcaggtgcgagccctgagtgcatctccagagcacctcctctacaggcccagtgctggggcagagctcgctctggtgagggagacagatattgaacgtgacagataaggtcaagtcaatgacaggtggtaaaaaacaagacgcagcagaatgaggctgcaggaccccgcagc

SEQ ID NO: 28199 - protein, 285 aa, Homo sapiens; identical to SEQ ID NO: 3863

SEQ ID NO: 28200 - DNA, 1236 bp, Homo sapiens
tcctcctcctcctcctccccgtctgtccgtccgtccgtccgtccgcccgcccgcccgcccgcccgcgcttccgtcctgtccagccgccagtcctccagcccgtgtccccgctccgcccgctttgtctctccccggctcgctgtctctttgtctctgccctcgcgctcctccgcagcccctccctcgctccccatctcgggtccccttctcagagcgctcttcagccctcagagccgccctttctgggcgaccccactcttcgggactccccctcagagcgcccccagatcttttggggttccccttgagaacaccttccactctccccaagggctccccgtgagtttcttgcacatcctttgggggttctgcaccccaagtcgctggggtctcgcctcctctgaacccccattgcccctgggctttccctcttctgggtgttccccatatccactgggagctcctaggtcccaagttggggtctttctccttgggaccccccaatatgtcctcagctccctgacttcaggagctcctctctgctttcccctggtttgtcccctgtcgctgtctctccttgttctctctcaggtctccgagcacccccacttctcgggatcggggtcccctgctttgctctccctgcccctctgtgcccccacatctgtctcggtggtctcgccactctgtgcctcttgcgctgaaggcccccctttgagcctgcttctttgcctggggcccttggcccccccttgctttttcagccctagccccctgtctccccttctctctgctccttgtctccctctccctttttctgtctttgccgggtctctgggtctctgacccccatccggccctcatggctttgtgtctggagctcttgaagcaatgttcatcatgcctagtggcgtataagaagaccccgccaccggtccctccacgcaccacttcaaagccgttcatctcagtcacagtccagagcagtactgagtctgcccaggacacctacctggacagccaggaccacaagagcgaggtgactagccagtcgggcctgagcaactcgtcggacagcctggacagcagtacccgaccgcccagcgtgacacggggtggagtcgccccagcccctgaggccccagagccacccccaaaacatgcagctctgaaaagtgaacaagggacgctgaccagctctgagtcccaccccgaggccgcccccaaaaggaaact

SEQ ID NO: 28201 - protein, 123 aa, Homo sapiens
MALCLELLKQCSSCLVAYKKTPPPVPPRTTSKPFISVTVQSSTESAQDTYLDSQDHKSEVTSQSGLSNSSDSLDSSTRPPSVTRGGVAPAPEAPEPPPKHAALKSEQGTLTSSESHPEAAPKR

SEQ ID NO: 28202 - DNA, 3828 bp, Homo sapiens
tcctcctcctcctcctccccgtctgtccgtccgtccgtccgtccgcccgcccgcccgcccgcccgcgcttccgtcctgtccagccgccagtcctccagcccgtgtccccgctccgcccgctttgtctctccccggctcgctgtctctttgtctctgccctcgcgctcctccgcagcccctccctcgctccccatctcgggtccccttctcagagcgctcttcagccctcagagccgccctttctgggcgaccccactcttcgggactccccctcagagcgcccccagatcttttggggttccccttgagaacaccttccactctccccaagggctccccgtgagtttcttgcacatcctttgggggttctgcaccccaagtcgctggggtctcgcctcctctgaacccccattgcccctgggctttccctcttctgggtgttccccatatccactgggagctcctaggtcccaagttggggtctttctccttgggaccccccaatatgtcctcagctccctgacttcaggagctcctctctgctttcccctggtttgtcccctgtcgctgtctctccttgttctctctcaggtctccgagcacccccacttctcgggatcggggtcccctgctttgctctccctgcccctctgtgcccccacatctgtctcggtggtctcgccactctgtgcctcttgcgctgaaggcccccctttgagcctgcttctttgcctggggcccttggcccccccttgctttttcagccctagccccctgtctccccttctctctgctccttgtctccctctccctttttctgtctttgccgggtctctgggtctctgacccccatccggccctcatggctttgtgtctggagctcttgaagcaatgttcatcatgcctagtggcgtataagaagaccccgccaccggtccctccacgcaccacttcaaagccgttcatctcagtcacagtccagagcagtactgagtctgcccaggacacctacctggacagccaggaccacaagagcgaggtgactagccagtcgggcctgagcaactcgtcggacagcctggacagcagtacccgaccgcccagcgtgacacggggtggagtcgccccagcccctgaggccccagagccacccccaaaacatgcagctctgaaaagtgaacaagggacgctgaccagctctgagtcccaccccgaggccgcccccaaaaggaaactgtcatcgataggaatacaagttgactgcattcagccagtgccaaaagaggagcccagtcccgctaccaaattccagtccatcggggttcaggtagaggacgactggcgaagcagcgtcccctctcacagtatgtcctcccgacgggacacagactcggatacccaggatgccaatgactcaagctgtaagtcatctgagaggagcctcccggactgtacccctcaccccaactccatcagcatcgatgccggtccccggcaggcccccaagattgcccagatcaagcgcaacctctcctatggagacaacagcgaccctgccctagaggcgtcctcgctgcccccacccgacccctggctcgagacctcctccagctccccagcagagccggcacagccaggggcctgccgccgagacggctactggttcctaaagctactgcaggcagaaacagagcggctggaaggctggtgctgccagatggacaaggagaccaaagagaacaacctctctgaagaagtcttaggaaaagtcctcagtgctgtgggcagtgcccagctactgatgtcccagaaattccagcagttccggggcctctgtgagcaaaacttgaaccctgatgccaacccacgccccacagcccaggacctggcagggttctgggacctgctacagctgtccatcgaggatatcagcatgaagttcgatgaactctaccacctcaaggccaacagctggcagctggtggagacccccgagaagaggaaggaagagaagaaaccaccccctccggtcccaaagaagccagccaaatccaagccggcagtgagccgcgacaaggcctcagacgccagcgacaagcagcgccaggaggcccgcaagagactcctggcggccaagcgggcagcttctgtgcggcagaactcagccaccgagagcgcagacagcatcgagatttatgtcccggaggcccagaccaggctctgagaccatgcaggaggaaagaaacgattttaaatcattaaaaacacaaaaactaagtgcgaacggaacagagttttctcaacctttgctatggttattctgtctagagaccctgagccaactttcaaattgacgcatacaagggctcacaatttggcttttttgggtccctcccagctttaggttatgaagattttactcacaaaaaaaatcaacaaaaatcacgaaactagaaaactttttttttcctcttgctggccgtggtggactagatagatggacgtcggcaactcccggcccagcctccatactgcggtctttttactcgttctatctgatgagaactcacactagcttgtttacaagatgacgacagtccaagggcagccttgggcacctgccatgtccctcctttccccagctatccccgctctgaccttgattttcattcttatgtttttctcttttcccttcagagctcacacagtggtcaccattgtggcaagcggctttctgggtctcagccctctctgcggttgagggcccagaggacagagagatggacatgcgtcccctccctccccccgccaagtgctcacacacaacctcacgcgcacacacacacacgcagatggaggcgcctcactgggaggtgccccgccagccctgggcagtgtcaggcaggactcactcaccgctgagcagatgagggaagttttagtcttggcgggtggaaatgagacgaagccacagttatcacactccagactcctgcccttttattttctccagccccttcttccttcagcaaaatctaggactcccgagtggcttccagggggccgtcagtcctcagccgcgcctgtgtccggtgcccgaggggcgggcggcggtgtctgtatgtatgtgtacatatgcacatagaccttagagtgtatagttaacaaacgcccatctgctcacccatgcccacccagcgccgccgccgctggctctcggggcacctggcaggaggcgggtgtgtgaatagcatatatttttacatgtactatatctaggtgtgtgtacaagtgtgtgtaaaaatatataccttgtgtgtaagcagccctttttttttttggtctccacccccctccccccgccccgcactcctaagggcccatctgcccagcctctgagttttctgttctattttttttttaaccccaattatccttctctctctcctgcccccgcatcccactcccagggtgtcacgagccctgagctgcaatggcccgggcctgcagggcggggtaggggagggcaggggctgagccccgaagccagctcagtacctgaggggctgctctatgctgtgtatgcgcctctctggcatccgagacatcctcttggctggcgcttgctgcagggggggacccccccccgtccccaggtgaaccaagggtctgctccggggcccatttccagcttggccgccgtctgtgaccttgggcaagtcacttgacctctgtgtgcctcaacttcctcctctgtaaaacggggacagtccctgcccctccctacctcacaggcatgttgtgagaataaatgaggtaacgtgtacc

SEQ ID NO: 28203 - protein, 453 aa, Homo sapiens; identical to SEQ ID NO: 3867

SEQ ID NO: 28204 - DNA, 4374 bp, Homo sapiens
tcctcctcctcctcctccccgtctgtccgtccgtccgtccgtccgcccgcccgcccgcccgcccgcgcttccgtcctgtccagccgccagtcctccagcccgtgtccccgctccgcccgctttgtctctccccggctcgctgtctctttgtctctgccctcgcgctcctccgcagcccctccctcgctccccatctcgggtccccttctcagagcgctcttcagccctcagagccgccctttctgggcgaccccactcttcgggactccccctcagagcgcccccagatcttttggggttccccttgagaacaccttccactctccccaagggctccccgtgagtttcttgcacatcctttgggggttctgcaccccaagtcgctggggtctcgcctcctctgaacccccattgcccctgggctttccctcttctgggtgttccccatatccactgggagctcctaggtcccaagttggggtctttctccttgggaccccccaatatgtcctcagctccctgacttcaggagctcctctctgctttcccctggtttgtcccctgtcgctgtctctccttgttctctctcaggtctccgagcacccccacttctcgggatcggggtcccctgctttgctctccctgcccctctgtgcccccacatctgtctcggtggtctcgccactctgtgcctcttgcgctgaaggcccccctttgagcctgcttctttgcctggggcccttggcccccccttgctttttcagccctagccccctgtctccccttctctctgctccttgtctccctctccctttttctgtctttgccgggtctctgggtctctgacccccatccggccctcatggctttgtgtctggagctcttgaagcaatgttcatcatgcctagtggcgtataagaagaccccgccaccggtccctccacgcaccacttcaaagccgttcatctcagtcacagtccagagcagtactgagtctgcccaggacacctacctggacagccaggaccacaagagcgaggtgactagccagtcgggcctgagcaactcgtcggacagcctggacagcagtacccgaccgcccagcgtgacacggggtggagtcgccccagcccctgaggccccagagccacccccaaaacatgcagctctgaaaagtgaacaagggacgctgaccagctctgagtcccaccccgaggccgcccccaaaaggaaactgtcatcgataggaatacaagttgactgcattcagccagtgccaaaagaggagcccagtcccgctaccaaattccagtccatcggggttcaggtagaggacgactggcgaagcagcgtcccctctcacagtatgtcctcccgacgggacacagactcggatacccaggatgccaatgactcaagctgtaagtcatctgagaggagcctcccggactgtacccctcaccccaactccatcagcatcgatgccggtccccggcaggcccccaagattgcccagatcaagcgcaacctctcctatggagacaacagcgaccctgccctagaggcgtcctcgctgcccccacccgacccctggctcgagacctcctccagctccccagcagagccggcacagccaggggcctgccgccgagacggctactggttcctaaagctactgcaggcagaaacagagcggctggaaggctggtgctgccagatggacaaggagaccaaagagaacaacctctctgaagaagtcttaggaaaagtcctcagtgctgtgggcagtgcccagctactgatgtcccagaaattccagcagttccggggcctctgtgagcaaaacttgaaccctgatgccaacccacgccccacagcccaggacctggcagggttctgggacctgctacagctgtccatcgaggatatcagcatgaagttcgatgaactctaccacctcaaggccaacagctggcagctggtggagacccccgagaagaggaaggaagagaagaaaccaccccctccggtcccaaagaagccagccaaatccaagccggcagtgagccgcgacaaggcctcagacgccagcgacaagcagcgccaggaggcccgcaagagactcctggcggccaagcgggcagcttctgtgcggcagaactcagccaccgagagcgcagacagcatcgagatttatgtcccggaggcccagaccaggctctgagaccatgcaggaggaaagaaacgattttaaatcattaaaaacacaaaaactaagtgcgaacggaacagagttttctcaacctttgctatggttattctgtctagagaccctgagccaactttcaaattgacgcatacaagggctcacaatttggcttttttgggtccctcccagctttaggttatgaagattttactcacaaaaaaaatcaacaaaaatcacgaaactagaaaactttttttttcctcttgctggccgtggtggactagatagatggacgtcggcaactcccggcccagcctccatactgcggtctttttactcgttctatctgatgagaactcacactagcttgtttacaagatgacgacagtccaagggcagccttgggcacctgccatgtccctcctttccccagctatccccgctctgaccttgattttcattcttatgtttttctcttttcccttcagagctcacacagtggtcaccattgtggcaagcggctttctgggtctcagccctctctgcggttgagggcccagaggacagagagatggacatgcgtcccctccctccccccgccaagtgctcacacacaacctcacgcgcacacacacacacgcagatggaggcgcctcactgggaggtgccccgccagccctgggcagtgtcaggcaggactcactcaccgctgagcagatgagggaagttttagtcttggcgggtggaaatgagacgaagccacagttatcacactccagactcctgcccttttattttctccagccccttcttccttcagcaaaatctaggactcccgagtggcttccagggggccgtcagtcctcagccgcgcctgtgtccggtgcccgaggggcgggcggcggtgtctgtatgtatgtgtacatatgcacatagaccttagagtgtatagttaacaaacgcccatctgctcacccatgcccacccagcgccgccgccgctggctctcggggcacctggcaggaggcgggtgtgtgaatagcatatatttttacatgtactatatctaggtgtgtgtacaagtgtgtgtaaaaatatataccttgtgtgtaagcagccctttttttttttggtctccacccccctccccccgccccgcactcctaagggcccatctgcccagcctctgagttttctgttctattttttttttaaccccaattatccttctctctctcctgcccccgcatcccactcccagggtgtcacgagccctgagctgcaatggcccgggcctgcagggcggggtaggggagggcaggggctgagccccgaagccagctcagtacctgaggggctgctctatgctgtgtatgcgcctctctggcatccgagacatcctcttggctggcgcttgctgcagggggggacccccccccgtccccaggtgaaccaagggtctgctccggggcccatttccagcttggccgccgtctgtgaccttgggcaagtcacttgacctctgtgtgcctcaacttcctcctctgtaaaacggggacagtccctgcccctccctacctcacaggcatgttgtgagaataaatgaggtaacgtgtaccaagggcttgtggcattattgcagggggatgagcagagtgggcccaggaaactgaaccagacccctcccaaaaggcagctctgtggagacagcctgatgggagtgccagccgggatgccagctgtcacatgccagctctgtgatctggggcgggaagatggagctgaccgtcccctctcccgaaaatcagtgtgcagcacttaccagcttcctgtttgaaataaacccttgaaagatagatgctatcacaggagccaggataggctgataaagacgaccctagaggacagtttacaccccccacagatccacagtctgcacattctccagggtggggtactcggtatccccctgcctggcagctgcttccactctgtcaggtgcgagccctgagtgcatctccagagcacctcctctacaggcccagtgctggggcagagctcgctctggtgagggagacagatattgaacgtgacagataaggtcaagtcaatgacaggtggtaaaaaacaagacgcagcagaatgaggctgcaggaccccgcagc

SEQ ID NO: 28205 - protein, 453 aa, Homo sapiens; identical to SEQ ID NO: 3867

SEQ ID NO: 28206 - DNA, 2451 bp, Homo sapiens
gtcctgtccagccgccagtcctccagcccgtgtccccgctccgcccgctttgtctctccccggctcgctgtctctttgtctctgccctcgcgctcctccgcagcccctccctcgctccccatctcgggtccccttctcagagcgctcttcagccctcagagccgccctttctgggcgaccccactcttcgggactccccctcagagcgcccccagatcttttggggttccccttgagaacaccttccactctccccaagggctccccgtgagtttcttgcacatcctttgggggttctgcaccccaagtcgctggggtctcgcctcctctgaacccccattgcccctgggctttccctcttctgggtgttccccatatccactgggagctcctaggtcccaagttggggtctttctccttgggaccccccaatatgtcctcagctccctgacttcaggagctcctctctgctttcccctggtttgtcccctgtcgctgtctctccttgttctctctcaggtctccgagcacccccacttctcgggatcggggtcccctgctttgctctccctgcccctctgtgcccccacatctgtctcggtggtctcgccactcttgagcaaaacttgaaccctgatgccaacccacgccccacagcccaggacctggcagggttctgggacctgctacagctgtccatcgaggatatcagcatgaagttcgatgaactctaccacctcaaggccaacagctggcagctggtggagacccccgagaagaggaaggaagagaagaaaccaccccctccggtcccaaagaagccagccaaatccaagccggcagtgagccgcgacaaggaggaaagaaacgattttaaatcattaaaaacacaaaaactaagtgcgaacggaacagagttttctcaacctttgctatggttattctgtctagagaccctgagccaactttcaaattgacgcatacaagggctcacaatttggcttttttgggtccctcccagctttaggttatgaagattttactcacaaaaaaaatcaacaaaaatcacgaaactagaaaactttttttttcctcttgctggccgtggtggactagatagatggacgtcggcaactcccggcccagcctccatactgcggtctttttactcgttctatctgatgagaactcacactagcttgtttacaagatgacgacagtccaagggcagccttgggcacctgccatgtccctcctttccccagctatccccgctctgaccttgattttcattcttatgtttttctcttttcccttcagagctcacacagtggtcaccattgtggcaagcggctttctgggtctcagccctctctgcggttgagggcccagaggacagagagatggacatgcgtcccctccctccccccgccaagtgctcacacacaacctcacgcgcacacacacacacgcagatggaggcgcctcactgggaggtgccccgccagccctgggcagtgtcaggcaggactcactcaccgctgagcagatgagggaagttttagtcttggcgggtggaaatgagacgaagccacagttatcacactccagactcctgcccttttattttctccagccccttcttccttcagcaaaatctaggactcccgagtggcttccagggggccgtcagtcctcagccgcgcctgtgtccggtgcccgaggggcgggcggcggtgtctgtatgtatgtgtacatatgcacatagaccttagagtgtatagttaacaaacgcccatctgctcacccatgcccacccagcgccgccgccgctggctctcggggcacctggcaggaggcgggtgtgtgaatagcatatatttttacatgtactatatctaggtgtgtgtacaagtgtgtgtaaaaatatataccttgtgtgtaagcagccctttttttttttggtctccacccccctccccccgccccgcactcctaagggcccatctgcccagcctctgagttttctgttctattttttttttaaccccaattatccttctctctctcctgcccccgcatcccactcccagggtgtcacgagccctgagctgcaatggcccgggcctgcagggcggggtaggggagggcaggggctgagccccgaagccagctcagtacctgaggggctgctctatgctgtgtatgcgcctctctggcatccgagacatcctcttggctggcgcttgctgcagggggggacccccccccgtccccaggtgaaccaagggtctgctccggggcccatttccagcttggccgccgtctgtgaccttgggcaagtcacttgacctctgtgtgcctcaacttcctcctctgtaaaacggggacagtccctgcccctccctacctcacaggcatgttgtgagaataaatgaggtaacgtgtacc

SEQ ID NO: 28207 - protein, 87 aa, Homo sapiens
MKFDELYHLKANSWQLVETPEKRKEEKKPPPPVPKKPAKSKPAVSRDKEERNDFKSLKTQKLSANGTEFSQPLLWLFCLETLSQLSN

SEQ ID NO: 28208 - DNA, 2997 bp, Homo sapiens
gtcctgtccagccgccagtcctccagcccgtgtccccgctccgcccgctttgtctctccccggctcgctgtctctttgtctctgccctcgcgctcctccgcagcccctccctcgctccccatctcgggtccccttctcagagcgctcttcagccctcagagccgccctttctgggcgaccccactcttcgggactccccctcagagcgcccccagatcttttggggttccccttgagaacaccttccactctccccaagggctccccgtgagtttcttgcacatcctttgggggttctgcaccccaagtcgctggggtctcgcctcctctgaacccccattgcccctgggctttccctcttctgggtgttccccatatccactgggagctcctaggtcccaagttggggtctttctccttgggaccccccaatatgtcctcagctccctgacttcaggagctcctctctgctttcccctggtttgtcccctgtcgctgtctctccttgttctctctcaggtctccgagcacccccacttctcgggatcggggtcccctgctttgctctccctgcccctctgtgcccccacatctgtctcggtggtctcgccactcttgagcaaaacttgaaccctgatgccaacccacgccccacagcccaggacctggcagggttctgggacctgctacagctgtccatcgaggatatcagcatgaagttcgatgaactctaccacctcaaggccaacagctggcagctggtggagacccccgagaagaggaaggaagagaagaaaccaccccctccggtcccaaagaagccagccaaatccaagccggcagtgagccgcgacaaggaggaaagaaacgattttaaatcattaaaaacacaaaaactaagtgcgaacggaacagagttttctcaacctttgctatggttattctgtctagagaccctgagccaactttcaaattgacgcatacaagggctcacaatttggcttttttgggtccctcccagctttaggttatgaagattttactcacaaaaaaaatcaacaaaaatcacgaaactagaaaactttttttttcctcttgctggccgtggtggactagatagatggacgtcggcaactcccggcccagcctccatactgcggtctttttactcgttctatctgatgagaactcacactagcttgtttacaagatgacgacagtccaagggcagccttgggcacctgccatgtccctcctttccccagctatccccgctctgaccttgattttcattcttatgtttttctcttttcccttcagagctcacacagtggtcaccattgtggcaagcggctttctgggtctcagccctctctgcggttgagggcccagaggacagagagatggacatgcgtcccctccctccccccgccaagtgctcacacacaacctcacgcgcacacacacacacgcagatggaggcgcctcactgggaggtgccccgccagccctgggcagtgtcaggcaggactcactcaccgctgagcagatgagggaagttttagtcttggcgggtggaaatgagacgaagccacagttatcacactccagactcctgcccttttattttctccagccccttcttccttcagcaaaatctaggactcccgagtggcttccagggggccgtcagtcctcagccgcgcctgtgtccggtgcccgaggggcgggcggcggtgtctgtatgtatgtgtacatatgcacatagaccttagagtgtatagttaacaaacgcccatctgctcacccatgcccacccagcgccgccgccgctggctctcggggcacctggcaggaggcgggtgtgtgaatagcatatatttttacatgtactatatctaggtgtgtgtacaagtgtgtgtaaaaatatataccttgtgtgtaagcagccctttttttttttggtctccacccccctccccccgccccgcactcctaagggcccatctgcccagcctctgagttttctgttctattttttttttaaccccaattatccttctctctctcctgcccccgcatcccactcccagggtgtcacgagccctgagctgcaatggcccgggcctgcagggcggggtaggggagggcaggggctgagccccgaagccagctcagtacctgaggggctgctctatgctgtgtatgcgcctctctggcatccgagacatcctcttggctggcgcttgctgcagggggggacccccccccgtccccaggtgaaccaagggtctgctccggggcccatttccagcttggccgccgtctgtgaccttgggcaagtcacttgacctctgtgtgcctcaacttcctcctctgtaaaacggggacagtccctgcccctccctacctcacaggcatgttgtgagaataaatgaggtaacgtgtaccaagggcttgtggcattattgcagggggatgagcagagtgggcccaggaaactgaaccagacccctcccaaaaggcagctctgtggagacagcctgatgggagtgccagccgggatgccagctgtcacatgccagctctgtgatctggggcgggaagatggagctgaccgtcccctctcccgaaaatcagtgtgcagcacttaccagcttcctgtttgaaataaacccttgaaagatagatgctatcacaggagccaggataggctgataaagacgaccctagaggacagtttacaccccccacagatccacagtctgcacattctccagggtggggtactcggtatccccctgcctggcagctgcttccactctgtcaggtgcgagccctgagtgcatctccagagcacctcctctacaggcccagtgctggggcagagctcgctctggtgagggagacagatattgaacgtgacagataaggtcaagtcaatgacaggtggtaaaaaacaagacgcagcagaatgaggctgcaggaccccgcagc

SEQ ID NO: 28209 - protein, 87 aa, Homo sapiens; identical to SEQ ID NO: 28207

SEQ ID NO: 28210 - DNA, 3800 bp, Homo sapiens
tcactttcctcttaccgaatcaggcctggacttgctttctggctgggttactttccctctgatgactggctgcctaggccagggctcagggcgtctgagggtgcttagtagaactctgggcccagcagctctgagagagaggctggagggtcagtcctttgtccagaccctgactgtgggcagtcctgttgtcttccattgggaagaaggtgtgcctcttcccaccagaacctcgtgaatgctgcatgcacactcttcatggacagtgtcatccctaccccacagatgggaacaaggactctggtgtcacacagcctaagctaggcttagtgcccagttcttgctcccccatactaactgctaccctcctaagggagatatactcccttaaacattttgagcaaattgaggttggcttccgttttctgatctagggcaaaaaaccccatttgtttgggactttaggtcaaacaaatccattcctttcctgaaatcctcagtgagttagtcctgtctctgctggtggccatagatttcaagagttgctctaaacaaacgtccaggtcttggtggaaactgtccctgggccagtcagagaaccagcccagactccctgccagtggctggggagtggtagaaatttggctcgcccccccatccccaccctacccacaggcccagttgtgtctgtaccagaaatgaggagtgatgccaagcctaggcctggcccagccttagcttctgcaatgcaacctatgtaatcacacccattttacaaggaggaaactggggccatacaacaggttcatcatgcctagtggcgtataagaagaccccgccaccggtccctccacgcaccacttcaaagccgttcatctcagtcacagtccagagcagtactgagtctgcccaggacacctacctggacagccaggaccacaagagcgaggtgactagccagtcgggcctgagcaactcgtcggacagcctggacagcagtacccgaccgcccagcgtgacacggggtggagtcgccccagcccctgaggccccagagccacccccaaaacatgcagctctgaaaagtgaacaagggacgctgaccagctctgagtcccaccccgaggccgcccccaaaaggaaactgtcatcgataggaatacaagagaggactagaaggaacggttcccacctctcggaggacaacggacccaaagcgatcgatgtgatggcaccctcctcagaaagcagcgtcccctctcacagtatgtcctcccgacgggacacagactcggatacccaggatgccaatgactcaagctgtaagtcatctgagaggagcctcccggactgtacccctcaccccaactccatcagcatcgatgccggtccccggcaggcccccaagattgcccagatcaagcgcaacctctcctatggagacaacagcgaccctgccctagaggcgtcctcgctgcccccacccgacccctggctcgagacctcctccagctccccagcagagccggcacagccaggggcctgccgccgagacggctactggttcctaaagctactgcaggcagaaacagagcggctggaaggctggtgctgccagatggacaaggagaccaaagagaacaacctctctgaagaagtcttaggaaaagtcctcagtgctgtgggcagtgcccagctactgatgtcccagaaattccagcagttccggggcctctgtgagcaaaacttgaaccctgatgccaacccacgccccacagcccaggacctggcagggttctgggacctgctacagctgtccatcgaggatatcagcatgaagttcgatgaactctaccacctcaaggccaacagctggcagctggtggagacccccgagaagaggaaggtgagcatggagcagtgcggaggggaagtccagggacaaattcctggtcggcaataacgctgcccacatcggaagagaagaaaccaccccctccggtcccaaagaagccagccaaatccaagccggcagtgagccgcgacaaggcctcagacgccagcgacaagcagcgccaggaggcccgcaagagactcctggcggccaagcgggcagcttctgtgcggcagaactcagccaccgagagcgcagacagcatcgagatttatgtcccggaggcccagaccaggctctgagaccatgcaggaggaaagaaacgattttaaatcattaaaaacacaaaaactaagtgcgaacggaacagagttttctcaacctttgctatggttattctgtctagagaccctgagccaactttcaaattgacgcatacaagggctcacaatttggcttttttgggtccctcccagctttaggttatgaagattttactcacaaaaaaaatcaacaaaaatcacgaaactagaaaactttttttttcctcttgctggccgtggtggactagatagatggacgtcggcaactcccggcccagcctccatactgcggtctttttactcgttctatctgatgagaactcacactagcttgtttacaagatgacgacagtccaagggcagccttgggcacctgccatgtccctcctttccccagctatccccgctctgaccttgattttcattcttatgtttttctcttttcccttcagagctcacacagtggtcaccattgtggcaagcggctttctgggtctcagccctctctgcggttgagggcccagaggacagagagatggacatgcgtcccctccctccccccgccaagtgctcacacacaacctcacgcgcacacacacacacgcagatggaggcgcctcactgggaggtgccccgccagccctgggcagtgtcaggcaggactcactcaccgctgagcagatgagggaagttttagtcttggcgggtggaaatgagacgaagccacagttatcacactccagactcctgcccttttattttctccagccccttcttccttcagcaaaatctaggactcccgagtggcttccagggggccgtcagtcctcagccgcgcctgtgtccggtgcccgaggggcgggcggcggtgtctgtatgtatgtgtacatatgcacatagaccttagagtgtatagttaacaaacgcccatctgctcacccatgcccacccagcgccgccgccgctggctctcggggcacctggcaggaggcgggtgtgtgaatagcatatatttttacatgtactatatctaggtgtgtgtacaagtgtgtgtaaaaatatataccttgtgtgtaagcagccctttttttttttggtctccacccccctccccccgccccgcactcctaagggcccatctgcccagcctctgagttttctgttctattttttttttaaccccaattatccttctctctctcctgcccccgcatcccactcccagggtgtcacgagccctgagctgcaatggcccgggcctgcagggcggggtaggggagggcaggggctgagccccgaagccagctcagtacctgaggggctgctctatgctgtgtatgcgcctctctggcatccgagacatcctcttggctggcgcttgctgcagggggggacccccccccgtccccaggtgaaccaagggtctgctccggggcccatttccagcttggccgccgtctgtgaccttgggcaagtcacttgacctctgtgtgcctcaacttcctcctctgtaaaacggggacagtccctgcccctccctacctcacaggcatgttgtgagaataaatgaggtaacgtgtacc

SEQ ID NO: 28211 - protein, 244 aa, Homo sapiens
MAPSSESSVPSHSMSSRRDTDSDTQDANDSSCKSSERSLPDCTPHPNSISIDAGPRQAPKIAQIKRNLSYGDNSDPALEASSLPPPDPWLETSSSSPAEPAQPGACRRDGYWFLKLLQAETERLEGWCCQMDKETKENNLSEEVLGKVLSAVGSAQLLMSQKFQQFRGLCEQNLNPDANPRPTAQDLAGFWDLLQLSIEDISMKFDELYHLKANSWQLVETPEKRKVSMEQCGGEVQGQIPGRQ

SEQ ID NO: 28212 - DNA, 4346 bp, Homo sapiens
tcactttcctcttaccgaatcaggcctggacttgctttctggctgggttactttccctctgatgactggctgcctaggccagggctcagggcgtctgagggtgcttagtagaactctgggcccagcagctctgagagagaggctggagggtcagtcctttgtccagaccctgactgtgggcagtcctgttgtcttccattgggaagaaggtgtgcctcttcccaccagaacctcgtgaatgctgcatgcacactcttcatggacagtgtcatccctaccccacagatgggaacaaggactctggtgtcacacagcctaagctaggcttagtgcccagttcttgctcccccatactaactgctaccctcctaagggagatatactcccttaaacattttgagcaaattgaggttggcttccgttttctgatctagggcaaaaaaccccatttgtttgggactttaggtcaaacaaatccattcctttcctgaaatcctcagtgagttagtcctgtctctgctggtggccatagatttcaagagttgctctaaacaaacgtccaggtcttggtggaaactgtccctgggccagtcagagaaccagcccagactccctgccagtggctggggagtggtagaaatttggctcgcccccccatccccaccctacccacaggcccagttgtgtctgtaccagaaatgaggagtgatgccaagcctaggcctggcccagccttagcttctgcaatgcaacctatgtaatcacacccattttacaaggaggaaactggggccatacaacaggttcatcatgcctagtggcgtataagaagaccccgccaccggtccctccacgcaccacttcaaagccgttcatctcagtcacagtccagagcagtactgagtctgcccaggacacctacctggacagccaggaccacaagagcgaggtgactagccagtcgggcctgagcaactcgtcggacagcctggacagcagtacccgaccgcccagcgtgacacggggtggagtcgccccagcccctgaggccccagagccacccccaaaacatgcagctctgaaaagtgaacaagggacgctgaccagctctgagtcccaccccgaggccgcccccaaaaggaaactgtcatcgataggaatacaagagaggactagaaggaacggttcccacctctcggaggacaacggacccaaagcgatcgatgtgatggcaccctcctcagaaagcagcgtcccctctcacagtatgtcctcccgacgggacacagactcggatacccaggatgccaatgactcaagctgtaagtcatctgagaggagcctcccggactgtacccctcaccccaactccatcagcatcgatgccggtccccggcaggcccccaagattgcccagatcaagcgcaacctctcctatggagacaacagcgaccctgccctagaggcgtcctcgctgcccccacccgacccctggctcgagacctcctccagctccccagcagagccggcacagccaggggcctgccgccgagacggctactggttcctaaagctactgcaggcagaaacagagcggctggaaggctggtgctgccagatggacaaggagaccaaagagaacaacctctctgaagaagtcttaggaaaagtcctcagtgctgtgggcagtgcccagctactgatgtcccagaaattccagcagttccggggcctctgtgagcaaaacttgaaccctgatgccaacccacgccccacagcccaggacctggcagggttctgggacctgctacagctgtccatcgaggatatcagcatgaagttcgatgaactctaccacctcaaggccaacagctggcagctggtggagacccccgagaagaggaaggtgagcatggagcagtgcggaggggaagtccagggacaaattcctggtcggcaataacgctgcccacatcggaagagaagaaaccaccccctccggtcccaaagaagccagccaaatccaagccggcagtgagccgcgacaaggcctcagacgccagcgacaagcagcgccaggaggcccgcaagagactcctggcggccaagcgggcagcttctgtgcggcagaactcagccaccgagagcgcagacagcatcgagatttatgtcccggaggcccagaccaggctctgagaccatgcaggaggaaagaaacgattttaaatcattaaaaacacaaaaactaagtgcgaacggaacagagttttctcaacctttgctatggttattctgtctagagaccctgagccaactttcaaattgacgcatacaagggctcacaatttggcttttttgggtccctcccagctttaggttatgaagattttactcacaaaaaaaatcaacaaaaatcacgaaactagaaaactttttttttcctcttgctggccgtggtggactagatagatggacgtcggcaactcccggcccagcctccatactgcggtctttttactcgttctatctgatgagaactcacactagcttgtttacaagatgacgacagtccaagggcagccttgggcacctgccatgtccctcctttccccagctatccccgctctgaccttgattttcattcttatgtttttctcttttcccttcagagctcacacagtggtcaccattgtggcaagcggctttctgggtctcagccctctctgcggttgagggcccagaggacagagagatggacatgcgtcccctccctccccccgccaagtgctcacacacaacctcacgcgcacacacacacacgcagatggaggcgcctcactgggaggtgccccgccagccctgggcagtgtcaggcaggactcactcaccgctgagcagatgagggaagttttagtcttggcgggtggaaatgagacgaagccacagttatcacactccagactcctgcccttttattttctccagccccttcttccttcagcaaaatctaggactcccgagtggcttccagggggccgtcagtcctcagccgcgcctgtgtccggtgcccgaggggcgggcggcggtgtctgtatgtatgtgtacatatgcacatagaccttagagtgtatagttaacaaacgcccatctgctcacccatgcccacccagcgccgccgccgctggctctcggggcacctggcaggaggcgggtgtgtgaatagcatatatttttacatgtactatatctaggtgtgtgtacaagtgtgtgtaaaaatatataccttgtgtgtaagcagccctttttttttttggtctccacccccctccccccgccccgcactcctaagggcccatctgcccagcctctgagttttctgttctattttttttttaaccccaattatccttctctctctcctgcccccgcatcccactcccagggtgtcacgagccctgagctgcaatggcccgggcctgcagggcggggtaggggagggcaggggctgagccccgaagccagctcagtacctgaggggctgctctatgctgtgtatgcgcctctctggcatccgagacatcctcttggctggcgcttgctgcagggggggacccccccccgtccccaggtgaaccaagggtctgctccggggcccatttccagcttggccgccgtctgtgaccttgggcaagtcacttgacctctgtgtgcctcaacttcctcctctgtaaaacggggacagtccctgcccctccctacctcacaggcatgttgtgagaataaatgaggtaacgtgtaccaagggcttgtggcattattgcagggggatgagcagagtgggcccaggaaactgaaccagacccctcccaaaaggcagctctgtggagacagcctgatgggagtgccagccgggatgccagctgtcacatgccagctctgtgatctggggcgggaagatggagctgaccgtcccctctcccgaaaatcagtgtgcagcacttaccagcttcctgtttgaaataaacccttgaaagatagatgctatcacaggagccaggataggctgataaagacgaccctagaggacagtttacaccccccacagatccacagtctgcacattctccagggtggggtactcggtatccccctgcctggcagctgcttccactctgtcaggtgcgagccctgagtgcatctccagagcacctcctctacaggcccagtgctggggcagagctcgctctggtgagggagacagatattgaacgtgacagataaggtcaagtcaatgacaggtggtaaaaaacaagacgcagcagaatgaggctgcaggaccccgcagc

SEQ ID NO: 28213 - protein, 244 aa, Homo sapiens; identical to SEQ ID NO: 28211

SEQ ID NO: 28214 - DNA, 502 bp, Homo sapiens
cttcttcagagaggttgttctctttggtctccttgtccatctggcagcaccagccttccagccgctctgtttctgcctgcagtagctttaggaaccagtagccgtctcggcggcaggcccctggctgtgccggctctgctggggagctggaggaggtctcgagccaggggtcgggtgggggcagcgaggacgcctctagggcagggtcgctgttgtctccataggagaggttgcgcttgatctgggcaatcttgggggcctgccggggaccggcatcgatgctgatggagctgggcggtcgggtactgctgtccaggctgtccgacgagttgctcaggcccgactggctagtcacctcgctcttgtggtcctggctgtccaggtaggtgtcctgggcagactcagtactgctctggactgtgactgagatgaacggctttgaagtggtgcgtggagggaccggtggcggggtcttcttatacgccactaggcatgatgaacc

SEQ ID NO: 28215 - protein, 35 aa, Homo sapiens
MLMELGGRVLLSRLSDELLRPDWLVTSLLWSWLSR

SEQ ID NO: 28216 - DNA, 4078 bp, Homo sapiens
tgtcttgtttgctgagctggggaaacttgggccctgccttgtagtttttaagagtttctctaaatccagattgagtggactctccctgccctggctggacctgcagaccaaactagggcacgttcagagccatgagggaggggcagctacagtgggtgagggcgagaggggagacagggcccccccaagcccaggggttgagtcagggaggacgaggcattgtgtgttgtggcacaggctgcaagggactcctccagccacccctgagcaattggatgtggcccagctgataacaaagcactggaatgcaggagcgtgggacacaaagtggagcttgaatggaacagagaaggctcactgagcaatttcttgcagttgcctgtatttgtttcctccaagaggcagctctaggcttccacttccccatgtataaacagagagagagttggccaggagactctgctgctgttttctgggcttcttaagtgtccagtccctgcgctgcacaggtgggattctcagaaacacagagagtagcctgatcttcaacccttggtcctgaccacccatatctttgggcagccccaccctcttgctggccaaaccagacgctcttatcttcccggaaagcctaagagttaggactacccttgattcctttcacccagaaaatgacaccgggataaggactctcttaggcctgtcctgggcgtcccattccctggattcaccccagccccattcttggtctcattgcagctccttggagatccagtggtgctgcattccttgagccggcttttgccgaggggaaatgtggctgcatccctgtcccagaaagcttccctggcccctacttctctccacaaggccaagagactgaagagtccccagtttctgaggatgccctgaacccttggtgcctcatgccctagattgagtgtgggtttctccctcattcttgagtgatgataggaaagctggcctggctgccccatggcccgggacctttgtcccagagaagaaaggcaggcgcagggcatcactgttgtcctgttccacttcacaggagtggagggagtgacagctttccacttggccctgaccccagtccttcctactgctccccagggccacccagtgctaaaggtaacctcagccaagtgtgaataacgtccagggacttcggtggctcctgtgggtggcagtttctgaatctagaactgccgtccagggtttgcccttagtgcaggcgcctctggcctgccctccaggtttctgccacagggttcagggagtgatctttgcctcaagacagccgccagcttcaactacaccagataacggctgtggctttgtgtgtgtgtgtgtgttttctttctctttcgtcgtccttttttttttttctctctgatgcgtgtgaaggagaggactagaaggaacggttcccacctctcggaggacaacggacccaaagcgatcgatgtgatggcaccctcctcagagttgactgcattcagccagtgccaaaagaggagcccagtcccgctaccaaattccagtccatcggggttcaggtagaggacgactggcgaagcagcgtcccctctcacagtatgtcctcccgacgggacacagactcggatacccaggatgccaatgactcaagctgtaagtcatctgagaggagcctcccggactgtacccctcaccccaactccatcagcatcgatgccggtccccggcaggcccccaagattgcccagatcaagcgcaacctctcctatggagacaacagcgaccctgccctagaggcgtcctcgctgcccccacccgacccctggctcgagacctcctccagctccccagcagagccggcacagccaggggcctgccgccgagacggctactggttcctaaagctactgcaggcagaaacagagcggctggaaggctggtgctgccagatggacaaggagaccaaagagaacaacctctctgaagaagtcttaggaaaagtcctcagtgctgtgggcagtgcccagctactgatgtcccagaaattccagcagttccggggcctctgtgagcaaaacttgaaccctgatgccaacccacgccccacagcccaggacctggcagggttctgggacctgctacagctgtccatcgaggatatcagcatgaagttcgatgaactctaccacctcaaggccaacagctggcagctggtggagacccccgagaagaggaaggaagagaagaaaccaccccctccggtcccaaagaagccagccaaatccaagccggcagtgagccgcgacaaggcctcagacgccagcgacaagcagcgccaggaggcccgcaagagactcctggcggccaagcgggcagcttctgtgcggcagaactcagccaccgagagcgcagacagcatcgagatttatgtcccggaggcccagaccaggctctgagaccatgcaggaggaaagaaacgattttaaatcattaaaaacacaaaaactaagtgcgaacggaacagagttttctcaacctttgctatggttattctgtctagagaccctgagccaactttcaaattgacgcatacaagggctcacaatttggcttttttgggtccctcccagctttaggttatgaagattttactcacaaaaaaaatcaacaaaaatcacgaaactagaaaactttttttttcctcttgctggccgtggtggactagatagatggacgtcggcaactcccggcccagcctccatactgcggtctttttactcgttctatctgatgagaactcacactagcttgtttacaagatgacgacagtccaagggcagccttgggcacctgccatgtccctcctttccccagctatccccgctctgaccttgattttcattcttatgtttttctcttttcccttcagagctcacacagtggtcaccattgtggcaagcggctttctgggtctcagccctctctgcggttgagggcccagaggacagagagatggacatgcgtcccctccctccccccgccaagtgctcacacacaacctcacgcgcacacacacacacgcagatggaggcgcctcactgggaggtgccccgccagccctgggcagtgtcaggcaggactcactcaccgctgagcagatgagggaagttttagtcttggcgggtggaaatgagacgaagccacagttatcacactccagactcctgcccttttattttctccagccccttcttccttcagcaaaatctaggactcccgagtggcttccagggggccgtcagtcctcagccgcgcctgtgtccggtgcccgaggggcgggcggcggtgtctgtatgtatgtgtacatatgcacatagaccttagagtgtatagttaacaaacgcccatctgctcacccatgcccacccagcgccgccgccgctggctctcggggcacctggcaggaggcgggtgtgtgaatagcatatatttttacatgtactatatctaggtgtgtgtacaagtgtgtgtaaaaatatataccttgtgtgtaagcagccctttttttttttggtctccacccccctccccccgccccgcactcctaagggcccatctgcccagcctctgagttttctgttctattttttttttaaccccaattatccttctctctctcctgcccccgcatcccactcccagggtgtcacgagccctgagctgcaatggcccgggcctgcagggcggggtaggggagggcaggggctgagccccgaagccagctcagtacctgaggggctgctctatgctgtgtatgcgcctctctggcatccgagacatcctcttggctggcgcttgctgcagggggggacccccccccgtccccaggtgaaccaagggtctgctccggggcccatttccagcttggccgccgtctgtgaccttgggcaagtcacttgacctctgtgtgcctcaacttcctcctctgtaaaacggggacagtccctgcccctccctacctcacaggcatgttgtgagaataaatgaggtaacgtgtacc

SEQ ID NO: 28217 - protein, 285 aa, Homo sapiens; identical to SEQ ID NO: 3863

SEQ ID NO: 28218 - DNA, 4624 bp, Homo sapiens
tgtcttgtttgctgagctggggaaacttgggccctgccttgtagtttttaagagtttctctaaatccagattgagtggactctccctgccctggctggacctgcagaccaaactagggcacgttcagagccatgagggaggggcagctacagtgggtgagggcgagaggggagacagggcccccccaagcccaggggttgagtcagggaggacgaggcattgtgtgttgtggcacaggctgcaagggactcctccagccacccctgagcaattggatgtggcccagctgataacaaagcactggaatgcaggagcgtgggacacaaagtggagcttgaatggaacagagaaggctcactgagcaatttcttgcagttgcctgtatttgtttcctccaagaggcagctctaggcttccacttccccatgtataaacagagagagagttggccaggagactctgctgctgttttctgggcttcttaagtgtccagtccctgcgctgcacaggtgggattctcagaaacacagagagtagcctgatcttcaacccttggtcctgaccacccatatctttgggcagccccaccctcttgctggccaaaccagacgctcttatcttcccggaaagcctaagagttaggactacccttgattcctttcacccagaaaatgacaccgggataaggactctcttaggcctgtcctgggcgtcccattccctggattcaccccagccccattcttggtctcattgcagctccttggagatccagtggtgctgcattccttgagccggcttttgccgaggggaaatgtggctgcatccctgtcccagaaagcttccctggcccctacttctctccacaaggccaagagactgaagagtccccagtttctgaggatgccctgaacccttggtgcctcatgccctagattgagtgtgggtttctccctcattcttgagtgatgataggaaagctggcctggctgccccatggcccgggacctttgtcccagagaagaaaggcaggcgcagggcatcactgttgtcctgttccacttcacaggagtggagggagtgacagctttccacttggccctgaccccagtccttcctactgctccccagggccacccagtgctaaaggtaacctcagccaagtgtgaataacgtccagggacttcggtggctcctgtgggtggcagtttctgaatctagaactgccgtccagggtttgcccttagtgcaggcgcctctggcctgccctccaggtttctgccacagggttcagggagtgatctttgcctcaagacagccgccagcttcaactacaccagataacggctgtggctttgtgtgtgtgtgtgtgttttctttctctttcgtcgtccttttttttttttctctctgatgcgtgtgaaggagaggactagaaggaacggttcccacctctcggaggacaacggacccaaagcgatcgatgtgatggcaccctcctcagagttgactgcattcagccagtgccaaaagaggagcccagtcccgctaccaaattccagtccatcggggttcaggtagaggacgactggcgaagcagcgtcccctctcacagtatgtcctcccgacgggacacagactcggatacccaggatgccaatgactcaagctgtaagtcatctgagaggagcctcccggactgtacccctcaccccaactccatcagcatcgatgccggtccccggcaggcccccaagattgcccagatcaagcgcaacctctcctatggagacaacagcgaccctgccctagaggcgtcctcgctgcccccacccgacccctggctcgagacctcctccagctccccagcagagccggcacagccaggggcctgccgccgagacggctactggttcctaaagctactgcaggcagaaacagagcggctggaaggctggtgctgccagatggacaaggagaccaaagagaacaacctctctgaagaagtcttaggaaaagtcctcagtgctgtgggcagtgcccagctactgatgtcccagaaattccagcagttccggggcctctgtgagcaaaacttgaaccctgatgccaacccacgccccacagcccaggacctggcagggttctgggacctgctacagctgtccatcgaggatatcagcatgaagttcgatgaactctaccacctcaaggccaacagctggcagctggtggagacccccgagaagaggaaggaagagaagaaaccaccccctccggtcccaaagaagccagccaaatccaagccggcagtgagccgcgacaaggcctcagacgccagcgacaagcagcgccaggaggcccgcaagagactcctggcggccaagcgggcagcttctgtgcggcagaactcagccaccgagagcgcagacagcatcgagatttatgtcccggaggcccagaccaggctctgagaccatgcaggaggaaagaaacgattttaaatcattaaaaacacaaaaactaagtgcgaacggaacagagttttctcaacctttgctatggttattctgtctagagaccctgagccaactttcaaattgacgcatacaagggctcacaatttggcttttttgggtccctcccagctttaggttatgaagattttactcacaaaaaaaatcaacaaaaatcacgaaactagaaaactttttttttcctcttgctggccgtggtggactagatagatggacgtcggcaactcccggcccagcctccatactgcggtctttttactcgttctatctgatgagaactcacactagcttgtttacaagatgacgacagtccaagggcagccttgggcacctgccatgtccctcctttccccagctatccccgctctgaccttgattttcattcttatgtttttctcttttcccttcagagctcacacagtggtcaccattgtggcaagcggctttctgggtctcagccctctctgcggttgagggcccagaggacagagagatggacatgcgtcccctccctccccccgccaagtgctcacacacaacctcacgcgcacacacacacacgcagatggaggcgcctcactgggaggtgccccgccagccctgggcagtgtcaggcaggactcactcaccgctgagcagatgagggaagttttagtcttggcgggtggaaatgagacgaagccacagttatcacactccagactcctgcccttttattttctccagccccttcttccttcagcaaaatctaggactcccgagtggcttccagggggccgtcagtcctcagccgcgcctgtgtccggtgcccgaggggcgggcggcggtgtctgtatgtatgtgtacatatgcacatagaccttagagtgtatagttaacaaacgcccatctgctcacccatgcccacccagcgccgccgccgctggctctcggggcacctggcaggaggcgggtgtgtgaatagcatatatttttacatgtactatatctaggtgtgtgtacaagtgtgtgtaaaaatatataccttgtgtgtaagcagccctttttttttttggtctccacccccctccccccgccccgcactcctaagggcccatctgcccagcctctgagttttctgttctattttttttttaaccccaattatccttctctctctcctgcccccgcatcccactcccagggtgtcacgagccctgagctgcaatggcccgggcctgcagggcggggtaggggagggcaggggctgagccccgaagccagctcagtacctgaggggctgctctatgctgtgtatgcgcctctctggcatccgagacatcctcttggctggcgcttgctgcagggggggacccccccccgtccccaggtgaaccaagggtctgctccggggcccatttccagcttggccgccgtctgtgaccttgggcaagtcacttgacctctgtgtgcctcaacttcctcctctgtaaaacggggacagtccctgcccctccctacctcacaggcatgttgtgagaataaatgaggtaacgtgtaccaagggcttgtggcattattgcagggggatgagcagagtgggcccaggaaactgaaccagacccctcccaaaaggcagctctgtggagacagcctgatgggagtgccagccgggatgccagctgtcacatgccagctctgtgatctggggcgggaagatggagctgaccgtcccctctcccgaaaatcagtgtgcagcacttaccagcttcctgtttgaaataaacccttgaaagatagatgctatcacaggagccaggataggctgataaagacgaccctagaggacagtttacaccccccacagatccacagtctgcacattctccagggtggggtactcggtatccccctgcctggcagctgcttccactctgtcaggtgcgagccctgagtgcatctccagagcacctcctctacaggcccagtgctggggcagagctcgctctggtgagggagacagatattgaacgtgacagataaggtcaagtcaatgacaggtggtaaaaaacaagacgcagcagaatgaggctgcaggaccccgcagc

SEQ ID NO: 28219 - protein, 285 aa, Homo sapiens; identical to SEQ ID NO: 3863

SEQ ID NO: 28220 - DNA, 691 bp, Homo sapiens
acccttggtgcctcatgccctagattgagtgtgggtttctccctcattcttgagtgatgataggaaagctggcctggctgccccatggcccgggacctttgtcccagagaagaaaggcaggcgcagggcatcactgttgtcctgttccacttcacaggagtggagggagtgacagctttccacttggccctgaccccagtccttcctactgctccccagggccacccagtgctaaaggtaacctcagccaagtgtgaataacgtccagggacttcggtggctcctgtgggtggcagtttctgaatctagaactgccgtccagggtttgcccttagtgcaggcgcctctggcctgccctccaggtttctgccacagggttcagggagtgatctttgcctcaagacagccgccagcttcaactacaccagataacggctgtggctttgtgtgtgtgtgtgtgttttctttctctttcgtcgtccttttttttttttctctctgatgcgtgtgaaggagaggactagaaggaacggttcccacctctcggaggacaacggacccaaagcgatcgatgtgatggcaccctcctcagagtagggaaagccagtcatctccaccccatcccacctcccgcccacctgcccctccctacctcacaggcatgttgtgagaataaatgaggtaacgtgta

SEQ ID NO: 28221 - protein, 66 aa, Homo sapiens
MIGKLAWLPHGPGPLSQRRKAGAGHHCCPVPLHRSGGSDSFPLGPDPSPSYCSPGPPSAKGNLSQV

SEQ ID NO: 28222 - DNA, 949 bp, Homo sapiens
gaagcagcgtcccctctcacagtatgtcctcccgacgggacacagactcggatacccaggatgccaatgactcaagctgtaagtcatctgagaggagcctcccggactgtacccctcaccccaactccatcagcatcgatgccggtccccggcaggcccccaagattgcccagatcaagcgcaacctctcctatggagacaacagcgaccctgccctagaggcgtcctcgctgcccccacccgacccctggctcgagacctcctccagctccccagcagagccggcacagccaggggcctgccgccgagacggctactggttcctaaagctactgcaggcagaaacagagcggctggaaggctggtgctgccagatggacaaggagaccaaagagaacaacctctctgaagaagtcttaggaaaagtcctcagtgctgtgggcagtgcccagctactgatgtcccagaaattccagcagttccggggcctctgtgagcaaaacttgaaccctgatgccaacccacgccccacagcccaggacctggcagggttctgggacctgctacagctgtccatcgaggatatcagcatgaagttcgatgaactctaccacctcaaggccaacagctggcagctggtggagacccccgagaagaggaaggaagagaagaaaccaccccctccggtcccaaagaagccagccaaatccaagccggcagtgagccgcgacaaggcctcagacgccagcgacaagcagcgccaggaggcccgcaagagactcctggcggccaagcgggcagcttctgtgcggcagaactcagccaccgagagcgcagacagcatcgagatttatgtcccggaggcccagaccaggctctgagaccatgcaggaggaaagaaacgattttaaatcattaaaaacacaaaaactaagtgcgaacggaacag

SEQ ID NO: 28223 - protein, 285 aa, Homo sapiens; identical to SEQ ID NO: 3863

SEQ ID NO: 28224 - DNA, 2485 bp, Homo sapiens
gaagcagcgtcccctctcacagtatgtcctcccgacgggacacagactcggatacccaggatgccaatgactcaagctgtaagtcatctgagaggagcctcccggactgtacccctcaccccaactccatcagcatcgatgccggtccccggcaggcccccaagattgcccagatcaagcgcaacctctcctatggagacaacagcgaccctgccctagaggcgtcctcgctgcccccacccgacccctggctcgagacctcctccagctccccagcagagccggcacagccaggggcctgccgccgagacggctactggttcctaaagctactgcaggcagaaacagagcggctggaaggctggtgctgccagatggacaaggagaccaaagagaacaacctctctgaagaagtcttaggaaaagtcctcagtgctgtgggcagtgcccagctactgatgtcccagaaattccagcagttccggggcctctgtgagcaaaacttgaaccctgatgccaacccacgccccacagcccaggacctggcagggttctgggacctgctacagctgtccatcgaggatatcagcatgaagttcgatgaactctaccacctcaaggccaacagctggcagctggtggagacccccgagaagaggaaggaagagaagaaaccaccccctccggtcccaaagaagccagccaaatccaagccggcagtgagccgcgacaaggcctcagacgccagcgacaagcagcgccaggaggcccgcaagagactcctggcggccaagcgggcagcttctgtgcggcagaactcagccaccgagagcgcagacagcatcgagatttatgtcccggaggcccagaccaggctctgagaccatgcaggaggaaagaaacgattttaaatcattaaaaacacaaaaactaagtgcgaacggaacagagttttctcaacctttgctatggttattctgtctagagaccctgagccaactttcaaattgacgcatacaagggctcacaatttggcttttttgggtccctcccagctttaggttatgaagattttactcacaaaaaaaatcaacaaaaatcacgaaactagaaaactttttttttcctcttgctggccgtggtggactagatagatggacgtcggcaactcccggcccagcctccatactgcggtctttttactcgttctatctgatgagaactcacactagcttgtttacaagatgacgacagtccaagggcagccttgggcacctgccatgtccctcctttccccagctatccccgctctgaccttgattttcattcttatgtttttctcttttcccttcagagctcacacagtggtcaccattgtggcaagcggctttctgggtctcagccctctctgcggttgagggcccagaggacagagagatggacatgcgtcccctccctccccccgccaagtgctcacacacaacctcacgcgcacacacacacacgcagatggaggcgcctcactgggaggtgccccgccagccctgggcagtgtcaggcaggactcactcaccgctgagcagatgagggaagttttagtcttggcgggtggaaatgagacgaagccacagttatcacactccagactcctgcccttttattttctccagccccttcttccttcagcaaaatctaggactcccgagtggcttccagggggccgtcagtcctcagccgcgcctgtgtccggtgcccgaggggcgggcggcggtgtctgtatgtatgtgtacatatgcacatagaccttagagtgtatagttaacaaacgcccatctgctcacccatgcccacccagcgccgccgccgctggctctcggggcacctggcaggaggcgggtgtgtgaatagcatatatttttacatgtactatatctaggtgtgtgtacaagtgtgtgtaaaaatatataccttgtgtgtaagcagccctttttttttttggtctccacccccctccccccgccccgcactcctaagggcccatctgcccagcctctgagttttctgttctattttttttttaaccccaattatccttctctctctcctgcccccgcatcccactcccagggtgtcacgagccctgagctgcaatggcccgggcctgcagggcggggtaggggagggcaggggctgagccccgaagccagctcagtacctgaggggctgctctatgctgtgtatgcgcctctctggcatccgagacatcctcttggctggcgcttgctgcagggggggacccccccccgtccccaggtgaaccaagggtctgctccggggcccatttccagcttggccgccgtctgtgaccttgggcaagtcacttgacctctgtgtgcctcaacttcctcctctgtaaaacggggacagtccctgcccctccctacctcacaggcatgttgtgagaataaatgaggtaacgtgtacc

SEQ ID NO: 28225 - protein, 285 aa, Homo sapiens; identical to SEQ ID NO: 3863

SEQ ID NO: 28226 - DNA, 3031 bp, Homo sapiens
gaagcagcgtcccctctcacagtatgtcctcccgacgggacacagactcggatacccaggatgccaatgactcaagctgtaagtcatctgagaggagcctcccggactgtacccctcaccccaactccatcagcatcgatgccggtccccggcaggcccccaagattgcccagatcaagcgcaacctctcctatggagacaacagcgaccctgccctagaggcgtcctcgctgcccccacccgacccctggctcgagacctcctccagctccccagcagagccggcacagccaggggcctgccgccgagacggctactggttcctaaagctactgcaggcagaaacagagcggctggaaggctggtgctgccagatggacaaggagaccaaagagaacaacctctctgaagaagtcttaggaaaagtcctcagtgctgtgggcagtgcccagctactgatgtcccagaaattccagcagttccggggcctctgtgagcaaaacttgaaccctgatgccaacccacgccccacagcccaggacctggcagggttctgggacctgctacagctgtccatcgaggatatcagcatgaagttcgatgaactctaccacctcaaggccaacagctggcagctggtggagacccccgagaagaggaaggaagagaagaaaccaccccctccggtcccaaagaagccagccaaatccaagccggcagtgagccgcgacaaggcctcagacgccagcgacaagcagcgccaggaggcccgcaagagactcctggcggccaagcgggcagcttctgtgcggcagaactcagccaccgagagcgcagacagcatcgagatttatgtcccggaggcccagaccaggctctgagaccatgcaggaggaaagaaacgattttaaatcattaaaaacacaaaaactaagtgcgaacggaacagagttttctcaacctttgctatggttattctgtctagagaccctgagccaactttcaaattgacgcatacaagggctcacaatttggcttttttgggtccctcccagctttaggttatgaagattttactcacaaaaaaaatcaacaaaaatcacgaaactagaaaactttttttttcctcttgctggccgtggtggactagatagatggacgtcggcaactcccggcccagcctccatactgcggtctttttactcgttctatctgatgagaactcacactagcttgtttacaagatgacgacagtccaagggcagccttgggcacctgccatgtccctcctttccccagctatccccgctctgaccttgattttcattcttatgtttttctcttttcccttcagagctcacacagtggtcaccattgtggcaagcggctttctgggtctcagccctctctgcggttgagggcccagaggacagagagatggacatgcgtcccctccctccccccgccaagtgctcacacacaacctcacgcgcacacacacacacgcagatggaggcgcctcactgggaggtgccccgccagccctgggcagtgtcaggcaggactcactcaccgctgagcagatgagggaagttttagtcttggcgggtggaaatgagacgaagccacagttatcacactccagactcctgcccttttattttctccagccccttcttccttcagcaaaatctaggactcccgagtggcttccagggggccgtcagtcctcagccgcgcctgtgtccggtgcccgaggggcgggcggcggtgtctgtatgtatgtgtacatatgcacatagaccttagagtgtatagttaacaaacgcccatctgctcacccatgcccacccagcgccgccgccgctggctctcggggcacctggcaggaggcgggtgtgtgaatagcatatatttttacatgtactatatctaggtgtgtgtacaagtgtgtgtaaaaatatataccttgtgtgtaagcagccctttttttttttggtctccacccccctccccccgccccgcactcctaagggcccatctgcccagcctctgagttttctgttctattttttttttaaccccaattatccttctctctctcctgcccccgcatcccactcccagggtgtcacgagccctgagctgcaatggcccgggcctgcagggcggggtaggggagggcaggggctgagccccgaagccagctcagtacctgaggggctgctctatgctgtgtatgcgcctctctggcatccgagacatcctcttggctggcgcttgctgcagggggggacccccccccgtccccaggtgaaccaagggtctgctccggggcccatttccagcttggccgccgtctgtgaccttgggcaagtcacttgacctctgtgtgcctcaacttcctcctctgtaaaacggggacagtccctgcccctccctacctcacaggcatgttgtgagaataaatgaggtaacgtgtaccaagggcttgtggcattattgcagggggatgagcagagtgggcccaggaaactgaaccagacccctcccaaaaggcagctctgtggagacagcctgatgggagtgccagccgggatgccagctgtcacatgccagctctgtgatctggggcgggaagatggagctgaccgtcccctctcccgaaaatcagtgtgcagcacttaccagcttcctgtttgaaataaacccttgaaagatagatgctatcacaggagccaggataggctgataaagacgaccctagaggacagtttacaccccccacagatccacagtctgcacattctccagggtggggtactcggtatccccctgcctggcagctgcttccactctgtcaggtgcgagccctgagtgcatctccagagcacctcctctacaggcccagtgctggggcagagctcgctctggtgagggagacagatattgaacgtgacagataaggtcaagtcaatgacaggtggtaaaaaacaagacgcagcagaatgaggctgcaggaccccgcagc

SEQ ID NO: 28227 - protein, 285 aa, Homo sapiens; identical to SEQ ID NO: 3863

SEQ ID NO: 28228 - DNA, 699 bp, Homo sapiens
caagattgcccagatcaagcgcaacctctcctatggagacaacagggcctgccgccgagacggctactggttcctaaagctactgcaggcagaaacagagcggctggaaggctggtgctgccagatggacaaggagaccaaagagaacaacctctctgaagaagtcttaggaaaagtcctcagtgctgtgggcagtgcccagctactgatgtcccagaaattccagcagttccggggcctctgtgagcaaaacttgaaccctgatgccaacccacgccccacagcccaggacctggcagggttctgggacctgctacagctgtccatcgaggatatcagcatgaagttcgatgaactctaccacctcaaggccaacagctggcagctggtggagacccccgagaagaggaaggaagagaagaaaccaccccctccggtcccaaagaagccagccaaatccaagccggcagtgagccgcgacaaggcctcagacgccagcgacaagcagcgccaggaggcccgcaagagactcctggcggccaagcgggcagcttctgtgcggcagaactcagccaccgagagcgcagacagcatcgagatttatgtcccggaggcccagaccaggctctgagaccatgcaggaggaaagaaacgattttaaatcattaaaaacacaaaaactaagtgcgaacggaacag

SEQ ID NO: 28229 - protein, 168 aa, Homo sapiens [sequence omitted]

SEQ ID NO: 28230 - DNA, 2235 bp, Homo sapiens
caagattgcccagatcaagcgcaacctctcctatggagacaacagggcctgccgccgagacggctactggttcctaaagctactgcaggcagaaacagagcggctggaaggctggtgctgccagatggacaaggagaccaaagagaacaacctctctgaagaagtcttaggaaaagtcctcagtgctgtgggcagtgcccagctactgatgtcccagaaattccagcagttccggggcctctgtgagcaaaacttgaaccctgatgccaacccacgccccacagcccaggacctggcagggttctgggacctgctacagctgtccatcgaggatatcagcatgaagttcgatgaactctaccacctcaaggccaacagctggcagctggtggagacccccgagaagaggaaggaagagaagaaaccaccccctccggtcccaaagaagccagccaaatccaagccggcagtgagccgcgacaaggcctcagacgccagcgacaagcagcgccaggaggcccgcaagagactcctggcggccaagcgggcagcttctgtgcggcagaactcagccaccgagagcgcagacagcatcgagatttatgtcccggaggcccagaccaggctctgagaccatgcaggaggaaagaaacgattttaaatcattaaaaacacaaaaactaagtgcgaacggaacagagttttctcaacctttgctatggttattctgtctagagaccctgagccaactttcaaattgacgcatacaagggctcacaatttggcttttttgggtccctcccagctttaggttatgaagattttactcacaaaaaaaatcaacaaaaatcacgaaactagaaaactttttttttcctcttgctggccgtggtggactagatagatggacgtcggcaactcccggcccagcctccatactgcggtctttttactcgttctatctgatgagaactcacactagcttgtttacaagatgacgacagtccaagggcagccttgggcacctgccatgtccctcctttccccagctatccccgctctgaccttgattttcattcttatgtttttctcttttcccttcagagctcacacagtggtcaccattgtggcaagcggctttctgggtctcagccctctctgcggttgagggcccagaggacagagagatggacatgcgtcccctccctccccccgccaagtgctcacacacaacctcacgcgcacacacacacacgcagatggaggcgcctcactgggaggtgccccgccagccctgggcagtgtcaggcaggactcactcaccgctgagcagatgagggaagttttagtcttggcgggtggaaatgagacgaagccacagttatcacactccagactcctgcccttttattttctccagccccttcttccttcagcaaaatctaggactcccgagtggcttccagggggccgtcagtcctcagccgcgcctgtgtccggtgcccgaggggcgggcggcggtgtctgtatgtatgtgtacatatgcacatagaccttagagtgtatagttaacaaacgcccatctgctcacccatgcccacccagcgccgccgccgctggctctcggggcacctggcaggaggcgggtgtgtgaatagcatatatttttacatgtactatatctaggtgtgtgtacaagtgtgtgtaaaaatatataccttgtgtgtaagcagccctttttttttttggtctccacccccctccccccgccccgcactcctaagggcccatctgcccagcctctgagttttctgttctattttttttttaaccccaattatccttctctctctcctgcccccgcatcccactcccagggtgtcacgagccctgagctgcaatggcccgggcctgcagggcggggtaggggagggcaggggctgagccccgaagccagctcagtacctgaggggctgctctatgctgtgtatgcgcctctctggcatccgagacatcctcttggctggcgcttgctgcagggggggacccccccccgtccccaggtgaaccaagggtctgctccggggcccatttccagcttggccgccgtctgtgaccttgggcaagtcacttgacctctgtgtgcctcaacttcctcctctgtaaaacggggacagtccctgcccctccctacctcacaggcatgttgtgagaataaatgaggtaacgtgtacc

SEQ ID NO: 28231 - protein, 168 aa, Homo sapiens [sequence omitted]

SEQ ID NO: 28232 - DNA, 2781 bp, Homo sapiens
caagattgcccagatcaagcgcaacctctcctatggagacaacagggcctgccgccgagacggctactggttcctaaagctactgcaggcagaaacagagcggctggaaggctggtgctgccagatggacaaggagaccaaagagaacaacctctctgaagaagtcttaggaaaagtcctcagtgctgtgggcagtgcccagctactgatgtcccagaaattccagcagttccggggcctctgtgagcaaaacttgaaccctgatgccaacccacgccccacagcccaggacctggcagggttctgggacctgctacagctgtccatcgaggatatcagcatgaagttcgatgaactctaccacctcaaggccaacagctggcagctggtggagacccccgagaagaggaaggaagagaagaaaccaccccctccggtcccaaagaagccagccaaatccaagccggcagtgagccgcgacaaggcctcagacgccagcgacaagcagcgccaggaggcccgcaagagactcctggcggccaagcgggcagcttctgtgcggcagaactcagccaccgagagcgcagacagcatcgagatttatgtcccggaggcccagaccaggctctgagaccatgcaggaggaaagaaacgattttaaatcattaaaaacacaaaaactaagtgcgaacggaacagagttttctcaacctttgctatggttattctgtctagagaccctgagccaactttcaaattgacgcatacaagggctcacaatttggcttttttgggtccctcccagctttaggttatgaagattttactcacaaaaaaaatcaacaaaaatcacgaaactagaaaactttttttttcctcttgctggccgtggtggactagatagatggacgtcggcaactcccggcccagcctccatactgcggtctttttactcgttctatctgatgagaactcacactagcttgtttacaagatgacgacagtccaagggcagccttgggcacctgccatgtccctcctttccccagctatccccgctctgaccttgattttcattcttatgtttttctcttttcccttcagagctcacacagtggtcaccattgtggcaagcggctttctgggtctcagccctctctgcggttgagggcccagaggacagagagatggacatgcgtcccctccctccccccgccaagtgctcacacacaacctcacgcgcacacacacacacgcagatggaggcgcctcactgggaggtgccccgccagccctgggcagtgtcaggcaggactcactcaccgctgagcagatgagggaagttttagtcttggcgggtggaaatgagacgaagccacagttatcacactccagactcctgcccttttattttctccagccccttcttccttcagcaaaatctaggactcccgagtggcttccagggggccgtcagtcctcagccgcgcctgtgtccggtgcccgaggggcgggcggcggtgtctgtatgtatgtgtacatatgcacatagaccttagagtgtatagttaacaaacgcccatctgctcacccatgcccacccagcgccgccgccgctggctctcggggcacctggcaggaggcgggtgtgtgaatagcatatatttttacatgtactatatctaggtgtgtgtacaagtgtgtgtaaaaatatataccttgtgtgtaagcagccctttttttttttggtctccacccccctccccccgccccgcactcctaagggcccatctgcccagcctctgagttttctgttctattttttttttaaccccaattatccttctctctctcctgcccccgcatcccactcccagggtgtcacgagccctgagctgcaatggcccgggcctgcagggcggggtaggggagggcaggggctgagccccgaagccagctcagtacctgaggggctgctctatgctgtgtatgcgcctctctggcatccgagacatcctcttggctggcgcttgctgcagggggggacccccccccgtccccaggtgaaccaagggtctgctccggggcccatttccagcttggccgccgtctgtgaccttgggcaagtcacttgacctctgtgtgcctcaacttcctcctctgtaaaacggggacagtccctgcccctccctacctcacaggcatgttgtgagaataaatgaggtaacgtgtaccaagggcttgtggcattattgcagggggatgagcagagtgggcccaggaaactgaaccagacccctcccaaaaggcagctctgtggagacagcctgatgggagtgccagccgggatgccagctgtcacatgccagctctgtgatctggggcgggaagatggagctgaccgtcccctctcccgaaaatcagtgtgcagcacttaccagcttcctgtttgaaataaacccttgaaagatagatgctatcacaggagccaggataggctgataaagacgaccctagaggacagtttacaccccccacagatccacagtctgcacattctccagggtggggtactcggtatccccctgcctggcagctgcttccactctgtcaggtgcgagccctgagtgcatctccagagcacctcctctacaggcccagtgctggggcagagctcgctctggtgagggagacagatattgaacgtgacagataaggtcaagtcaatgacaggtggtaaaaaacaagacgcagcagaatgaggctgcaggaccccgcagc

SEQ ID NO: 28233 - protein, 168 aa, Homo sapiens [sequence omitted]

SEQ ID NO: 28234 - DNA, 1206 bp, Homo sapiens
gtgctccttgccggggtgggggtcgttaccgagtgggaacttctgcaaatcctgacttttgtcacttcgcgccccgcacaagatgtcctgccggcggtgcgattggtcccgttgcttcgaggggaaactgaggccacttagtccgggcacttacccgcagctagttaaggactaggctctgatggagacgcttgttacgacctcaatggcctgtagaatctgggaggccgcctccgacctaagcccaaaaagcacatgatcgggctcacagggggcggccagaggtgaaaacagccaacgctttacaacgacgctgtgcggggcacttcgtgtgtgtcatcccgtctcatcctcgggtgataggaactgttcattcgggaaaattgcaaacaactaaatacccctcaccaggagctggcccattatagcaactctgagacctctctaccgcaggctcttaaaatgggttttcatcccaacagaatttttctgaggaacttgatatacaaattctataatttatattggaagaatgaagatacaagaatagtttttctttctgcacaaaaaggataaagaaggagcactcaccagataccaaggcgtgctacaaagccatgtgattctgtccaagcttaacagtggatgtaactgcttctttgctgtggcagattgtattttctgaaggccccaacagtctctcctgtccctcctcctcttctgaaaccttgatacttccctatgaagaggtagggtctaatacttccctccttcaacctgaagccccgccttgggcttgtgacttgcttgtaaccagtcaaatacagtggaagagttactacgtgacttccagggctaggtcagaaaaggatgcagcctcagggttcaacacacacttgggcctggagccaccatgcaagaaggctgccatgctgcgagggagcaaaggcacgtggagggacatacacaggggctgtggctggcagtcctggcctttgagtcatccttgtttaagtgccaggcacacacgttaactacctttaggtaattccatacctcaggtgtcatgtcaccccaagcccttgagccttcccatctgaagccccaggctgtatggagaagaaacaagatgttcctgccacgctctttctgaactgctgacatacagaatctgtgaccataataaaatggttgttttgtgccatt

SEQ ID NO: 28235 - protein, 37 aa, Homo sapiens
MGFHPNRIFLRNLIYKFYNLYWKNEDTRIVFLSAQKG

SEQ ID NO: 28236 - DNA, 623 bp, Homo sapiens
cagccaacgctttacaacgacgctgtgcggggcacttcgtgtgtgtcatcccgtctcatcctcgggtgataggaactgttcattcgggaaaattgcaaacaactaaatacccctcaccaggagctggcccattatagcaactctgagacctctctaccgcaggctcttaaaatgggacaccgccgcccgcccctcgggcaccggacacaggcgcggctgaggactgacggccccctggaagccactcgggagtcctagattttgctgaaggaagaaggggctggagaaaataaaagggcaggagtctggagtgtgataactgtggcttcgtctcatttccacccgccaagactaaaacttccctcatctgctcagcgggaagaaacagaagttcttggccatggtgtgacagtgacaccgagagaagcccgattcactcccaggtttctgctcacaggtcacctggccagggatgccctccctgaccaccctgaatgcaacagcaacaccgaccctgcctgtgcagtggacactatactgctcttacccttcctggttatttgttactgctcacctggttactgcttaccacatttggttatttggtatcccttcccatgagg

SEQ ID NO: 28237 - protein, 49 aa, Homo sapiens
MPSLTTLNATATPTLPVQWTLYCSYPSWLFVTAHLVTAYHIWLFGIPSH

SEQ ID NO: 28238 - DNA, 593 bp, Homo sapiens
tgagaccccagctcaaagacgacacacggagaagggagccaagcagcactgaccgatgtgggcagcgttattgccgaccaggaatttgtccctggacttcccctccgcactgctccatgctcaccttcctcttctcgggggtctccaccagctgccagctgttggccttgaggtggtagagttcatcgaacttcatgctgatatcctcgatggacagctgtagcaggtcccagaaccctgccaggtcctgggctgtggggcgtgggttggcatcagggttctgtgggccagatggggatcagtggggccagctcagcagaggcttgtcctgctccccccaaccccccaacaagcagggttcctctgggccctgccagcacccgcgggggctcttgaggcctagtgtctggggaagaaacagaagttcttggccatggtgtgacagtgacaccgagagaagcccgattcactcccaggtttctgctcacaggtcacctggccagggatgccctccctgaccaccctgaatgcaacagcaacaccgaccctgcctgtgcagtggacactatactgctcttacccttcctggttat

SEQ ID NO: 28239 - protein, 107 aa, Homo sapiens
MLISSMDSCSRSQNPARSWAVGRGLASGFCGPDGDQWGQLSRGLSCSPQPPNKQGSSGPCQHPRGLLRPSVWGRNRSSWPWCDSDTERSPIHSQVSAHRSPGQGCPP

SEQ ID NO: 28240 - DNA, 829 bp, Homo sapiens
aaggaagagaagaaaccaccccctccggtcccaaagaagccagccaaatccaagccggcagtgagccgcgacaaggcctcagacgccagcgacaagcagcgccaggaggcccgcaagagactcctggcggccaagcgggcagcttctgtgcggcagaactcagccaccgagagcgcagacagcatcgagatttatgtcccggaggcccagaccaggctctgagaccatgcaggaggaaagaaacgattttaaatcattaaaaacacaaaaactaagtgcgaacggaacagagttttctcaacctttgctatggttattctgtctagagaccctgagccaactttcaaattgacgcatacaagggctcacaatttggcttttttgggtccctcccagctttaggttatgaagattttactcacaaaaaaaatcaacaaaaatcacgaaactagaaaactttttttttcctcttgctggccgtggtggactagatagatggacgtcggcaactcccggcccagcctccatactgcggtctttttactcgttctatctgatgagaactcacactagcttgtttacaagatgacgacagtccaagggcagccttgggcacctgccatgtccctcctttccccagctatccccgctctgaccttgattttcattcttatgtttttctcttttcccttcagagctcacacagtggtcaccattgtggcaagcggctttctgggtctcagccctctttcctcctctgtaaaacggggacagtccctgcccctccctacctcacaggcatgttgtgagaataaatgaggtaacgtgt

SEQ ID NO: 28241 - protein, 77 aa, Homo sapiens
MTTVQGQPWAPAMSLLSPAIPALTLIFILMFFSFPFRAHTVVTIVASGFLGLSPLSSSVKRGQSLPLPTSQACCENK

SEQ ID NO: 28242 - DNA, 641 bp, Homo sapiens
gcgcctcactgggaggtgccccgccagccctgggcagtgtcaggcaggactcactcaccgctgagcagatgagggaagttttagtcttggcgggtggaaatgagacgaagccacagttatcacactccagactcctgcccttttattttctccagccccttcttccttcagcaaaatctaggactcccgagtggcttccagggggccgtcagtcctcagccgcgcctgtgtccggtgcccgaggggcgggcggcggtgtctgtatgtatgtgtacatatgcacatagaccttagagtgtatagttaacaaacgcccatctgctcacccatgcccacccagcgccgccgccgctggctctcggggcacctggcaggaggcgggtgtgtgaatagcatatatttttacatgtactatatctaggtgtgtgtacaagtgtgtgtaaaaatatataccttgtgtgtaagcagccctttttttttttggtctccacccccctccccccgccccgcactcctaagggcccatctgcccagcctctgagttttctgttctattttttttttaaccccaattatccttctctagtccctgcccctccctacctcacaggcatgttgtgagaataaatgaggtaacgtgt

SEQ ID NO: 28243 - protein, 72 aa, Homo sapiens
MREVLVLAGGNETKPQLSHSRLLPFYFLQPLLPSAKSRTPEWLPGGRQSSAAPVSGARGAGGGVCMYVYICT

SEQ ID NO: 28244 - DNA, 1027 bp, Homo sapiens
ggagtccagacccgacggccggcccagttccacgcacccagcgagcccaagcgccttctccgcaccagggaagccccacccaccagaagccaagatgtccagcaagcgggccaaagccaagaccaccaagaagcggccacagcgggccacatccaatgtcttcgcaatgtttgaccagtcccagatccaggagtttaaggaggctttcaacatgattgaccagaaccgtgatggcttcattgacaaggaggacctgcacgacatgctggcctcgctgggtttcatccatgaggaccacctccgggagctgctcaccaccatgggtgaccgcttcacagatgaggaagtggacgagatgtaccgggaggcacccattgataagaaaggcaacttcaactacgtggagttcacccgcatcctcaaacatggcgccaaggataaagacgactaggccaccccagccccctgacaccccagcccccgccagtcacccctccccgcacacacccgtccataccagctccctgcccatgaccctcgctcagggatccccctttgaggggttagggtcccagttcccagtggaagaaacaggccaggagaagtgcgtgccgagctgaggcagatgttcccacagtgaccccagagccctgggctatagtctctgacccctccaaggaaagaccaccttctggggacatgggctggagggcaggacctagaggcaccaagggaaggccccattccggggctgttccccgaggaggaagggaaggggctctgtgtgccccccaggaggaagaggccctgagtcctgggatcagacaccccttcacgtgtatccccacacaaatgcaagctcaccaaggtcccctctcagtccccttccctacaccctgaccggccactgccgcacacccacccagagcacgccacccgccatgggagtgtgctcaggagtcgcgggcagcgtggacatctgtcccagagggggcagaatctccaatagaggactgagcactgcttc

SEQ ID NO: 28245 - protein, 129 aa, Homo sapiens
MASLTRRTCTTCWPRWVSSMRTTSGSCSPPWVTASQMRKWTRCTGRHPLIRKATSTTWSSPASSNMAPRIKTTRPPQPPDTPAPASHPSPHTPVHTSSLPMTLAQGSPFEGLGSQFPVEETGQEKCVPS

SEQ ID NO: 28246 - DNA, 1189 bp, Homo sapiens
ggagtccagacccgacggccggcccagttccacgcacccagcgagcccaagcgccttctccgcaccagggaagccccacccaccagaagccaagatgtccagcaagcgggccaaagccaagaccaccaagaagcggccacagcgggccacatccaatgtcttcgcaatgtttgaccagtcccagatccaggagtttaaggaggctttcaacatgattgaccagaaccgtgatggcttcattgacaaggaggacctgcacgacatgctggcctcgctggggaagaaccccacagacgaatacctggagggcatgatgagcgaggccccggggcccatcaacttcaccatgttcctcaccatgtttggggagaagctgaacggcacggaccccgaggatgtgattcgcaacgcctttgcctgcttcgacgaggaagcctcaggtttcatccatgaggaccacctccgggagctgctcaccaccatgggtgaccgcttcacagatgaggaagtggacgagatgtaccgggaggcacccattgataagaaaggcaacttcaactacgtggagttcacccgcatcctcaaacatggcgccaaggataaagacgactaggccaccccagccccctgacaccccagcccccgccagtcacccctccccgcacacacccgtccataccagctccctgcccatgaccctcgctcagggatccccctttgaggggttagggtcccagttcccagtggaagaaacaggccaggagaagtgcgtgccgagctgaggcagatgttcccacagtgaccccagagccctgggctatagtctctgacccctccaaggaaagaccaccttctggggacatgggctggagggcaggacctagaggcaccaagggaaggccccattccggggctgttccccgaggaggaagggaaggggctctgtgtgccccccaggaggaagaggccctgagtcctgggatcagacaccccttcacgtgtatccccacacaaatgcaagctcaccaaggtcccctctcagtccccttccctacaccctgaccggccactgccgcacacccacccagagcacgccacccgccatgggagtgtgctcaggagtcgcgggcagcgtggacatctgtcccagagggggcagaatctccaatagaggactgagcactgcttc

SEQ ID NO: 28247 - protein, 172 aa, Homo sapiens; identical to SEQ ID NO: 3869

SEQ ID NO: 28248 - DNA, 1303 bp, Homo sapiens
gtccagacccgacggccggcccagttccacgcacccagcgagcccaagcgccttctccgcaccagggaagccccacccaccagaagccaagatgtccagcaagcgggccaaagccaagaccaccaagaagcggccacagcgggccacatccaatgtcttcgcaatgtttgaccagtcccagatccaggagtttaaggaggctttcaacatgattgaccagaaccgtgatggcttcattgacaaggaggacctgcacgacatgctggcctcgctgggtttcatccatgaggaccacctccgggagctgctcaccaccatgggtgaccgcttcacagatgaggaagtggacgagatgtaccgggaggcacccattgataagaaaggcaacttcaactacgtggagttcacccgcatcctcaaacatggcgccaaggataaagacgactaggccaccccagccccctgacaccccagcccccgccagtcacccctccccgcacacacccgtccataccagctccctgcccatgaccctcgctcagggatccccctttgaggggttagggtcccagttcccagtggaagaaacaggccaggagaagtgcgtgccgagctgaggcagatgttcccacagtgaccccagagccctgggctatagtctctgacccctccaaggaaagaccaccttctggggacatgggctggagggcaggacctagaggcaccaagggaaggccccattccggggctgttccccgaggaggaagggaaggggctctgtgtgccccccaggaggaagaggccctgagtcctgggatcagacaccccttcacgtgtatccccacacaaatgcaagctcaccaaggtcccctctcagtccccttccctacaccctgaccggccactgccgcacacccacccagagcacgccacccgccatgggagtgtgctcaggagtcgcgggcagcgtggacatctgtcccagagggggcagaatctccaatagaggactgagcactgcttctggtctgtgtgtctgtggctggggtgaagtaaggggaccccgggcctgaaaccctctcccaccttctcctgccatctccagttactgccctgctcctcccaccctggcccagggaaggactgggtgtcctccggccatatggtccctgaagcctctagggaccagagtccctagtaagtgggctctgtgctcagctgagaccagcaggggacaggggacggagggaatgggcctcatggccttctcagggcttgtgggaaagggaggaccatgggaatc

SEQ ID NO: 28249 - protein, 129 aa, Homo sapiens; identical to SEQ ID NO: 28245

SEQ ID NO: 28250 - DNA, 1074 bp, Homo sapiens
cagacccgacggccggcccagttccacgcacccagcgagcccaagcgccttctccgcaccagggaagccccacccaccagaagccaagatgtccagcaagcgggccaaagccaagaccaccaagaagcggccacagcgggccacatccaatgtcttcgcaatgtttgaccagtcccagatccaggagtttaaggaggctttcaacatgattgaccagaaccgtgatggcttcattgacaaggaggacctgcacgacatgctggcctcgctggggaagaaccccacagacgaatacctggagggcatgatgagcgaggccccggggcccatcaacttcaccatgttcctcaccatgtttggggagaagctgaacggcacggaccccgaggatgtgattcgcaacgcctttgcctgcttcgacgaggaagcctcaggtttcatccatgaggaccacctccgggagctgctcaccaccatgggtgaccgcttcacagatgaggaagtggacgagatgtaccgggaggcacccattgataagaaaggcaacttcaactacgtggagttcacccgcatcctcaaacatggcgccaaggataaagacgactaggccaccccagccccctgacaccccagcccccgccagtcacccctccccgcacacacccgtccataccagctccctgccctgaccccagagccctgggctatagtctctgacccctccaaggaaagaccaccttctggggacatgggctggagggcaggacctagaggcaccaagggaaggccccattccggggctgttccccgaggaggaagggaaggggctctgtgtgccccccaggaggaagaggccctgagtcctgggatcagacaccccttcacgtgtatccccacacaaatgcaagctcaccaaggtcccctctcagtccccttccctacaccctgaccggccactgccgcacacccacccagagcacgccacccgccatgggagtgtgctcaggagtcgcgggcagcgtggacatctgtcccagagggggcagaatctccaatagaggactgagcactgct

SEQ ID NO: 28251 - protein, 172 aa, Homo sapiens; identical to SEQ ID NO: 3869

SEQ ID NO: 28252 - DNA, 1355 bp, Homo sapiens
cagacccgacggccggcccagttccacgcacccagcgagcccaagcgccttctccgcaccagggaagccccacccaccagaagccaagatgtccagcaagcgggccaaagccaagaccaccaagaagcggccacagcgggccacatccaatgtcttcgcaatgtttgaccagtcccagatccaggagtttaaggaggctttcaacatgattgaccagaaccgtgatggcttcattgacaaggaggacctgcacgacatgctggcctcgctggggaagaaccccacagacgaatacctggagggcatgatgagcgaggccccggggcccatcaacttcaccatgttcctcaccatgtttggggagaagctgaacggcacggaccccgaggatgtgattcgcaacgcctttgcctgcttcgacgaggaagcctcaggtttcatccatgaggaccacctccgggagctgctcaccaccatgggtgaccgcttcacagatgaggaagtggacgagatgtaccgggaggcacccattgataagaaaggcaacttcaactacgtggagttcacccgcatcctcaaacatggcgccaaggataaagacgactaggccaccccagccccctgacaccccagcccccgccagtcacccctccccgcacacacccgtccataccagctccctgccctgaccccagagccctgggctatagtctctgacccctccaaggaaagaccaccttctggggacatgggctggagggcaggacctagaggcaccaagggaaggccccattccggggctgttccccgaggaggaagggaaggggctctgtgtgccccccaggaggaagaggccctgagtcctgggatcagacaccccttcacgtgtatccccacacaaatgcaagctcaccaaggtcccctctcagtccccttccctacaccctgaccggccactgccgcacacccacccagagcacgccacccgccatgggagtgtgctcaggagtcgcgggcagcgtggacatctgtcccagagggggcagaatctccaatagaggactgagcactgcttctggtctgtgtgtctgtggctggggtgaagtaaggggaccccgggcctgaaaccctctcccaccttctcctgccatctccagttactgccctgctcctcccaccctggcccagggaaggactgggtgtcctccggccatatggtccctgaagcctctagggaccagagtccctagtaagtgggctctgtgctcagctgagaccagcaggggacaggggacggagggaatgggcctcatggccttctcagggcttgtgggaaagggaggaccatgggaatc

SEQ ID NO: 28253 - protein, 172 aa, Homo sapiens; identical to SEQ ID NO: 3869

SEQ ID NO: 28254 - DNA, 1462 bp, Homo sapiens
cagacccgacggccggcccagttccacgcacccagcgagcccaagcgccttctccgcaccagggaagccccacccaccagaagccaagatgtccagcaagcgggccaaagccaagaccaccaagaagcggccacagcgggccacatccaatgtcttcgcaatgtttgaccagtcccagatccaggagtttaaggaggctttcaacatgattgaccagaaccgtgatggcttcattgacaaggaggacctgcacgacatgctggcctcgctggggaagaaccccacagacgaatacctggagggcatgatgagcgaggccccggggcccatcaacttcaccatgttcctcaccatgtttggggagaagctgaacggcacggaccccgaggatgtgattcgcaacgcctttgcctgcttcgacgaggaagcctcaggtttcatccatgaggaccacctccgggagctgctcaccaccatgggtgaccgcttcacagatgaggaagtggacgagatgtaccgggaggcacccattgataagaaaggcaacttcaactacgtggagttcacccgcatcctcaaacatggcgccaaggataaagacgactaggccaccccagccccctgacaccccagcccccgccagtcacccctccccgcacacacccgtccataccagctccctgcccatgaccctcgctcagggatccccctttgaggggttagggtcccagttcccagtggaagaaacaggccaggagaagtgcgtgccgagctgaggcagatgttcccacagtgaccccagagccctgggctatagtctctgacccctccaaggaaagaccaccttctggggacatgggctggagggcaggacctagaggcaccaagggaaggccccattccggggctgttccccgaggaggaagggaaggggctctgtgtgccccccaggaggaagaggccctgagtcctgggatcagacaccccttcacgtgtatccccacacaaatgcaagctcaccaaggtcccctctcagtccccttccctacaccctgaccggccactgccgcacacccacccagagcacgccacccgccatgggagtgtgctcaggagtcgcgggcagcgtggacatctgtcccagagggggcagaatctccaatagaggactgagcactgcttctggtctgtgtgtctgtggctggggtgaagtaaggggaccccgggcctgaaaccctctcccaccttctcctgccatctccagttactgccctgctcctcccaccctggcccagggaaggactgggtgtcctccggccatatggtccctgaagcctctagggaccagagtccctagtaagtgggctctgtgctcagctgagaccagcaggggacaggggacggagggaatgggcctcatggccttctcagggcttgtgggaaagggaggaccatgggaatc

SEQ ID NO: 28255 - protein, 172 aa, Homo sapiens; identical to SEQ ID NO: 3869

SEQ ID NO: 28256 - DNA, 630 bp, Homo sapiens
caggtttcatccatgaggaccacctccgggagctgctcaccaccatgggtgaccgcttcacagatgaggaagtggacgagatgtaccgggaggcacccattgataagaaaggcaacttcaactacgtggagttcacccgcatcctcaaacatggcgccaaggataaagacgactaggccaccccagccccctgacaccccagcccccgccagtcacccctccccgcacacacccgtccataccagctccctgcccatgaccctcgctcagggatccccctttgaggggttagggtcccagttcccagtggaagaaacaggccaggagaagtgcgtgccgagctgaggcagatgttcccacagtgaccccagagccctgggctatagtctctgacccctccaaggaagaggccctgagtcctgggatcagacaccccttcacgtgtatccccacacaaatgcaagctcaccaaggtcccctctcagtccccttccctacaccctgaccggccactgccgcacacccacccagagcacgccacccgccatgggagtgtgctcaggagtcgcgggcagcgtggacatctgtcccagagggggcagaatctccaatagaggactgagcactgct

SEQ ID NO: 28257 - protein, 110 aa, Homo sapiens
MRTTSGSCSPPWVTASQMRKWTRCTGRHPLIRKATSTTWSSPASSNMAPRIKTTRPPQPPDTPAPASHPSPHTPVHTSSLPMTLAQGSPFEGLGSQFPVEETGQEKCVPS

SEQ ID NO: 28258 - DNA, 911 bp, Homo sapiens
caggtttcatccatgaggaccacctccgggagctgctcaccaccatgggtgaccgcttcacagatgaggaagtggacgagatgtaccgggaggcacccattgataagaaaggcaacttcaactacgtggagttcacccgcatcctcaaacatggcgccaaggataaagacgactaggccaccccagccccctgacaccccagcccccgccagtcacccctccccgcacacacccgtccataccagctccctgcccatgaccctcgctcagggatccccctttgaggggttagggtcccagttcccagtggaagaaacaggccaggagaagtgcgtgccgagctgaggcagatgttcccacagtgaccccagagccctgggctatagtctctgacccctccaaggaagaggccctgagtcctgggatcagacaccccttcacgtgtatccccacacaaatgcaagctcaccaaggtcccctctcagtccccttccctacaccctgaccggccactgccgcacacccacccagagcacgccacccgccatgggagtgtgctcaggagtcgcgggcagcgtggacatctgtcccagagggggcagaatctccaatagaggactgagcactgcttctggtctgtgtgtctgtggctggggtgaagtaaggggaccccgggcctgaaaccctctcccaccttctcctgccatctccagttactgccctgctcctcccaccctggcccagggaaggactgggtgtcctccggccatatggtccctgaagcctctagggaccagagtccctagtaagtgggctctgtgctcagctgagaccagcaggggacaggggacggagggaatgggcctcatggccttctcagggcttgtgggaaagggaggaccatgggaatc

SEQ ID NO: 28259 - protein, 110 aa, Homo sapiens; identical to SEQ ID NO: 28257

SEQ ID NO: 28260 - DNA, 584 bp, Homo sapiens
gaggggaaactgaggccacttagtccgggcacttacccgcagctagttaaggactaggctctgatggagacgcttgttacgacctcaatggcctgtagaatctgggaggccgcctccgacctaagcccaaaaagcacatgatcgggctcacagggggcggccagaggtgaaaacagccaacgctttacaacgacgctgtgcggggcacttcgtgtgtgtcatcccgtctcatcctcgggtgataggaactgttcattcgggaaaattgcaaacaactaaatacccctcaccaggagctggcccattatagcaactctgagacctctctaccgcaggctcttaaaatgggggtctcactgtgtcacccaggctggagtgcagtggtgtgatctcagctcacagcaacctatatctcccaggttcaagagattctcacctcagcctcccgagtaactgggattacaggctggtcttgaactcctgagctcaagtgattctcgtgcctcagcctcctgaggagctaggattacaggcaggagccatcacacctgtcaggagcagcatatttgaagtcaggacttttc

SEQ ID NO: 28261 - protein, 61 aa, Homo sapiens
AQKAHDRAHRGRPEVKTANALQRRCAGHFVCVIPSHPRVIGTVHSGKLQTTKYPSPGAGPL

SEQ ID NO: 28262 - DNA, 3320 bp, Homo sapiens
ccgacggcccgccccgcggggggtgggcgcagctcgtcgcgctccgcacaaagtttacccaaggtccagcctagcccctaggcaccatgtcggacagtgatctaggtgaggacgaaggcctcctctccctggcgggcaaaaggaagcgcagggggaacctgcccaaggagtcggtgaagatcctccgggactggctgtacttgcaccgctacaacgcctacccctcagagcaggagaagctgagcctttctggacagaccaacctgtcagtgctgcaaatatgtaactggttcatcaatgcccggcggcggcttctcccagacatgcttcggaaggatggcaaagaccctaatcagtttaccatttcccgccgcgggggtaaggcctcagatgtggccctcccccgtggcagcagcccctcagtgctggctgtgtctgtcccagcccccaccaatgtgctctccctgtctgtgtgctccatgccgcttcactcaggccagggggaaaagccagcagcccctttcccacgtggggagctggagtctcccaagcccctggtgacccctggtagcacacttactctgctgaccagggctgaggctggaagccccacaggtggactcttcaacacgccaccacccacacccccagagcaggacaaagaggacttcagcagcttccagctgctggtggaggtggcgctacagagggctgctgagatggagcttcagaagcagcaggacccatcactcccattactgcacactcccatccctttagtctctgaaaatccccagtaggcatctgccaagaagggtgctgaaggctccagccagctgtcctgggtttccgttttggttccctttcatacagagggttttctatggatcactgccaaacattgggatcatctcctctgtccagaggtcttcaacaggaagatgccagctggcaccactgcactgtgatgggggccctctcctctgctgactctgccgtttctccaggcctccgctcagtgatgagaccaagagatcggagacaagcatggtgctgctgcttctgctgcttctccagaaaatccctgggacacctttgttccagcctggtttcctgggctgggctcaggaaagctgccaaattcagtcctatgttgggtccaagctgcccctgtgctgtttctgtcaagccaggtgtggacattccaagttcatatgcgtgaacaaaagaaaagaggaacccagtggatgtaacagaaccgactccagttgaatgtttagatttttgctaaactgttttctttttcccttttttgctgtggtttgcattcacggcagtagttagcccaggtgtggggaacgagagtgcactgcatgatagcgttctggtgagctgggaaggacccaccactgccactgaggattgttttggaagaaaggaatatttttatcttggggaccagctaagtctctgcagtagtgtgaaattccaaatggttgttttatcattggtttggtttaccaaaaaaaaggcagggaaaaaaaaaaaaaacaaccgtatgagcgcattggcttgtctgccgcaggcacagaagggtagaaagccacagcagggggcagtccagcagactctgactcaactttctaggcacctagcagagaaagataagatcaaaaggtgtttggtttttcttttaatttttattgtagtttttttgggtgggtgggggaagtaaactagactgaagcgatggattttttttttcttttttttctttagtgtttttccctttgttcttgaacacttttgccctgcagcctcagttttgaattcttttagcaacttggattagaggggcccatatgtcagaagctcccagcacctcctacttgggagaaaagtgagccatctgctggtcaggaagtcctccagagaggcagcttttcccacaatggtggcaggaaactttggggaaagcaggaatggtgtccactgctgcggaggaactgccttcagagaaggtggggctggaaaagggttagaagcctcctagctgggattgtctttgtttcacctttctttaaattagaattacagaagcccctgcccagtgaacagataacgattggtcttatgctcctccctttcccccattttttcttttgctgttttgttttttgttttttgtttgtttgtttgtttttttgagacagagtcatgctctgtcacccgggctggagtgcagtggtgcgatctcagctcactgtaacctccgcctcccgggttcaagcaattatttgcctcagcctcccgagtagctgggattataggcacccgccaccatgtctggcttttagtagagacggggtttcaccatcttggccaggctggtcttggaactcctgacctcgtgagccaccacgcccagcctcttttgctgtttcattgctgacagtgttcaacaatatgccccatctttatatatcctaagaaacactaatcctaggttattgctagccaaaatatttttgtcctgagtagtgtcactgggccaaaagatagatcaggacgacagcctttagttttcctgaaatcaccaggtcaggcacaaggagaaaaggttcctggatactgactaacttgggtgggtggatctagccaggagaaagacagtaacatgtgttctgtactttctgggaagatccctgaagccatcacagaggctccccaacttctgagtcgcccatctgttgctgtgggagtgtgaacggatcgctgaaggagagggagctttgctctctctaggtgggcaagtttcctgggctctctgtgttgcctccctctggcttcttcctcccgtgccctctccccgtgtgccccagggggatcagggatcctcaccctcctgaggcccagtggggaagaatgaacatggcttcatccaggttaactgatgctgccatttgcccagcctcttccatcccagccctgtcagtgagcccaggtctggtgcaactgctgcaggatgcctgtagtagggaactctggaagtgtattgggctgaggtgggattttccctccccacagtgcactgagcaatggagggtggtgagggagccatgctgctgaattctggttggcatttccccattatgtaaaatggggtgttgggtagggcagactctgcttgggtttggttgtaagataaacctggaggagaagcacagttgtcccattgaattatttgagcaaaaactactgtaaataacttttttgtcttttgtcaaataaaatttttttttgtttttttaagcagaaac

SEQ ID NO: 28263 - protein, 237 aa, Homo sapiens; identical to SEQ ID NO: 3873

SEQ ID NO: 28264 - DNA, 3526 bp, Homo sapiens
ccgacggcccgccccgcggggggtgggcgcagctcgtcgcgctccgcacaaagtttacccaaggtccagcctagcccctaggcaccatgtcggacagtgatctaggtgaggacgaaggcctcctctccctggcgggcaaaaggaagcgcagggggaacctgcccaaggagtcggtgaagatcctccgggactggctgtacttgcaccgctacaacgcctacccctcagagcaggagaagctgagcctttctggacagaccaacctgtcagtgctgcaaatatgtaactggttcatcaatgcccggcggcggcttctcccagacatgcttcggaaggatggcaaagaccctaatcagtttaccatttcccgccgcgggggtaaggcctcagatgtggccctcccccgtggcagcagcccctcagtgctggctgtgtctgtcccagcccccaccaatgtgctctccctgtctgtgtgctccatgccgcttcactcaggccagggggaaaagccagcagcccctttcccacgtggggagctggagtctcccaagcccctggtgacccctggtagcacacttactctgctgaccagggctgaggctggaagccccacaggtggactcttcaacacgccaccacccacacccccagagcaggacaaagaggacttcagcagcttccagctgctggtggaggtggcgctacagagggctgctgagatggagcttcagaagcagcaggacccatcactcccattactgcacactcccatccctttagtctctgaaaatccccagtaggcatctgccaagaagggtgctgaaggctccagccagctgtcctgggtttccgttttggttccctttcatacagagggttttctatggatcactgccaaacattgggatcatctcctctgtccagaggtcttcaacaggaagatgccagctggcaccactgcactgtgatgggggccctctcctctgctgactctgccgtttctccaggcctccgctcagtgatgagaccaagagatcggagacaagcatggtgctgctgcttctgctgcttctccagaaaatccctgggacacctttgttccagcctggtttcctgggctgggctcaggaaagctgccaaattcagtcctatgttgggtccaagctgcccctgtgctgtttctgtcaagccaggtgtggacattccaagttcatatgcgtgaacaaaagaaaagaggaacccagtggatgtaacagaaccgactccagttgaatgtttagatttttgctaaactgttttctttttcccttttttgctgtggtttgcattcacggcagtagttagcccaggtgtggggaacgagagtgcactgcatgatagcgttctggtgagctgggaaggacccaccactgccactgaggattgttttggaagaaaggaatatttttatcttggggaccagctaagtctctgcagtagtgtgaaattccaaatggttgttttatcattggtttggtttaccaaaaaaaaggcagggaaaaaaaaaaaaaacaaccgtatgagcgcattggcttgtctgccgcaggcacagaagggtagaaagccacagcagggggcagtccagcagactctgactcaactttctaggcacctagcagagaaagataagatcaaaaggtgtttggtttttcttttaatttttattgtagtttttttgggtgggtgggggaagtaaactagactgaagcgatggattttttttttcttttttttctttagtgtttttccctttgttcttgaacacttttgccctgcagcctcagttttgaattcttttagcaacttggattagaggggcccatatgtcagaagctcccagcacctcctacttgggagaaaagtgagccatctgctggtcaggaagtcctccagagaggcagcttttcccacaatggtggcaggaaactttggggaaagcaggaatggtgtccactgctgcggaggaactgccttcagagaaggtggggctggaaaagggttagaagcctcctagctgggattgtctttgtttcacctttctttaaattagaattacagaagcccctgcccagtgaacagataacgattggtcttatgctcctccctttcccccattttttcttttgctgttttgttttttgttttttgtttgtttgtttgtttttttgagacagagtcatgctctgtcacccgggctggagtgcagtggtgcgatctcagctcactgtaacctccgcctcccgggttcaagcaattatttgcctcagcctcccgagtagctgggattataggcacccgccaccatgtctggcttttagtagagacggggtttcaccatcttggccaggctggtcttggaactcctgacctcgtgagccaccacgcccagcctcttttgctgtttcattgctgacagtgttcaacaatatgccccatctttatatatcctaagaaacactaatcctaggttattgctagccaaaatatttttgtcctgagtagtgtcactgggccaaaagatagatcaggacgacagcctttagttttcctgaaatcaccaggtcaggcacaaggagaaaaggttcctggatactgactaacttgggtgggtggatctagccaggagaaagacagtaacatgtgttctgtactttctgggaagatccctgaagccatcacagaggctccccaacttctgagtcgcccatctgttgctgtgggagtgtgaacggatcgctgaaggagagggagctttgctctctctaggtgggcaagtttcctgggctctctgtgttgcctccctctggcttcttcctcccgtgccctctccccgtgtgccccagggggatcagggatcctcaccctcctgaggcccagtggggaagaatgaacatggcttcatccaggttaactgatgctgccatttgcccagcctcttccatcccagccctgtcagtgagcccaggtctggtgcaactgctgcaggatgcctgtagtagggaactctggaagtgtattgggctgaggtgggattttccctccccacagtgcactgagcaatggagggtggtgagggagccatgctgctgaattctggttggcatttccccattatgtaaaatggggtgttgggtagggcagactctgcttgggtttggttgtaagataaacctggaggagaagcacagttgtcccattgaattatttgagcaaaaactactgtaaataacttttttgtcttttgtcaaataaaatttttttttgtttttttaagcagaaacagggttcttgattgatccaccagggctcagggcccaggcttgaagacaaagcagtcactggcttcttattttgctttacatcttttactctccctctagtagccagctgtgagttctgtgcacgctgtacccccattccctttcaccagctccattctgtatcccattcaactcagggtaaagggggcatttgcatctcacattgg

SEQ ID NO: 28265 - protein, 237 aa, Homo sapiens; identical to SEQ ID NO: 3873

SEQ ID NO: 28266 - DNA, 3433 bp, Homo sapiens
gcggggggtgggcgcagctcgtcgcgctccgcacaaagtttgttttctccctccgggcgggtgggggagggcgcagagggcgcggggggaggagaggggatctgacgtcaggccgcgaggtgctttccagccgcgagctgtcaggccgagtgtcaggccgggcaggtttacccaaggtccagcctagcccctaggcaccatgtcggacagtgatctaggtgaggacgaaggcctcctctccctggcgggcaaaaggaagcgcagggggaacctgcccaaggagtcggtgaagatcctccgggactggctgtacttgcaccgctacaacgcctacccctcagagcaggagaagctgagcctttctggacagaccaacctgtcagtgctgcaaatatgtaactggttcatcaatgcccggcggcggcttctcccagacatgcttcggaaggatggcaaagaccctaatcagtttaccatttcccgccgcgggggtaaggcctcagatgtggccctcccccgtggcagcagcccctcagtgctggctgtgtctgtcccagcccccaccaatgtgctctccctgtctgtgtgctccatgccgcttcactcaggccagggggaaaagccagcagcccctttcccacgtggggagctggagtctcccaagcccctggtgacccctggtagcacacttactctgctgaccagggctgaggctggaagccccacaggtggactcttcaacacgccaccacccacacccccagagcaggacaaagaggacttcagcagcttccagctgctggtggaggtggcgctacagagggctgctgagatggagcttcagaagcagcaggacccatcactcccattactgcacactcccatccctttagtctctgaaaatccccagtaggcatctgccaagaagggtgctgaaggctccagccagctgtcctgggtttccgttttggttccctttcatacagagggttttctatggatcactgccaaacattgggatcatctcctctgtccagaggtcttcaacaggaagatgccagctggcaccactgcactgtgatgggggccctctcctctgctgactctgccgtttctccaggcctccgctcagtgatgagaccaagagatcggagacaagcatggtgctgctgcttctgctgcttctccagaaaatccctgggacacctttgttccagcctggtttcctgggctgggctcaggaaagctgccaaattcagtcctatgttgggtccaagctgcccctgtgctgtttctgtcaagccaggtgtggacattccaagttcatatgcgtgaacaaaagaaaagaggaacccagtggatgtaacagaaccgactccagttgaatgtttagatttttgctaaactgttttctttttcccttttttgctgtggtttgcattcacggcagtagttagcccaggtgtggggaacgagagtgcactgcatgatagcgttctggtgagctgggaaggacccaccactgccactgaggattgttttggaagaaaggaatatttttatcttggggaccagctaagtctctgcagtagtgtgaaattccaaatggttgttttatcattggtttggtttaccaaaaaaaaggcagggaaaaaaaaaaaaaacaaccgtatgagcgcattggcttgtctgccgcaggcacagaagggtagaaagccacagcagggggcagtccagcagactctgactcaactttctaggcacctagcagagaaagataagatcaaaaggtgtttggtttttcttttaatttttattgtagtttttttgggtgggtgggggaagtaaactagactgaagcgatggattttttttttcttttttttctttagtgtttttccctttgttcttgaacacttttgccctgcagcctcagttttgaattcttttagcaacttggattagaggggcccatatgtcagaagctcccagcacctcctacttgggagaaaagtgagccatctgctggtcaggaagtcctccagagaggcagcttttcccacaatggtggcaggaaactttggggaaagcaggaatggtgtccactgctgcggaggaactgccttcagagaaggtggggctggaaaagggttagaagcctcctagctgggattgtctttgtttcacctttctttaaattagaattacagaagcccctgcccagtgaacagataacgattggtcttatgctcctccctttcccccattttttcttttgctgttttgttttttgttttttgtttgtttgtttgtttttttgagacagagtcatgctctgtcacccgggctggagtgcagtggtgcgatctcagctcactgtaacctccgcctcccgggttcaagcaattatttgcctcagcctcccgagtagctgggattataggcacccgccaccatgtctggcttttagtagagacggggtttcaccatcttggccaggctggtcttggaactcctgacctcgtgagccaccacgcccagcctcttttgctgtttcattgctgacagtgttcaacaatatgccccatctttatatatcctaagaaacactaatcctaggttattgctagccaaaatatttttgtcctgagtagtgtcactgggccaaaagatagatcaggacgacagcctttagttttcctgaaatcaccaggtcaggcacaaggagaaaaggttcctggatactgactaacttgggtgggtggatctagccaggagaaagacagtaacatgtgttctgtactttctgggaagatccctgaagccatcacagaggctccccaacttctgagtcgcccatctgttgctgtgggagtgtgaacggatcgctgaaggagagggagctttgctctctctaggtgggcaagtttcctgggctctctgtgttgcctccctctggcttcttcctcccgtgccctctccccgtgtgccccagggggatcagggatcctcaccctcctgaggcccagtggggaagaatgaacatggcttcatccaggttaactgatgctgccatttgcccagcctcttccatcccagccctgtcagtgagcccaggtctggtgcaactgctgcaggatgcctgtagtagggaactctggaagtgtattgggctgaggtgggattttccctccccacagtgcactgagcaatggagggtggtgagggagccatgctgctgaattctggttggcatttccccattatgtaaaatggggtgttgggtagggcagactctgcttgggtttggttgtaagataaacctggaggagaagcacagttgtcccattgaattatttgagcaaaaactactgtaaataacttttttgtcttttgtcaaataaaatttttttttgtttttttaagcagaaac

SEQ ID NO: 28267 - protein, 237 aa, Homo sapiens; identical to SEQ ID NO: 3873

SEQ ID NO: 28268 - DNA, 3639 bp, Homo sapiens
gcggggggtgggcgcagctcgtcgcgctccgcacaaagtttgttttctccctccgggcgggtgggggagggcgcagagggcgcggggggaggagaggggatctgacgtcaggccgcgaggtgctttccagccgcgagctgtcaggccgagtgtcaggccgggcaggtttacccaaggtccagcctagcccctaggcaccatgtcggacagtgatctaggtgaggacgaaggcctcctctccctggcgggcaaaaggaagcgcagggggaacctgcccaaggagtcggtgaagatcctccgggactggctgtacttgcaccgctacaacgcctacccctcagagcaggagaagctgagcctttctggacagaccaacctgtcagtgctgcaaatatgtaactggttcatcaatgcccggcggcggcttctcccagacatgcttcggaaggatggcaaagaccctaatcagtttaccatttcccgccgcgggggtaaggcctcagatgtggccctcccccgtggcagcagcccctcagtgctggctgtgtctgtcccagcccccaccaatgtgctctccctgtctgtgtgctccatgccgcttcactcaggccagggggaaaagccagcagcccctttcccacgtggggagctggagtctcccaagcccctggtgacccctggtagcacacttactctgctgaccagggctgaggctggaagccccacaggtggactcttcaacacgccaccacccacacccccagagcaggacaaagaggacttcagcagcttccagctgctggtggaggtggcgctacagagggctgctgagatggagcttcagaagcagcaggacccatcactcccattactgcacactcccatccctttagtctctgaaaatccccagtaggcatctgccaagaagggtgctgaaggctccagccagctgtcctgggtttccgttttggttccctttcatacagagggttttctatggatcactgccaaacattgggatcatctcctctgtccagaggtcttcaacaggaagatgccagctggcaccactgcactgtgatgggggccctctcctctgctgactctgccgtttctccaggcctccgctcagtgatgagaccaagagatcggagacaagcatggtgctgctgcttctgctgcttctccagaaaatccctgggacacctttgttccagcctggtttcctgggctgggctcaggaaagctgccaaattcagtcctatgttgggtccaagctgcccctgtgctgtttctgtcaagccaggtgtggacattccaagttcatatgcgtgaacaaaagaaaagaggaacccagtggatgtaacagaaccgactccagttgaatgtttagatttttgctaaactgttttctttttcccttttttgctgtggtttgcattcacggcagtagttagcccaggtgtggggaacgagagtgcactgcatgatagcgttctggtgagctgggaaggacccaccactgccactgaggattgttttggaagaaaggaatatttttatcttggggaccagctaagtctctgcagtagtgtgaaattccaaatggttgttttatcattggtttggtttaccaaaaaaaaggcagggaaaaaaaaaaaaaacaaccgtatgagcgcattggcttgtctgccgcaggcacagaagggtagaaagccacagcagggggcagtccagcagactctgactcaactttctaggcacctagcagagaaagataagatcaaaaggtgtttggtttttcttttaatttttattgtagtttttttgggtgggtgggggaagtaaactagactgaagcgatggattttttttttcttttttttctttagtgtttttccctttgttcttgaacacttttgccctgcagcctcagttttgaattcttttagcaacttggattagaggggcccatatgtcagaagctcccagcacctcctacttgggagaaaagtgagccatctgctggtcaggaagtcctccagagaggcagcttttcccacaatggtggcaggaaactttggggaaagcaggaatggtgtccactgctgcggaggaactgccttcagagaaggtggggctggaaaagggttagaagcctcctagctgggattgtctttgtttcacctttctttaaattagaattacagaagcccctgcccagtgaacagataacgattggtcttatgctcctccctttcccccattttttcttttgctgttttgttttttgttttttgtttgtttgtttgtttttttgagacagagtcatgctctgtcacccgggctggagtgcagtggtgcgatctcagctcactgtaacctccgcctcccgggttcaagcaattatttgcctcagcctcccgagtagctgggattataggcacccgccaccatgtctggcttttagtagagacggggtttcaccatcttggccaggctggtcttggaactcctgacctcgtgagccaccacgcccagcctcttttgctgtttcattgctgacagtgttcaacaatatgccccatctttatatatcctaagaaacactaatcctaggttattgctagccaaaatatttttgtcctgagtagtgtcactgggccaaaagatagatcaggacgacagcctttagttttcctgaaatcaccaggtcaggcacaaggagaaaaggttcctggatactgactaacttgggtgggtggatctagccaggagaaagacagtaacatgtgttctgtactttctgggaagatccctgaagccatcacagaggctccccaacttctgagtcgcccatctgttgctgtgggagtgtgaacggatcgctgaaggagagggagctttgctctctctaggtgggcaagtttcctgggctctctgtgttgcctccctctggcttcttcctcccgtgccctctccccgtgtgccccagggggatcagggatcctcaccctcctgaggcccagtggggaagaatgaacatggcttcatccaggttaactgatgctgccatttgcccagcctcttccatcccagccctgtcagtgagcccaggtctggtgcaactgctgcaggatgcctgtagtagggaactctggaagtgtattgggctgaggtgggattttccctccccacagtgcactgagcaatggagggtggtgagggagccatgctgctgaattctggttggcatttccccattatgtaaaatggggtgttgggtagggcagactctgcttgggtttggttgtaagataaacctggaggagaagcacagttgtcccattgaattatttgagcaaaaactactgtaaataacttttttgtcttttgtcaaataaaatttttttttgtttttttaagcagaaacagggttcttgattgatccaccagggctcagggcccaggcttgaagacaaagcagtcactggcttcttattttgctttacatcttttactctccctctagtagccagctgtgagttctgtgcacgctgtacccccattccctttcaccagctccattctgtatcccattcaactcagggtaaagggggcatttgcatctcacattgg

SEQ ID NO: 28269 - protein, 237 aa, Homo sapiens; identical to SEQ ID NO: 3873

SEQ ID NO: 28270 - DNA, 3394 bp, Homo sapiens
gcgagctgtcaggccgagtgtcaggccgggcaggtacgcggcgcgcgcccccggcgccccccgctccccgccgggacgccccgcgccgagccggaggccgcgtggacccgaaagccgctgggaaaagtttacccaaggtccagcctagcccctaggcaccatgtcggacagtgatctaggtgaggacgaaggcctcctctccctggcgggcaaaaggaagcgcagggggaacctgcccaaggagtcggtgaagatcctccgggactggctgtacttgcaccgctacaacgcctacccctcagagcaggagaagctgagcctttctggacagaccaacctgtcagtgctgcaaatatgtaactggttcatcaatgcccggcggcggcttctcccagacatgcttcggaaggatggcaaagaccctaatcagtttaccatttcccgccgcgggggtaaggcctcagatgtggccctcccccgtggcagcagcccctcagtgctggctgtgtctgtcccagcccccaccaatgtgctctccctgtctgtgtgctccatgccgcttcactcaggccagggggaaaagccagcagcccctttcccacgtggggagctggagtctcccaagcccctggtgacccctggtagcacacttactctgctgaccagggctgaggctggaagccccacaggtggactcttcaacacgccaccacccacacccccagagcaggacaaagaggacttcagcagcttccagctgctggtggaggtggcgctacagagggctgctgagatggagcttcagaagcagcaggacccatcactcccattactgcacactcccatccctttagtctctgaaaatccccagtaggcatctgccaagaagggtgctgaaggctccagccagctgtcctgggtttccgttttggttccctttcatacagagggttttctatggatcactgccaaacattgggatcatctcctctgtccagaggtcttcaacaggaagatgccagctggcaccactgcactgtgatgggggccctctcctctgctgactctgccgtttctccaggcctccgctcagtgatgagaccaagagatcggagacaagcatggtgctgctgcttctgctgcttctccagaaaatccctgggacacctttgttccagcctggtttcctgggctgggctcaggaaagctgccaaattcagtcctatgttgggtccaagctgcccctgtgctgtttctgtcaagccaggtgtggacattccaagttcatatgcgtgaacaaaagaaaagaggaacccagtggatgtaacagaaccgactccagttgaatgtttagatttttgctaaactgttttctttttcccttttttgctgtggtttgcattcacggcagtagttagcccaggtgtggggaacgagagtgcactgcatgatagcgttctggtgagctgggaaggacccaccactgccactgaggattgttttggaagaaaggaatatttttatcttggggaccagctaagtctctgcagtagtgtgaaattccaaatggttgttttatcattggtttggtttaccaaaaaaaaggcagggaaaaaaaaaaaaaacaaccgtatgagcgcattggcttgtctgccgcaggcacagaagggtagaaagccacagcagggggcagtccagcagactctgactcaactttctaggcacctagcagagaaagataagatcaaaaggtgtttggtttttcttttaatttttattgtagtttttttgggtgggtgggggaagtaaactagactgaagcgatggattttttttttcttttttttctttagtgtttttccctttgttcttgaacacttttgccctgcagcctcagttttgaattcttttagcaacttggattagaggggcccatatgtcagaagctcccagcacctcctacttgggagaaaagtgagccatctgctggtcaggaagtcctccagagaggcagcttttcccacaatggtggcaggaaactttggggaaagcaggaatggtgtccactgctgcggaggaactgccttcagagaaggtggggctggaaaagggttagaagcctcctagctgggattgtctttgtttcacctttctttaaattagaattacagaagcccctgcccagtgaacagataacgattggtcttatgctcctccctttcccccattttttcttttgctgttttgttttttgttttttgtttgtttgtttgtttttttgagacagagtcatgctctgtcacccgggctggagtgcagtggtgcgatctcagctcactgtaacctccgcctcccgggttcaagcaattatttgcctcagcctcccgagtagctgggattataggcacccgccaccatgtctggcttttagtagagacggggtttcaccatcttggccaggctggtcttggaactcctgacctcgtgagccaccacgcccagcctcttttgctgtttcattgctgacagtgttcaacaatatgccccatctttatatatcctaagaaacactaatcctaggttattgctagccaaaatatttttgtcctgagtagtgtcactgggccaaaagatagatcaggacgacagcctttagttttcctgaaatcaccaggtcaggcacaaggagaaaaggttcctggatactgactaacttgggtgggtggatctagccaggagaaagacagtaacatgtgttctgtactttctgggaagatccctgaagccatcacagaggctccccaacttctgagtcgcccatctgttgctgtgggagtgtgaacggatcgctgaaggagagggagctttgctctctctaggtgggcaagtttcctgggctctctgtgttgcctccctctggcttcttcctcccgtgccctctccccgtgtgccccagggggatcagggatcctcaccctcctgaggcccagtggggaagaatgaacatggcttcatccaggttaactgatgctgccatttgcccagcctcttccatcccagccctgtcagtgagcccaggtctggtgcaactgctgcaggatgcctgtagtagggaactctggaagtgtattgggctgaggtgggattttccctccccacagtgcactgagcaatggagggtggtgagggagccatgctgctgaattctggttggcatttccccattatgtaaaatggggtgttgggtagggcagactctgcttgggtttggttgtaagataaacctggaggagaagcacagttgtcccattgaattatttgagcaaaaactactgtaaataacttttttgtcttttgtcaaataaaatttttttttgtttttttaagcagaaac

SEQ ID NO: 28271 - protein, 237 aa, Homo sapiens; identical to SEQ ID NO: 3873

SEQ ID NO: 28272 - DNA, 3600 bp, Homo sapiens
gcgagctgtcaggccgagtgtcaggccgggcaggtacgcggcgcgcgcccccggcgccccccgctccccgccgggacgccccgcgccgagccggaggccgcgtggacccgaaagccgctgggaaaagtttacccaaggtccagcctagcccctaggcaccatgtcggacagtgatctaggtgaggacgaaggcctcctctccctggcgggcaaaaggaagcgcagggggaacctgcccaaggagtcggtgaagatcctccgggactggctgtacttgcaccgctacaacgcctacccctcagagcaggagaagctgagcctttctggacagaccaacctgtcagtgctgcaaatatgtaactggttcatcaatgcccggcggcggcttctcccagacatgcttcggaaggatggcaaagaccctaatcagtttaccatttcccgccgcgggggtaaggcctcagatgtggccctcccccgtggcagcagcccctcagtgctggctgtgtctgtcccagcccccaccaatgtgctctccctgtctgtgtgctccatgccgcttcactcaggccagggggaaaagccagcagcccctttcccacgtggggagctggagtctcccaagcccctggtgacccctggtagcacacttactctgctgaccagggctgaggctggaagccccacaggtggactcttcaacacgccaccacccacacccccagagcaggacaaagaggacttcagcagcttccagctgctggtggaggtggcgctacagagggctgctgagatggagcttcagaagcagcaggacccatcactcccattactgcacactcccatccctttagtctctgaaaatccccagtaggcatctgccaagaagggtgctgaaggctccagccagctgtcctgggtttccgttttggttccctttcatacagagggttttctatggatcactgccaaacattgggatcatctcctctgtccagaggtcttcaacaggaagatgccagctggcaccactgcactgtgatgggggccctctcctctgctgactctgccgtttctccaggcctccgctcagtgatgagaccaagagatcggagacaagcatggtgctgctgcttctgctgcttctccagaaaatccctgggacacctttgttccagcctggtttcctgggctgggctcaggaaagctgccaaattcagtcctatgttgggtccaagctgcccctgtgctgtttctgtcaagccaggtgtggacattccaagttcatatgcgtgaacaaaagaaaagaggaacccagtggatgtaacagaaccgactccagttgaatgtttagatttttgctaaactgttttctttttcccttttttgctgtggtttgcattcacggcagtagttagcccaggtgtggggaacgagagtgcactgcatgatagcgttctggtgagctgggaaggacccaccactgccactgaggattgttttggaagaaaggaatatttttatcttggggaccagctaagtctctgcagtagtgtgaaattccaaatggttgttttatcattggtttggtttaccaaaaaaaaggcagggaaaaaaaaaaaaaacaaccgtatgagcgcattggcttgtctgccgcaggcacagaagggtagaaagccacagcagggggcagtccagcagactctgactcaactttctaggcacctagcagagaaagataagatcaaaaggtgtttggtttttcttttaatttttattgtagtttttttgggtgggtgggggaagtaaactagactgaagcgatggattttttttttcttttttttctttagtgtttttccctttgttcttgaacacttttgccctgcagcctcagttttgaattcttttagcaacttggattagaggggcccatatgtcagaagctcccagcacctcctacttgggagaaaagtgagccatctgctggtcaggaagtcctccagagaggcagcttttcccacaatggtggcaggaaactttggggaaagcaggaatggtgtccactgctgcggaggaactgccttcagagaaggtggggctggaaaagggttagaagcctcctagctgggattgtctttgtttcacctttctttaaattagaattacagaagcccctgcccagtgaacagataacgattggtcttatgctcctccctttcccccattttttcttttgctgttttgttttttgttttttgtttgtttgtttgtttttttgagacagagtcatgctctgtcacccgggctggagtgcagtggtgcgatctcagctcactgtaacctccgcctcccgggttcaagcaattatttgcctcagcctcccgagtagctgggattataggcacccgccaccatgtctggcttttagtagagacggggtttcaccatcttggccaggctggtcttggaactcctgacctcgtgagccaccacgcccagcctcttttgctgtttcattgctgacagtgttcaacaatatgccccatctttatatatcctaagaaacactaatcctaggttattgctagccaaaatatttttgtcctgagtagtgtcactgggccaaaagatagatcaggacgacagcctttagttttcctgaaatcaccaggtcaggcacaaggagaaaaggttcctggatactgactaacttgggtgggtggatctagccaggagaaagacagtaacatgtgttctgtactttctgggaagatccctgaagccatcacagaggctccccaacttctgagtcgcccatctgttgctgtgggagtgtgaacggatcgctgaaggagagggagctttgctctctctaggtgggcaagtttcctgggctctctgtgttgcctccctctggcttcttcctcccgtgccctctccccgtgtgccccagggggatcagggatcctcaccctcctgaggcccagtggggaagaatgaacatggcttcatccaggttaactgatgctgccatttgcccagcctcttccatcccagccctgtcagtgagcccaggtctggtgcaactgctgcaggatgcctgtagtagggaactctggaagtgtattgggctgaggtgggattttccctccccacagtgcactgagcaatggagggtggtgagggagccatgctgctgaattctggttggcatttccccattatgtaaaatggggtgttgggtagggcagactctgcttgggtttggttgtaagataaacctggaggagaagcacagttgtcccattgaattatttgagcaaaaactactgtaaataacttttttgtcttttgtcaaataaaatttttttttgtttttttaagcagaaacagggttcttgattgatccaccagggctcagggcccaggcttgaagacaaagcagtcactggcttcttattttgctttacatcttttactctccctctagtagccagctgtgagttctgtgcacgctgtacccccattccctttcaccagctccattctgtatcccattcaactcagggtaaagggggcatttgcatctcacattgg

SEQ ID NO: 28273 - protein, 237 aa, Homo sapiens; identical to SEQ ID NO: 3873

SEQ ID NO: 28274 - DNA, 3445 bp, Homo sapiens
ggatggcgggcccgcgcgggagctggtgcgcggagtcggcccggggtgtggggactgtggggtgcaagcgccccgagcgccggacgattcctcgccgacccaggagccatgtgctccgactcggtctgggccgcgggggaggttgcgcgctttgtctgaactgctgggaatgcgggcgtttacccaaggtccagcctagcccctaggcaccatgtcggacagtgatctaggtgaggacgaaggcctcctctccctggcgggcaaaaggaagcgcagggggaacctgcccaaggagtcggtgaagatcctccgggactggctgtacttgcaccgctacaacgcctacccctcagagcaggagaagctgagcctttctggacagaccaacctgtcagtgctgcaaatatgtaactggttcatcaatgcccggcggcggcttctcccagacatgcttcggaaggatggcaaagaccctaatcagtttaccatttcccgccgcgggggtaaggcctcagatgtggccctcccccgtggcagcagcccctcagtgctggctgtgtctgtcccagcccccaccaatgtgctctccctgtctgtgtgctccatgccgcttcactcaggccagggggaaaagccagcagcccctttcccacgtggggagctggagtctcccaagcccctggtgacccctggtagcacacttactctgctgaccagggctgaggctggaagccccacaggtggactcttcaacacgccaccacccacacccccagagcaggacaaagaggacttcagcagcttccagctgctggtggaggtggcgctacagagggctgctgagatggagcttcagaagcagcaggacccatcactcccattactgcacactcccatccctttagtctctgaaaatccccagtaggcatctgccaagaagggtgctgaaggctccagccagctgtcctgggtttccgttttggttccctttcatacagagggttttctatggatcactgccaaacattgggatcatctcctctgtccagaggtcttcaacaggaagatgccagctggcaccactgcactgtgatgggggccctctcctctgctgactctgccgtttctccaggcctccgctcagtgatgagaccaagagatcggagacaagcatggtgctgctgcttctgctgcttctccagaaaatccctgggacacctttgttccagcctggtttcctgggctgggctcaggaaagctgccaaattcagtcctatgttgggtccaagctgcccctgtgctgtttctgtcaagccaggtgtggacattccaagttcatatgcgtgaacaaaagaaaagaggaacccagtggatgtaacagaaccgactccagttgaatgtttagatttttgctaaactgttttctttttcccttttttgctgtggtttgcattcacggcagtagttagcccaggtgtggggaacgagagtgcactgcatgatagcgttctggtgagctgggaaggacccaccactgccactgaggattgttttggaagaaaggaatatttttatcttggggaccagctaagtctctgcagtagtgtgaaattccaaatggttgttttatcattggtttggtttaccaaaaaaaaggcagggaaaaaaaaaaaaaacaaccgtatgagcgcattggcttgtctgccgcaggcacagaagggtagaaagccacagcagggggcagtccagcagactctgactcaactttctaggcacctagcagagaaagataagatcaaaaggtgtttggtttttcttttaatttttattgtagtttttttgggtgggtgggggaagtaaactagactgaagcgatggattttttttttcttttttttctttagtgtttttccctttgttcttgaacacttttgccctgcagcctcagttttgaattcttttagcaacttggattagaggggcccatatgtcagaagctcccagcacctcctacttgggagaaaagtgagccatctgctggtcaggaagtcctccagagaggcagcttttcccacaatggtggcaggaaactttggggaaagcaggaatggtgtccactgctgcggaggaactgccttcagagaaggtggggctggaaaagggttagaagcctcctagctgggattgtctttgtttcacctttctttaaattagaattacagaagcccctgcccagtgaacagataacgattggtcttatgctcctccctttcccccattttttcttttgctgttttgttttttgttttttgtttgtttgtttgtttttttgagacagagtcatgctctgtcacccgggctggagtgcagtggtgcgatctcagctcactgtaacctccgcctcccgggttcaagcaattatttgcctcagcctcccgagtagctgggattataggcacccgccaccatgtctggcttttagtagagacggggtttcaccatcttggccaggctggtcttggaactcctgacctcgtgagccaccacgcccagcctcttttgctgtttcattgctgacagtgttcaacaatatgccccatctttatatatcctaagaaacactaatcctaggttattgctagccaaaatatttttgtcctgagtagtgtcactgggccaaaagatagatcaggacgacagcctttagttttcctgaaatcaccaggtcaggcacaaggagaaaaggttcctggatactgactaacttgggtgggtggatctagccaggagaaagacagtaacatgtgttctgtactttctgggaagatccctgaagccatcacagaggctccccaacttctgagtcgcccatctgttgctgtgggagtgtgaacggatcgctgaaggagagggagctttgctctctctaggtgggcaagtttcctgggctctctgtgttgcctccctctggcttcttcctcccgtgccctctccccgtgtgccccagggggatcagggatcctcaccctcctgaggcccagtggggaagaatgaacatggcttcatccaggttaactgatgctgccatttgcccagcctcttccatcccagccctgtcagtgagcccaggtctggtgcaactgctgcaggatgcctgtagtagggaactctggaagtgtattgggctgaggtgggattttccctccccacagtgcactgagcaatggagggtggtgagggagccatgctgctgaattctggttggcatttccccattatgtaaaatggggtgttgggtagggcagactctgcttgggtttggttgtaagataaacctggaggagaagcacagttgtcccattgaattatttgagcaaaaactactgtaaataacttttttgtcttttgtcaaataaaatttttttttgtttttttaagcagaaac

SEQ ID NO: 28275 - protein, 237 aa, Homo sapiens; identical to SEQ ID NO: 3873

SEQ ID NO: 28276 - DNA, 3651 bp, Homo sapiens
ggatggcgggcccgcgcgggagctggtgcgcggagtcggcccggggtgtggggactgtggggtgcaagcgccccgagcgccggacgattcctcgccgacccaggagccatgtgctccgactcggtctgggccgcgggggaggttgcgcgctttgtctgaactgctgggaatgcgggcgtttacccaaggtccagcctagcccctaggcaccatgtcggacagtgatctaggtgaggacgaaggcctcctctccctggcgggcaaaaggaagcgcagggggaacctgcccaaggagtcggtgaagatcctccgggactggctgtacttgcaccgctacaacgcctacccctcagagcaggagaagctgagcctttctggacagaccaacctgtcagtgctgcaaatatgtaactggttcatcaatgcccggcggcggcttctcccagacatgcttcggaaggatggcaaagaccctaatcagtttaccatttcccgccgcgggggtaaggcctcagatgtggccctcccccgtggcagcagcccctcagtgctggctgtgtctgtcccagcccccaccaatgtgctctccctgtctgtgtgctccatgccgcttcactcaggccagggggaaaagccagcagcccctttcccacgtggggagctggagtctcccaagcccctggtgacccctggtagcacacttactctgctgaccagggctgaggctggaagccccacaggtggactcttcaacacgccaccacccacacccccagagcaggacaaagaggacttcagcagcttccagctgctggtggaggtggcgctacagagggctgctgagatggagcttcagaagcagcaggacccatcactcccattactgcacactcccatccctttagtctctgaaaatccccagtaggcatctgccaagaagggtgctgaaggctccagccagctgtcctgggtttccgttttggttccctttcatacagagggttttctatggatcactgccaaacattgggatcatctcctctgtccagaggtcttcaacaggaagatgccagctggcaccactgcactgtgatgggggccctctcctctgctgactctgccgtttctccaggcctccgctcagtgatgagaccaagagatcggagacaagcatggtgctgctgcttctgctgcttctccagaaaatccctgggacacctttgttccagcctggtttcctgggctgggctcaggaaagctgccaaattcagtcctatgttgggtccaagctgcccctgtgctgtttctgtcaagccaggtgtggacattccaagttcatatgcgtgaacaaaagaaaagaggaacccagtggatgtaacagaaccgactccagttgaatgtttagatttttgctaaactgttttctttttcccttttttgctgtggtttgcattcacggcagtagttagcccaggtgtggggaacgagagtgcactgcatgatagcgttctggtgagctgggaaggacccaccactgccactgaggattgttttggaagaaaggaatatttttatcttggggaccagctaagtctctgcagtagtgtgaaattccaaatggttgttttatcattggtttggtttaccaaaaaaaaggcagggaaaaaaaaaaaaaacaaccgtatgagcgcattggcttgtctgccgcaggcacagaagggtagaaagccacagcagggggcagtccagcagactctgactcaactttctaggcacctagcagagaaagataagatcaaaaggtgtttggtttttcttttaatttttattgtagtttttttgggtgggtgggggaagtaaactagactgaagcgatggattttttttttcttttttttctttagtgtttttccctttgttcttgaacacttttgccctgcagcctcagttttgaattcttttagcaacttggattagaggggcccatatgtcagaagctcccagcacctcctacttgggagaaaagtgagccatctgctggtcaggaagtcctccagagaggcagcttttcccacaatggtggcaggaaactttggggaaagcaggaatggtgtccactgctgcggaggaactgccttcagagaaggtggggctggaaaagggttagaagcctcctagctgggattgtctttgtttcacctttctttaaattagaattacagaagcccctgcccagtgaacagataacgattggtcttatgctcctccctttcccccattttttcttttgctgttttgttttttgttttttgtttgtttgtttgtttttttgagacagagtcatgctctgtcacccgggctggagtgcagtggtgcgatctcagctcactgtaacctccgcctcccgggttcaagcaattatttgcctcagcctcccgagtagctgggattataggcacccgccaccatgtctggcttttagtagagacggggtttcaccatcttggccaggctggtcttggaactcctgacctcgtgagccaccacgcccagcctcttttgctgtttcattgctgacagtgttcaacaatatgccccatctttatatatcctaagaaacactaatcctaggttattgctagccaaaatatttttgtcctgagtagtgtcactgggccaaaagatagatcaggacgacagcctttagttttcctgaaatcaccaggtcaggcacaaggagaaaaggttcctggatactgactaacttgggtgggtggatctagccaggagaaagacagtaacatgtgttctgtactttctgggaagatccctgaagccatcacagaggctccccaacttctgagtcgcccatctgttgctgtgggagtgtgaacggatcgctgaaggagagggagctttgctctctctaggtgggcaagtttcctgggctctctgtgttgcctccctctggcttcttcctcccgtgccctctccccgtgtgccccagggggatcagggatcctcaccctcctgaggcccagtggggaagaatgaacatggcttcatccaggttaactgatgctgccatttgcccagcctcttccatcccagccctgtcagtgagcccaggtctggtgcaactgctgcaggatgcctgtagtagggaactctggaagtgtattgggctgaggtgggattttccctccccacagtgcactgagcaatggagggtggtgagggagccatgctgctgaattctggttggcatttccccattatgtaaaatggggtgttgggtagggcagactctgcttgggtttggttgtaagataaacctggaggagaagcacagttgtcccattgaattatttgagcaaaaactactgtaaataacttttttgtcttttgtcaaataaaatttttttttgtttttttaagcagaaacagggttcttgattgatccaccagggctcagggcccaggcttgaagacaaagcagtcactggcttcttattttgctttacatcttttactctccctctagtagccagctgtgagttctgtgcacgctgtacccccattccctttcaccagctccattctgtatcccattcaactcagggtaaagggggcatttgcatctcacattgg

SEQ ID NO: 28277 - protein, 237 aa, Homo sapiens; identical to SEQ ID NO: 3873

SEQ ID NO: 28278 - DNA, 2438 bp, Homo sapiens
aagctgagcctttctggacagaccaacctgtcagtgctgcaaaggtcttcaacaggaagatgccagctggcaccactgcactgtgatgggggccctctcctctgctgactctgccgtttctccaggcctccgctcagtgatgagaccaagagatcggagacaagcatggtgctgctgcttctgctgcttctccagaaaatccctgggacacctttgttccagcctggtttcctgggctgggctcaggaaagctgccaaattcagtcctatgttgggtccaagctgcccctgtgctgtttctgtcaagccaggtgtggacattccaagttcatatgcgtgaacaaaagaaaagaggaacccagtggatgtaacagaaccgactccagttgaatgtttagatttttgctaaactgttttctttttcccttttttgctgtggtttgcattcacggcagtagttagcccaggtgtggggaacgagagtgcactgcatgatagcgttctggtgagctgggaaggacccaccactgccactgaggattgttttggaagaaaggaatatttttatcttggggaccagctaagtctctgcagtagtgtgaaattccaaatggttgttttatcattggtttggtttaccaaaaaaaaggcagggaaaaaaaaaaaaaacaaccgtatgagcgcattggcttgtctgccgcaggcacagaagggtagaaagccacagcagggggcagtccagcagactctgactcaactttctaggcacctagcagagaaagataagatcaaaaggtgtttggtttttcttttaatttttattgtagtttttttgggtgggtgggggaagtaaactagactgaagcgatggattttttttttcttttttttctttagtgtttttccctttgttcttgaacacttttgccctgcagcctcagttttgaattcttttagcaacttggattagaggggcccatatgtcagaagctcccagcacctcctacttgggagaaaagtgagccatctgctggtcaggaagtcctccagagaggcagcttttcccacaatggtggcaggaaactttggggaaagcaggaatggtgtccactgctgcggaggaactgccttcagagaaggtggggctggaaaagggttagaagcctcctagctgggattgtctttgtttcacctttctttaaattagaattacagaagcccctgcccagtgaacagataacgattggtcttatgctcctccctttcccccattttttcttttgctgttttgttttttgttttttgtttgtttgtttgtttttttgagacagagtcatgctctgtcacccgggctggagtgcagtggtgcgatctcagctcactgtaacctccgcctcccgggttcaagcaattatttgcctcagcctcccgagtagctgggattataggcacccgccaccatgtctggcttttagtagagacggggtttcaccatcttggccaggctggtcttggaactcctgacctcgtgagccaccacgcccagcctcttttgctgtttcattgctgacagtgttcaacaatatgccccatctttatatatcctaagaaacactaatcctaggttattgctagccaaaatatttttgtcctgagtagtgtcactgggccaaaagatagatcaggacgacagcctttagttttcctgaaatcaccaggtcaggcacaaggagaaaaggttcctggatactgactaacttgggtgggtggatctagccaggagaaagacagtaacatgtgttctgtactttctgggaagatccctgaagccatcacagaggctccccaacttctgagtcgcccatctgttgctgtgggagtgtgaacggatcgctgaaggagagggagctttgctctctctaggtgggcaagtttcctgggctctctgtgttgcctccctctggcttcttcctcccgtgccctctccccgtgtgccccagggggatcagggatcctcaccctcctgaggcccagtggggaagaatgaacatggcttcatccaggttaactgatgctgccatttgcccagcctcttccatcccagccctgtcagtgagcccaggtctggtgcaactgctgcaggatgcctgtagtagggaactctggaagtgtattgggctgaggtgggattttccctccccacagtgcactgagcaatggagggtggtgagggagccatgctgctgaattctggttggcatttccccattatgtaaaatggggtgttgggtagggcagactctgcttgggtttggttgtaagataaacctggaggagaagcacagttgtcccattgaattatttgagcaaaaactactgtaaataacttttttgtcttttgtcaaataaaatttttttttgtttttttaagcagaaac

SEQ ID NO: 28279 - protein, 84 aa, Homo sapiens
MGALSSADSAVSPGLRSVMRPRDRRQAWCCCFCCFSRKSLGHLCSSLVSWAGLRKAAKFSPMLGPSCPCAVSVKPGVDIPSSYA

SEQ ID NO: 28280 - DNA, 2644 bp, Homo sapiens
aagctgagcctttctggacagaccaacctgtcagtgctgcaaaggtcttcaacaggaagatgccagctggcaccactgcactgtgatgggggccctctcctctgctgactctgccgtttctccaggcctccgctcagtgatgagaccaagagatcggagacaagcatggtgctgctgcttctgctgcttctccagaaaatccctgggacacctttgttccagcctggtttcctgggctgggctcaggaaagctgccaaattcagtcctatgttgggtccaagctgcccctgtgctgtttctgtcaagccaggtgtggacattccaagttcatatgcgtgaacaaaagaaaagaggaacccagtggatgtaacagaaccgactccagttgaatgtttagatttttgctaaactgttttctttttcccttttttgctgtggtttgcattcacggcagtagttagcccaggtgtggggaacgagagtgcactgcatgatagcgttctggtgagctgggaaggacccaccactgccactgaggattgttttggaagaaaggaatatttttatcttggggaccagctaagtctctgcagtagtgtgaaattccaaatggttgttttatcattggtttggtttaccaaaaaaaaggcagggaaaaaaaaaaaaaacaaccgtatgagcgcattggcttgtctgccgcaggcacagaagggtagaaagccacagcagggggcagtccagcagactctgactcaactttctaggcacctagcagagaaagataagatcaaaaggtgtttggtttttcttttaatttttattgtagtttttttgggtgggtgggggaagtaaactagactgaagcgatggattttttttttcttttttttctttagtgtttttccctttgttcttgaacacttttgccctgcagcctcagttttgaattcttttagcaacttggattagaggggcccatatgtcagaagctcccagcacctcctacttgggagaaaagtgagccatctgctggtcaggaagtcctccagagaggcagcttttcccacaatggtggcaggaaactttggggaaagcaggaatggtgtccactgctgcggaggaactgccttcagagaaggtggggctggaaaagggttagaagcctcctagctgggattgtctttgtttcacctttctttaaattagaattacagaagcccctgcccagtgaacagataacgattggtcttatgctcctccctttcccccattttttcttttgctgttttgttttttgttttttgtttgtttgtttgtttttttgagacagagtcatgctctgtcacccgggctggagtgcagtggtgcgatctcagctcactgtaacctccgcctcccgggttcaagcaattatttgcctcagcctcccgagtagctgggattataggcacccgccaccatgtctggcttttagtagagacggggtttcaccatcttggccaggctggtcttggaactcctgacctcgtgagccaccacgcccagcctcttttgctgtttcattgctgacagtgttcaacaatatgccccatctttatatatcctaagaaacactaatcctaggttattgctagccaaaatatttttgtcctgagtagtgtcactgggccaaaagatagatcaggacgacagcctttagttttcctgaaatcaccaggtcaggcacaaggagaaaaggttcctggatactgactaacttgggtgggtggatctagccaggagaaagacagtaacatgtgttctgtactttctgggaagatccctgaagccatcacagaggctccccaacttctgagtcgcccatctgttgctgtgggagtgtgaacggatcgctgaaggagagggagctttgctctctctaggtgggcaagtttcctgggctctctgtgttgcctccctctggcttcttcctcccgtgccctctccccgtgtgccccagggggatcagggatcctcaccctcctgaggcccagtggggaagaatgaacatggcttcatccaggttaactgatgctgccatttgcccagcctcttccatcccagccctgtcagtgagcccaggtctggtgcaactgctgcaggatgcctgtagtagggaactctggaagtgtattgggctgaggtgggattttccctccccacagtgcactgagcaatggagggtggtgagggagccatgctgctgaattctggttggcatttccccattatgtaaaatggggtgttgggtagggcagactctgcttgggtttggttgtaagataaacctggaggagaagcacagttgtcccattgaattatttgagcaaaaactactgtaaataacttttttgtcttttgtcaaataaaatttttttttgtttttttaagcagaaacagggttcttgattgatccaccagggctcagggcccaggcttgaagacaaagcagtcactggcttcttattttgctttacatcttttactctccctctagtagccagctgtgagttctgtgcacgctgtacccccattccctttcaccagctccattctgtatcccattcaactcagggtaaagggggcatttgcatctcacattgg

SEQ ID NO: 28281 - protein, 84 aa, Homo sapiens; identical to SEQ ID NO: 28279

SEQ ID NO: 28282 - DNA, 2697 bp, Homo sapiens
aacagtatcttgttctattgcctagactggaatccagtggtgcgatcatagctcattgcaggctccacctcttgggctccagctatcttccgatctcaggctcccaagtagttgggaccacaggggtgcaccactacacctggctaacttcttttgtagaaacagggtctccctgtgttgcccaggctggtcttgaactcctgggcttaagcaatcctcccgccttggccacccaaagtgttgggattacaggtgtgagccactgtgcccagcccatagctgttttagattaagcaaattgatcggtcttgtatattcattccagatatgtaactggttcatcaatgcccggcggcggcttctcccagacatgcttcggaaggatggcaaagaccctaatcagtttaccatttcccgccgcgggggtaaggcctcagatgtggccctcccccgtggcagcagcccctcagtgctggctgtgtctgtcccagcccccaccaatgtgctctccctgtctgtgtgctccatgccgcttcactcaggccagggggaaaagccagcagcccctttcccacgtggggagctggagtctcccaagcccctggtgacccctggtagcacacttactctgctgaccagggctgaggctggaagccccacaggtggactcttcaacacgccaccacccacacccccagagcaggacaaagaggacttcagcagcttccagctgctggtggaggtggcgctacagagggctgctgagatggagcttcagaagcagcaggacccatcactcccattactgcacactcccatccctttagtctctgaaaatccccagtaggcatctgccaagaagggtgctgaaggctccagccagctgtcctgggtttccgttttggttccctttcatacagagggttttctatggatcactgccaaacattgggatcatctcctctgtccagaggtcttcaacaggaagatgccagctggcaccactgcactgtgatgggggccctctcctctgctgactctgccgtttctccaggcctccgctcagtgatgagaccaagagatcggagacaagcatggtgctgctgcttctgctgcttctccagaaaatccctgggacacctttgttccagcctggtttcctgggctgggctcaggaaagctgccaaattcagtcctatgttgggtccaagctgcccctgtgctgtttctgtcaagccaggtgtggacattccaagttcatatgcgtgaacaaaagaaaagaggaacccagtggatgtaacagaaccgactccagttgaatgtttagatttttgctaaactgttttctttttcccttttttgctgtggtttgcattcacggcagtagttagcccaggtgtggggaacgagagtgcactgcatgatagcgttctggtgagctgggaaggacccaccactgccactgaggattgttttggaagaaaggaatatttttatcttggggaccagctaagtctctgcagtagtgtgaaattccaaatggttgttttatcattggtttggtttaccaaaaaaaaggcagggaaaaaaaaaaaaaacaaccgtatgagcgcattggcttgtctgccgcaggcacagaagggtagaaagccacagcagggggcagtccagcagactctgactcaactttctaggcacctagcagagaaagataagatcaaaaggtgtttggtttttcttttaatttttattgtagtttttttgggtgggtgggggaagtaaactagactgaagcgatggattttttttttcttttttttctttagtgtttttccctttgttcttgaacacttttgccctgcagcctcagttttgaattcttttagcaacttggattagaggggcccatatgtcagaagctcccagcacctcctacttgggagaaaagtgagccatctgctggtcaggaagtcctccagagaggcagcttttcccacaatggtggcaggaaactttggggaaagcaggaatggtgtccactgctgcggaggaactgccttcagagaaggtggggctggaaaagggttagaagcctcctagctgggattgtctttgtttcacctttctttaaattagaattacagaagcccctgcccagtgaacagataacgattggtcttatgctcctccctttcccccattttttcttttgctgttttgttttttgttttttgtttgtttgtttgtttttttgagacagagtcatgctctgtcacccgggctggagtgcagtggtgcgatctcagctcactgtaacctccgcctcccgggttcaagcaattatttgcccagcctcttccatcccagccctgtcagtgagcccaggtctggtgcaactgctgcaggatgcctgtagtagggaactctggaagtgtattgggctgaggtgggattttccctccccacagtgcactgagcaatggagggtggtgagggagccatgctgctgaattctggttggcatttccccattatgtaaaatggggtgttgggtagggcagactctgcttgggtttggttgtaagataaacctggaggagaagcacagttgtcccattgaattatttgagcaaaaactactgtaaataacttttttgtcttttgtcaaataaaatttttttttgtttttttaagcag

SEQ ID NO: 28283 - protein, 81 aa, Homo sapiens
MLCHPGWSAVVRSQLTVTSASRVQAIICPASSIPALSVSPGLVQLLQDACSRELWKCIGLRWDFPSPQCTEQWRVVREPCC

SEQ ID NO: 28284 - DNA, 2907 bp, Homo sapiens
aacagtatcttgttctattgcctagactggaatccagtggtgcgatcatagctcattgcaggctccacctcttgggctccagctatcttccgatctcaggctcccaagtagttgggaccacaggggtgcaccactacacctggctaacttcttttgtagaaacagggtctccctgtgttgcccaggctggtcttgaactcctgggcttaagcaatcctcccgccttggccacccaaagtgttgggattacaggtgtgagccactgtgcccagcccatagctgttttagattaagcaaattgatcggtcttgtatattcattccagatatgtaactggttcatcaatgcccggcggcggcttctcccagacatgcttcggaaggatggcaaagaccctaatcagtttaccatttcccgccgcgggggtaaggcctcagatgtggccctcccccgtggcagcagcccctcagtgctggctgtgtctgtcccagcccccaccaatgtgctctccctgtctgtgtgctccatgccgcttcactcaggccagggggaaaagccagcagcccctttcccacgtggggagctggagtctcccaagcccctggtgacccctggtagcacacttactctgctgaccagggctgaggctggaagccccacaggtggactcttcaacacgccaccacccacacccccagagcaggacaaagaggacttcagcagcttccagctgctggtggaggtggcgctacagagggctgctgagatggagcttcagaagcagcaggacccatcactcccattactgcacactcccatccctttagtctctgaaaatccccagtaggcatctgccaagaagggtgctgaaggctccagccagctgtcctgggtttccgttttggttccctttcatacagagggttttctatggatcactgccaaacattgggatcatctcctctgtccagaggtcttcaacaggaagatgccagctggcaccactgcactgtgatgggggccctctcctctgctgactctgccgtttctccaggcctccgctcagtgatgagaccaagagatcggagacaagcatggtgctgctgcttctgctgcttctccagaaaatccctgggacacctttgttccagcctggtttcctgggctgggctcaggaaagctgccaaattcagtcctatgttgggtccaagctgcccctgtgctgtttctgtcaagccaggtgtggacattccaagttcatatgcgtgaacaaaagaaaagaggaacccagtggatgtaacagaaccgactccagttgaatgtttagatttttgctaaactgttttctttttcccttttttgctgtggtttgcattcacggcagtagttagcccaggtgtggggaacgagagtgcactgcatgatagcgttctggtgagctgggaaggacccaccactgccactgaggattgttttggaagaaaggaatatttttatcttggggaccagctaagtctctgcagtagtgtgaaattccaaatggttgttttatcattggtttggtttaccaaaaaaaaggcagggaaaaaaaaaaaaaacaaccgtatgagcgcattggcttgtctgccgcaggcacagaagggtagaaagccacagcagggggcagtccagcagactctgactcaactttctaggcacctagcagagaaagataagatcaaaaggtgtttggtttttcttttaatttttattgtagtttttttgggtgggtgggggaagtaaactagactgaagcgatggattttttttttcttttttttctttagtgtttttccctttgttcttgaacacttttgccctgcagcctcagttttgaattcttttagcaacttggattagaggggcccatatgtcagaagctcccagcacctcctacttgggagaaaagtgagccatctgctggtcaggaagtcctccagagaggcagcttttcccacaatggtggcaggaaactttggggaaagcaggaatggtgtccactgctgcggaggaactgccttcagagaaggtggggctggaaaagggttagaagcctcctagctgggattgtctttgtttcacctttctttaaattagaattacagaagcccctgcccagtgaacagataacgattggtcttatgctcctccctttcccccattttttcttttgctgttttgttttttgttttttgtttgtttgtttgtttttttgagacagagtcatgctctgtcacccgggctggagtgcagtggtgcgatctcagctcactgtaacctccgcctcccgggttcaagcaattatttgcccagcctcttccatcccagccctgtcagtgagcccaggtctggtgcaactgctgcaggatgcctgtagtagggaactctggaagtgtattgggctgaggtgggattttccctccccacagtgcactgagcaatggagggtggtgagggagccatgctgctgaattctggttggcatttccccattatgtaaaatggggtgttgggtagggcagactctgcttgggtttggttgtaagataaacctggaggagaagcacagttgtcccattgaattatttgagcaaaaactactgtaaataacttttttgtcttttgtcaaataaaatttttttttgtttttttaagcagaaacagggttcttgattgatccaccagggctcagggcccaggcttgaagacaaagcagtcactggcttcttattttgctttacatcttttactctccctctagtagccagctgtgagttctgtgcacgctgtacccccattccctttcaccagctccattctgtatcccattcaactcagggtaaagggggcatttgcatctcacattgg

SEQ ID NO: 28285 - protein, 81 aa, Homo sapiens; identical to SEQ ID NO: 28283

SEQ ID NO: 28286 - DNA, 1302 bp, Homo sapiens
gggaagtaaactagactgaagcgatggattttttttttcttttttttctttagtgtttttccctttgttcttgaacacttttgccctgcagcctcagttttgaattcttttagcaacttggattagaggggcccatatgtcagaagctcccagcacctcctacttgggagaaaagtgagccatctgctggtcaggaagtcctccagagaggcagcttttcccacaatggtggcaggaaactttggggaaagcaggaatggtgtccactgctgcggaggaactgccttcagagaaggtggggctggaaaagggttagaagcctcctagctgggattgtctttgtttcacctttctttaaattagaattacagaagcccctgcccagtgaacagataacgattggtcttatgctcctccctttcccccattttttcttttgctgttttgttttttgttttttgtttgtttgtttgtttttttgagacagagtcatgctctgtcacccgggctggagtgcagtggtgcgatctcagctcactgtaacctccgcctcccgggttcaagcaattatttgcctcagcctcccgagtagctgggattataggcacccgccaccatgtctggcttttagtagagacggggtttcaccatcttggccaggctggtcttggaactcctgacctcgtgagccaccacgcccagcctcttttgctgtttcattgctgacagtgttcaacaatatgccccatctttatatatcctaagaaacactaatcctaggttattgctagccaaaatatttttgtcctgagtagtgtcactgggccaaaagatagatcaggacgacagcctttagttttcctgaaatcaccaggtcaggcacaaggagaaaaggttcctggatactgactaacttgggtgggtggatctagccaggagaaagacagtaacatgtgttctgtactttctgggaagatccctgaagccatcacagaggctccccaacttctgagtcgcccatctgttgctgtgggagttgtattgggctgaggtgggattttccctccccacagtgcactgagcaatggagggtggtgagggagccatgctgctgaattctggttggcatttccccattatgtaaaatggggtgttgggtagggcagactctgcttgggtttggttgtaagataaacctggaggagaagcacagttgtcccattgaattatttgagcaaaaactactgtaaataacttttttgtcttttgtcaaataaaatttttttttgtttttttaagcag

SEQ ID NO: 28287 - protein, 32 aa, Homo sapiens [sequence omitted]

SEQ ID NO: 28288 - DNA, 1512 bp, Homo sapiens
gggaagtaaactagactgaagcgatggattttttttttcttttttttctttagtgtttttccctttgttcttgaacacttttgccctgcagcctcagttttgaattcttttagcaacttggattagaggggcccatatgtcagaagctcccagcacctcctacttgggagaaaagtgagccatctgctggtcaggaagtcctccagagaggcagcttttcccacaatggtggcaggaaactttggggaaagcaggaatggtgtccactgctgcggaggaactgccttcagagaaggtggggctggaaaagggttagaagcctcctagctgggattgtctttgtttcacctttctttaaattagaattacagaagcccctgcccagtgaacagataacgattggtcttatgctcctccctttcccccattttttcttttgctgttttgttttttgttttttgtttgtttgtttgtttttttgagacagagtcatgctctgtcacccgggctggagtgcagtggtgcgatctcagctcactgtaacctccgcctcccgggttcaagcaattatttgcctcagcctcccgagtagctgggattataggcacccgccaccatgtctggcttttagtagagacggggtttcaccatcttggccaggctggtcttggaactcctgacctcgtgagccaccacgcccagcctcttttgctgtttcattgctgacagtgttcaacaatatgccccatctttatatatcctaagaaacactaatcctaggttattgctagccaaaatatttttgtcctgagtagtgtcactgggccaaaagatagatcaggacgacagcctttagttttcctgaaatcaccaggtcaggcacaaggagaaaaggttcctggatactgactaacttgggtgggtggatctagccaggagaaagacagtaacatgtgttctgtactttctgggaagatccctgaagccatcacagaggctccccaacttctgagtcgcccatctgttgctgtgggagttgtattgggctgaggtgggattttccctccccacagtgcactgagcaatggagggtggtgagggagccatgctgctgaattctggttggcatttccccattatgtaaaatggggtgttgggtagggcagactctgcttgggtttggttgtaagataaacctggaggagaagcacagttgtcccattgaattatttgagcaaaaactactgtaaataacttttttgtcttttgtcaaataaaatttttttttgtttttttaagcagaaacagggttcttgattgatccaccagggctcagggcccaggcttgaagacaaagcagtcactggcttcttattttgctttacatcttttactctccctctagtagccagctgtgagttctgtgcacgctgtacccccattccctttcaccagctccattctgtatcccattcaactcagggtaaagggggcatttgcatctcacattgg

SEQ ID NO: 28289 - protein, 32 aa, Homo sapiens [sequence omitted]

SEQ ID NO: 28290 - DNA, 361 bp, Homo sapiens
gggctagtcattcttccaacattctgtgacagattcattagtttgtcttctgaactacatgccagcagggagtctgtaaaagaggttttgtaacaatggtacacttccaaaccagtcagtttggaagctcttggccctctgaagtttccctgaaaatcagtgatatgaggcagattgattaccaggaaaaaaggcatacaatttgatttaacgtgtatacacaggagtcttcagaatgaagacccagctccccaactccccaataaggtacagaagcttcttttttttttttttagatggagtttcgcgcttgaacccgggaggtggaggttgcagtgagcagagaccgtgccgtctcaaa

SEQ ID NO: 28291 - protein, 41 aa, Homo sapiens
MKTQLPNSPIRYRSFFFFFLDGVSRLNPGGGGCSEQRPCRL

SEQ ID NO: 28292 - DNA, 978 bp, Homo sapiens
gggcgcgcgacactgcaccgcccctcccttcgcggcgcctgctctgtagagccggcggaaccgggtagcttggccaggttgtgaggaaccgcagcgcgccgcaggaccgggccgctgagcctgcagccgccccgcgccgtgacctgcgaccctagaccccgactccctttggctcagcccgcgcgccccaggcccggcccgggcggcgcgacgggaggatgagcggcgggcggcggaaggaggagccgcctcagccgcagctggccaacggggccctcaaagtctccgtctggagtaaggtgctgcggagcgacgcggcctgggaggataaggatgaatttttagatgtgatctactggttccgacagatcattgctgtggtcctgggtgtcatttggggagttttgccattacgagggttcttgggaatagcaggattctgcctgatcaatgcaggagtcctgtacctctacttcagcaattacctacagattgatgaggaagaatatggtggcacgtgggagctcacgaaggaagggtttatgacctcttttgccttgttcatggtcatttggatcatcttttacactgccatccattatgactgatggtgtacagctcccaagtgctccctatccagtccaaaggaccctcttgattacagcacaggaacttgatcgttggggaaccccagccccttggaacttggaagacccgtgtttcctggaccgcgaatcagtgtgttgggcatcagtgttttctgcaagggttgtgacctgaaactttttaaaaaccacccacctttggggaagcatttctgaatttatccatcaccaaccatttcttcttggataccatcaagtaacagctattatttgccaagtggagctgtcatttaatttgatgcacctctggattcagatgaaacattaaattgtcttcctcgattctccatcgggtgtagagtttttaaactat

SEQ ID NO: 28293 - protein, 129 aa, Homo sapiens; identical to SEQ ID NO: 3875

SEQ ID NO: 28294 - DNA, 1112 bp, Homo sapiens
gggcgcgcgacactgcaccgcccctcccttcgcggcgcctgctctgtagagccggcggaaccgggtagcttggccaggttgtgaggaaccgcagcgcgccgcaggaccgggccgctgagcctgcagccgccccgcgccgtgacctgcgaccctagaccccgactccctttggctcagcccgcgcgccccaggcccggcccgggcggcgcgacgggaggatgagcggcgggcggcggaaggaggagccgcctcagccgcagctggccaacggggccctcaaagtctccgtctggagtaaggtgctgcggagcgacgcggcctgggaggataaggatgaatttttagatgtgatctactggttccgacagatcattgctgtggtcctgggtgtcatttggggagttttgccattacgagggttcttgggaatagcaggattctgcctgatcaatgcaggagtcctgtacctctacttcagcaattacctacagattgatgaggaagaatatggtggcacgtgggagctcacgaaggaagggtttatgacctcttttgccttgttcatggtcatttggatcatcttttacactgccatccattatgactgatggtgtacagctcccaagtgctccctatccagtccaaaggaccctcttgattacagcacaggaacttgatcgttggggaaccccagccccttggaacttggaagacccgtgtttcctggaccgcgaatcagtgtgttgggcatcagtgttttctgcaagggttgtgacctgaaactttttaaaaaccacccacctttggggaagcatttctgaatttatccatcaccaaccatttcttcttggataccatcaagtaacagctattatttgccaagtggagctgtcatttaatttgatgcacctctggattcagatgaaacattaaattgtcttcctcgattctccatcgggtgtagagtttttaaactatcaatggcatttcaagtcttctgaaacagcatggctgtatgtgcgtggtccatagcacagtacatgcagcatctaataagagtttccattgtagaatgttttcacatacttgaataaatcaaatctttaattgag

SEQ ID NO: 28295 - protein, 129 aa, Homo sapiens; identical to SEQ ID NO: 3875

SEQ ID NO: 28296 - DNA, 1943 bp, Homo sapiens
gggcgcgcgacactgcaccgcccctcccttcgcggcgcctgctctgtagagccggcggaaccgggtagcttggccaggttgtgaggaaccgcagcgcgccgcaggaccgggccgctgagcctgcagccgccccgcgccgtgacctgcgaccctagaccccgactccctttggctcagcccgcgcgccccaggcccggcccgggcggcgcgacgggaggatgagcggcgggcggcggaaggaggagccgcctcagccgcagctggccaacggggccctcaaagtctccgtctggagtaaggtgctgcggagcgacgcggcctgggaggataaggatgaatttttagatgtgatctactggttccgacagatcattgctgtggtcctgggtgtcatttggggagttttgccattacgagggttcttgggaatagcaggattctgcctgatcaatgcaggagtcctgtacctctacttcagcaattacctacagattgatgaggaagaatatggtggcacgtgggagctcacgaaggaagggtttatgacctcttttgccttgttcatggtcatttggatcatcttttacactgccatccattatgactgatggtgtacagctcccaagtgctccctatccagtccaaaggaccctcttgattacagcacaggaacttgatcgttggggaaccccagccccttggaacttggaagacccgtgtttcctggaccgcgaatcagtgtgttgggcatcagtgttttctgcaagggttgtgacctgaaactttttaaaaaccacccacctttggggaagcatttctgaatttatccatcaccaaccatttcttcttggataccatcaagtaacagctattatttgccaagtggagctgtcatttaatttgatgcacctctggattcagatgaaacattaaattgtcttcctcgattctccatcgggtgtagagtttttaaactatcaatggcatttcaagtcttctgaaacagcatggctgtatgtgcgtggtccatagcacagtacatgcagcatctaataagagtttccattgtagaatgttttcacatacttgaataaatcaaatctttaattgagaacctgttgatgatacctgataaagcctttcccaccccacctgtagcttgggaaccagtaggagcactggagggggtgcctcccaccccatccctctttcttcctctccctgatcccttagcggatccagcagacctctttctgtttatggaggcagcagggaaatcaagggctggatttggtgtaggctgtggtctccgtcttggcattgtggagagagggcttagcaccttctgatgcccctgcccagcactgaggtgcctggcctcactgcagtgtgctagacttaagaggtgttattttttattcggccacaagatggcaaggccagtgtgctagggaatggtaagccacaaaatgaaatagagatctgagagctaggctgggtgccgtggctcacacctgtaatcccagcactttgggaggccaaggtgggtggatcacctgaggtcaggagttcgacaccagcctggccaatgtggtgaaaccccatgtctactaaaaatacaaaaaaattagccaggcatggtggtgtacgcctgtaatcccagctattctggaggctgaggcaggagaattgtttgaatccaggagatggaggttgcagtgagctgagatcgtgccattgcactccagcatgggcaacagggcaagactccgtctcaaaaaaaagaaaaagagctggggctgttgtcctcaatgggggacatttgaggacctagactgtccgaagtctttctctttgctctggaggtcacatagagcctggaccatccaagatctgctgctacggtaagacatcatctcagctttcctttcccttctaggcca

SEQ ID NO: 28297 - protein, 129 aa, Homo sapiens; identical to SEQ ID NO: 3875

SEQ ID NO: 28298 - DNA, 818 bp, Homo sapiens
cgcggcgcctgctctgtagagccggcggaaccgggtagcttggccaggttgtgaggaaccgcagcgcgccgcaggaccgggccgctgagcctgcagccgccccgcgccgtgacctgcgaccctagaccccgactccctttggctcagcccgcgcgccccaggcccggcccgggcggcgcgacgggaggatgagcggcgggcggcggaaggaggagccgcctcagccgcagctggccaacggggccctcaaagtctccgtctggagtaaggtgctgcggagcgacgcggcctgggaggataaggatgaatttttagatgtgatctactggttccgacagatcattgctgtggtcctgggtgtcatttggggagttttgccattacgagggttcttgggaatagcagggtcatttggatcatcttttacactgccatccattatgactgatggtgtacagctcccaagtgctccctatccagtccaaaggaccctcttgattacagcacaggaacttgatcgttggggaaccccagccccttggaacttggaagacccgtgtttcctggaccgcgaatcagtgtgttgggcatcagtgttttctgcaagggttgtgacctgaaactttttaaaaaccacccacctttggggaagcatttctgaatttatccatcaccaaccatttcttcttggataccatcaagtaacagctattatttgccaagtggagctgtcatttaatttgatgcacctctggattcagatgaaacattaaattgtcttcctcgattctccatcgggtgtagagtttttaaactat

SEQ ID NO: 28299 - protein, 143 aa, Homo sapiens; identical to SEQ ID NO: 3877

SEQ ID NO: 28300 - DNA, 929 bp, Homo sapiens
cgcggcgcctgctctgtagagccggcggaaccgggtagcttggccaggttgtgaggaaccgcagcgcgccgcaggaccgggccgctgagcctgcagccgccccgcgccgtgacctgcgaccctagaccccgactccctttggctcagcccgcgcgccccaggcccggcccgggcggcgcgacgggaggatgagcggcgggcggcggaaggaggagccgcctcagccgcagctggccaacggggccctcaaagtctccgtctggagtaaggtgctgcggagcgacgcggcctgggaggataaggatgaatttttagatgtgatctactggttccgacagatcattgctgtggtcctgggtgtcatttggggagttttgccattacgagggttcttgggaatagcagggaaaggccattgctgctctggagctgtgtgtgtgtgtgatgactaaagcaaagaagcagccctacagtggcactcctgggtctggtgcaccactcctcaggagcatctcaggtcatttggatcatcttttacactgccatccattatgactgatggtgtacagctcccaagtgctccctatccagtccaaaggaccctcttgattacagcacaggaacttgatcgttggggaaccccagccccttggaacttggaagacccgtgtttcctggaccgcgaatcagtgtgttgggcatcagtgttttctgcaagggttgtgacctgaaactttttaaaaaccacccacctttggggaagcatttctgaatttatccatcaccaaccatttcttcttggataccatcaagtaacagctattatttgccaagtggagctgtcatttaatttgatgcacctctggattcagatgaaacattaaattgtcttcctcgattctccatcgggtgtagagtttttaaactat

SEQ ID NO: 28301 - protein, 87 aa, Homo sapiens
MSGGRRKEEPPQPQLANGALKVSVWSKVLRSDAAWEDKDEFLDVIYWFRQIIAVVLGVIWGVLPLRGFLGIAGKGHCCSGAVCVCDD

SEQ ID NO: 28302 - DNA, 1059 bp, Homo sapiens
cgcggcgcctgctctgtagagccggcggaaccgggtagcttggccaggttgtgaggaaccgcagcgcgccgcaggaccgggccgctgagcctgcagccgccccgcgccgtgacctgcgaccctagaccccgactccctttggctcagcccgcgcgccccaggcccggcccgggcggcgcgacgggaggatgagcggcgggcggcggaaggaggagccgcctcagccgcagctggccaacggggccctcaaagtctccgtctggagtaaggtgctgcggagcgacgcggcctgggaggataaggatgaatttttagatgtgatctactggttccgacagatcattgctgtggtcctgggtgtcatttggggagttttgccattacgagggttcttgggaatagcagggaaaggccattgctgctctggagctgtgtgtgtgtgtgatgactaaagcaaagaagcagccctacagtggcactcctgggtctggtgcaccactcctcaggagcatctcagattctgcctgatcaatgcaggagtcctgtacctctacttcagcaattacctacagattgatgaggaagaatatggtggcacgtgggagctcacgaaggaagggtttatgacctcttttgccttgttcatggtcatttggatcatcttttacactgccatccattatgactgatggtgtacagctcccaagtgctccctatccagtccaaaggaccctcttgattacagcacaggaacttgatcgttggggaaccccagccccttggaacttggaagacccgtgtttcctggaccgcgaatcagtgtgttgggcatcagtgttttctgcaagggttgtgacctgaaactttttaaaaaccacccacctttggggaagcatttctgaatttatccatcaccaaccatttcttcttggataccatcaagtaacagctattatttgccaagtggagctgtcatttaatttgatgcacctctggattcagatgaaacattaaattgtcttcctcgattctccatcgggtgtagagtttttaaactat

SEQ ID NO: 28303 - protein, 87 aa, Homo sapiens; identical to SEQ ID NO: 28301

SEQ ID NO: 28304 - DNA, 952 bp, Homo sapiens
cgcggcgcctgctctgtagagccggcggaaccgggtagcttggccaggttgtgaggaaccgcagcgcgccgcaggaccgggccgctgagcctgcagccgccccgcgccgtgacctgcgaccctagaccccgactccctttggctcagcccgcgcgccccaggcccggcccgggcggcgcgacgggaggatgagcggcgggcggcggaaggaggagccgcctcagccgcagctggccaacggggccctcaaagtctccgtctggagtaaggtgctgcggagcgacgcggcctgggaggataaggatgaatttttagatgtgatctactggttccgacagatcattgctgtggtcctgggtgtcatttggggagttttgccattacgagggttcttgggaatagcagggtcatttggatcatcttttacactgccatccattatgactgatggtgtacagctcccaagtgctccctatccagtccaaaggaccctcttgattacagcacaggaacttgatcgttggggaaccccagccccttggaacttggaagacccgtgtttcctggaccgcgaatcagtgtgttgggcatcagtgttttctgcaagggttgtgacctgaaactttttaaaaaccacccacctttggggaagcatttctgaatttatccatcaccaaccatttcttcttggataccatcaagtaacagctattatttgccaagtggagctgtcatttaatttgatgcacctctggattcagatgaaacattaaattgtcttcctcgattctccatcgggtgtagagtttttaaactatcaatggcatttcaagtcttctgaaacagcatggctgtatgtgcgtggtccatagcacagtacatgcagcatctaataagagtttccattgtagaatgttttcacatacttgaataaatcaaatctttaattgag

SEQ ID NO: 28305 - protein, 143 aa, Homo sapiens; identical to SEQ ID NO: 3877

SEQ ID NO: 28306 - DNA, 1063 bp, Homo sapiens
cgcggcgcctgctctgtagagccggcggaaccgggtagcttggccaggttgtgaggaaccgcagcgcgccgcaggaccgggccgctgagcctgcagccgccccgcgccgtgacctgcgaccctagaccccgactccctttggctcagcccgcgcgccccaggcccggcccgggcggcgcgacgggaggatgagcggcgggcggcggaaggaggagccgcctcagccgcagctggccaacggggccctcaaagtctccgtctggagtaaggtgctgcggagcgacgcggcctgggaggataaggatgaatttttagatgtgatctactggttccgacagatcattgctgtggtcctgggtgtcatttggggagttttgccattacgagggttcttgggaatagcagggaaaggccattgctgctctggagctgtgtgtgtgtgtgatgactaaagcaaagaagcagccctacagtggcactcctgggtctggtgcaccactcctcaggagcatctcaggtcatttggatcatcttttacactgccatccattatgactgatggtgtacagctcccaagtgctccctatccagtccaaaggaccctcttgattacagcacaggaacttgatcgttggggaaccccagccccttggaacttggaagacccgtgtttcctggaccgcgaatcagtgtgttgggcatcagtgttttctgcaagggttgtgacctgaaactttttaaaaaccacccacctttggggaagcatttctgaatttatccatcaccaaccatttcttcttggataccatcaagtaacagctattatttgccaagtggagctgtcatttaatttgatgcacctctggattcagatgaaacattaaattgtcttcctcgattctccatcgggtgtagagtttttaaactatcaatggcatttcaagtcttctgaaacagcatggctgtatgtgcgtggtccatagcacagtacatgcagcatctaataagagtttccattgtagaatgttttcacatacttgaataaatcaaatctttaattgag

SEQ ID NO: 28307 - protein, 87 aa, Homo sapiens; identical to SEQ ID NO: 28301

SEQ ID NO: 28308 - DNA, 1193 bp, Homo sapiens
cgcggcgcctgctctgtagagccggcggaaccgggtagcttggccaggttgtgaggaaccgcagcgcgccgcaggaccgggccgctgagcctgcagccgccccgcgccgtgacctgcgaccctagaccccgactccctttggctcagcccgcgcgccccaggcccggcccgggcggcgcgacgggaggatgagcggcgggcggcggaaggaggagccgcctcagccgcagctggccaacggggccctcaaagtctccgtctggagtaaggtgctgcggagcgacgcggcctgggaggataaggatgaatttttagatgtgatctactggttccgacagatcattgctgtggtcctgggtgtcatttggggagttttgccattacgagggttcttgggaatagcagggaaaggccattgctgctctggagctgtgtgtgtgtgtgatgactaaagcaaagaagcagccctacagtggcactcctgggtctggtgcaccactcctcaggagcatctcagattctgcctgatcaatgcaggagtcctgtacctctacttcagcaattacctacagattgatgaggaagaatatggtggcacgtgggagctcacgaaggaagggtttatgacctcttttgccttgttcatggtcatttggatcatcttttacactgccatccattatgactgatggtgtacagctcccaagtgctccctatccagtccaaaggaccctcttgattacagcacaggaacttgatcgttggggaaccccagccccttggaacttggaagacccgtgtttcctggaccgcgaatcagtgtgttgggcatcagtgttttctgcaagggttgtgacctgaaactttttaaaaaccacccacctttggggaagcatttctgaatttatccatcaccaaccatttcttcttggataccatcaagtaacagctattatttgccaagtggagctgtcatttaatttgatgcacctctggattcagatgaaacattaaattgtcttcctcgattctccatcgggtgtagagtttttaaactatcaatggcatttcaagtcttctgaaacagcatggctgtatgtgcgtggtccatagcacagtacatgcagcatctaataagagtttccattgtagaatgttttcacatacttgaataaatcaaatctttaattgag

SEQ ID NO: 28309 - protein, 87 aa, Homo sapiens; identical to SEQ ID NO: 28301

SEQ ID NO: 28310 - DNA, 1783 bp, Homo sapiens
cgcggcgcctgctctgtagagccggcggaaccgggtagcttggccaggttgtgaggaaccgcagcgcgccgcaggaccgggccgctgagcctgcagccgccccgcgccgtgacctgcgaccctagaccccgactccctttggctcagcccgcgcgccccaggcccggcccgggcggcgcgacgggaggatgagcggcgggcggcggaaggaggagccgcctcagccgcagctggccaacggggccctcaaagtctccgtctggagtaaggtgctgcggagcgacgcggcctgggaggataaggatgaatttttagatgtgatctactggttccgacagatcattgctgtggtcctgggtgtcatttggggagttttgccattacgagggttcttgggaatagcagggtcatttggatcatcttttacactgccatccattatgactgatggtgtacagctcccaagtgctccctatccagtccaaaggaccctcttgattacagcacaggaacttgatcgttggggaaccccagccccttggaacttggaagacccgtgtttcctggaccgcgaatcagtgtgttgggcatcagtgttttctgcaagggttgtgacctgaaactttttaaaaaccacccacctttggggaagcatttctgaatttatccatcaccaaccatttcttcttggataccatcaagtaacagctattatttgccaagtggagctgtcatttaatttgatgcacctctggattcagatgaaacattaaattgtcttcctcgattctccatcgggtgtagagtttttaaactatcaatggcatttcaagtcttctgaaacagcatggctgtatgtgcgtggtccatagcacagtacatgcagcatctaataagagtttccattgtagaatgttttcacatacttgaataaatcaaatctttaattgagaacctgttgatgatacctgataaagcctttcccaccccacctgtagcttgggaaccagtaggagcactggagggggtgcctcccaccccatccctctttcttcctctccctgatcccttagcggatccagcagacctctttctgtttatggaggcagcagggaaatcaagggctggatttggtgtaggctgtggtctccgtcttggcattgtggagagagggcttagcaccttctgatgcccctgcccagcactgaggtgcctggcctcactgcagtgtgctagacttaagaggtgttattttttattcggccacaagatggcaaggccagtgtgctagggaatggtaagccacaaaatgaaatagagatctgagagctaggctgggtgccgtggctcacacctgtaatcccagcactttgggaggccaaggtgggtggatcacctgaggtcaggagttcgacaccagcctggccaatgtggtgaaaccccatgtctactaaaaatacaaaaaaattagccaggcatggtggtgtacgcctgtaatcccagctattctggaggctgaggcaggagaattgtttgaatccaggagatggaggttgcagtgagctgagatcgtgccattgcactccagcatgggcaacagggcaagactccgtctcaaaaaaaagaaaaagagctggggctgttgtcctcaatgggggacatttgaggacctagactgtccgaagtctttctctttgctctggaggtcacatagagcctggaccatccaagatctgctgctacggtaagacatcatctcagctttcctttcccttctaggcca

SEQ ID NO: 28311 - protein, 143 aa, Homo sapiens; identical to SEQ ID NO: 3877

SEQ ID NO: 28312 - DNA, 1894 bp, Homo sapiens
cgcggcgcctgctctgtagagccggcggaaccgggtagcttggccaggttgtgaggaaccgcagcgcgccgcaggaccgggccgctgagcctgcagccgccccgcgccgtgacctgcgaccctagaccccgactccctttggctcagcccgcgcgccccaggcccggcccgggcggcgcgacgggaggatgagcggcgggcggcggaaggaggagccgcctcagccgcagctggccaacggggccctcaaagtctccgtctggagtaaggtgctgcggagcgacgcggcctgggaggataaggatgaatttttagatgtgatctactggttccgacagatcattgctgtggtcctgggtgtcatttggggagttttgccattacgagggttcttgggaatagcagggaaaggccattgctgctctggagctgtgtgtgtgtgtgatgactaaagcaaagaagcagccctacagtggcactcctgggtctggtgcaccactcctcaggagcatctcaggtcatttggatcatcttttacactgccatccattatgactgatggtgtacagctcccaagtgctccctatccagtccaaaggaccctcttgattacagcacaggaacttgatcgttggggaaccccagccccttggaacttggaagacccgtgtttcctggaccgcgaatcagtgtgttgggcatcagtgttttctgcaagggttgtgacctgaaactttttaaaaaccacccacctttggggaagcatttctgaatttatccatcaccaaccatttcttcttggataccatcaagtaacagctattatttgccaagtggagctgtcatttaatttgatgcacctctggattcagatgaaacattaaattgtcttcctcgattctccatcgggtgtagagtttttaaactatcaatggcatttcaagtcttctgaaacagcatggctgtatgtgcgtggtccatagcacagtacatgcagcatctaataagagtttccattgtagaatgttttcacatacttgaataaatcaaatctttaattgagaacctgttgatgatacctgataaagcctttcccaccccacctgtagcttgggaaccagtaggagcactggagggggtgcctcccaccccatccctctttcttcctctccctgatcccttagcggatccagcagacctctttctgtttatggaggcagcagggaaatcaagggctggatttggtgtaggctgtggtctccgtcttggcattgtggagagagggcttagcaccttctgatgcccctgcccagcactgaggtgcctggcctcactgcagtgtgctagacttaagaggtgttattttttattcggccacaagatggcaaggccagtgtgctagggaatggtaagccacaaaatgaaatagagatctgagagctaggctgggtgccgtggctcacacctgtaatcccagcactttgggaggccaaggtgggtggatcacctgaggtcaggagttcgacaccagcctggccaatgtggtgaaaccccatgtctactaaaaatacaaaaaaattagccaggcatggtggtgtacgcctgtaatcccagctattctggaggctgaggcaggagaattgtttgaatccaggagatggaggttgcagtgagctgagatcgtgccattgcactccagcatgggcaacagggcaagactccgtctcaaaaaaaagaaaaagagctggggctgttgtcctcaatgggggacatttgaggacctagactgtccgaagtctttctctttgctctggaggtcacatagagcctggaccatccaagatctgctgctacggtaagacatcatctcagctttcctttcccttctaggcca

SEQ ID NO: 28313 - protein, 87 aa, Homo sapiens; identical to SEQ ID NO: 28301

SEQ ID NO: 28314 - DNA, 2024 bp, Homo sapiens
cgcggcgcctgctctgtagagccggcggaaccgggtagcttggccaggttgtgaggaaccgcagcgcgccgcaggaccgggccgctgagcctgcagccgccccgcgccgtgacctgcgaccctagaccccgactccctttggctcagcccgcgcgccccaggcccggcccgggcggcgcgacgggaggatgagcggcgggcggcggaaggaggagccgcctcagccgcagctggccaacggggccctcaaagtctccgtctggagtaaggtgctgcggagcgacgcggcctgggaggataaggatgaatttttagatgtgatctactggttccgacagatcattgctgtggtcctgggtgtcatttggggagttttgccattacgagggttcttgggaatagcagggaaaggccattgctgctctggagctgtgtgtgtgtgtgatgactaaagcaaagaagcagccctacagtggcactcctgggtctggtgcaccactcctcaggagcatctcagattctgcctgatcaatgcaggagtcctgtacctctacttcagcaattacctacagattgatgaggaagaatatggtggcacgtgggagctcacgaaggaagggtttatgacctcttttgccttgttcatggtcatttggatcatcttttacactgccatccattatgactgatggtgtacagctcccaagtgctccctatccagtccaaaggaccctcttgattacagcacaggaacttgatcgttggggaaccccagccccttggaacttggaagacccgtgtttcctggaccgcgaatcagtgtgttgggcatcagtgttttctgcaagggttgtgacctgaaactttttaaaaaccacccacctttggggaagcatttctgaatttatccatcaccaaccatttcttcttggataccatcaagtaacagctattatttgccaagtggagctgtcatttaatttgatgcacctctggattcagatgaaacattaaattgtcttcctcgattctccatcgggtgtagagtttttaaactatcaatggcatttcaagtcttctgaaacagcatggctgtatgtgcgtggtccatagcacagtacatgcagcatctaataagagtttccattgtagaatgttttcacatacttgaataaatcaaatctttaattgagaacctgttgatgatacctgataaagcctttcccaccccacctgtagcttgggaaccagtaggagcactggagggggtgcctcccaccccatccctctttcttcctctccctgatcccttagcggatccagcagacctctttctgtttatggaggcagcagggaaatcaagggctggatttggtgtaggctgtggtctccgtcttggcattgtggagagagggcttagcaccttctgatgcccctgcccagcactgaggtgcctggcctcactgcagtgtgctagacttaagaggtgttattttttattcggccacaagatggcaaggccagtgtgctagggaatggtaagccacaaaatgaaatagagatctgagagctaggctgggtgccgtggctcacacctgtaatcccagcactttgggaggccaaggtgggtggatcacctgaggtcaggagttcgacaccagcctggccaatgtggtgaaaccccatgtctactaaaaatacaaaaaaattagccaggcatggtggtgtacgcctgtaatcccagctattctggaggctgaggcaggagaattgtttgaatccaggagatggaggttgcagtgagctgagatcgtgccattgcactccagcatgggcaacagggcaagactccgtctcaaaaaaaagaaaaagagctggggctgttgtcctcaatgggggacatttgaggacctagactgtccgaagtctttctctttgctctggaggtcacatagagcctggaccatccaagatctgctgctacggtaagacatcatctcagctttcctttcccttctaggcca

SEQ ID NO: 28315 - protein, 87 aa, Homo sapiens; identical to SEQ ID NO: 28301

SEQ ID NO: 28316 - DNA, 585 bp, Homo sapiens
cctgctctgtagagccggcggaaccgggtagcttggccaggttgtgaggaaccgcagcgcgccgcaggaccgggccgctgagcctgcagccgccccgcgccgtgacctgcgaccctagaccccgactccctttggctcagcccgcgcgccccaggcccggcccgggcggcgcgacgggaggatgagcggcgggcggcggaaggaggagccgcctcagccgcagctggccaacggggccctcaaagtctccgtctggagtaaggtgctgcggagcgacgcggcctgggaggataaggatgaatttttagatgtgatctactggttccgacagatcattgctgtggtcctgggtgtcatttggggagttttgccattacgagggttcttgggaatagcagggtaagtcttgggtatcttatattttcatggtatcatttctttttaaatagaggctttttttcctgttacaggaaaggccattgctgctctggagctgtgtgtgtgtgtgatgactaaagcaaagaagcagccctacagtggcactcctgggtctggtgcaccactcctcaggagcatctcaggtca

SEQ ID NO: 28317 - protein, 73 aa, Homo sapiens
MSGGRRKEEPPQPQLANGALKVSVWSKVLRSDAAWEDKDEFLDVIYWFRQIIAVVLGVIWGVLPLRGFLGIAG

SEQ ID NO: 28318 - DNA, 877 bp, Homo sapiens
cctgctctgtagagccggcggaaccgggtagcttggccaggttgtgaggaaccgcagcgcgccgcaggaccgggccgctgagcctgcagccgccccgcgccgtgacctgcgaccctagaccccgactccctttggctcagcccgcgcgccccaggcccggcccgggcggcgcgacgggaggatgagcggcgggcggcggaaggaggagccgcctcagccgcagctggccaacggggccctcaaagtctccgtctggagtaaggtgctgcggagcgacgcggcctgggaggataaggatgaatttttagatgtgatctactggttccgacagatcattgctgtggtcctgggtgtcatttggggagttttgccattaccaattacctacagattgatgaggaagaatatggtggcacgtgggagctcacgaaggaagggtttatgacctcttttgccttgttcatggtcatttggatcatcttttacactgccatccattatgactgatggtgtacagctcccaagtgctccctatccagtccaaaggaccctcttgattacagcacaggaacttgatcgttggggaaccccagccccttggaacttggaagacccgtgtttcctggaccgcgaatcagtgtgttgggcatcagtgttttctgcaagggttgtgacctgaaactttttaaaaaccacccacctttggggaagcatttctgaatttatccatcaccaaccatttcttcttggataccatcaagtaacagctattatttgccaagtggagctgtcatttaatttgatgcacctctggattcagatgaaacattaaattgtcttcctcgattctccatcgggtgtagagtttttaaactat

SEQ ID NO: 28319 - protein, 87 aa, Homo sapiens
MSGGRRKEEPPQPQLANGALKVSVWSKVLRSDAAWEDKDEFLDVIYWFRQIIAVVLGVIWGVLPLPITYRLMRKNMVARGSSRRKGL

SEQ ID NO: 28320 - DNA, 1011 bp, Homo sapiens
cctgctctgtagagccggcggaaccgggtagcttggccaggttgtgaggaaccgcagcgcgccgcaggaccgggccgctgagcctgcagccgccccgcgccgtgacctgcgaccctagaccccgactccctttggctcagcccgcgcgccccaggcccggcccgggcggcgcgacgggaggatgagcggcgggcggcggaaggaggagccgcctcagccgcagctggccaacggggccctcaaagtctccgtctggagtaaggtgctgcggagcgacgcggcctgggaggataaggatgaatttttagatgtgatctactggttccgacagatcattgctgtggtcctgggtgtcatttggggagttttgccattaccaattacctacagattgatgaggaagaatatggtggcacgtgggagctcacgaaggaagggtttatgacctcttttgccttgttcatggtcatttggatcatcttttacactgccatccattatgactgatggtgtacagctcccaagtgctccctatccagtccaaaggaccctcttgattacagcacaggaacttgatcgttggggaaccccagccccttggaacttggaagacccgtgtttcctggaccgcgaatcagtgtgttgggcatcagtgttttctgcaagggttgtgacctgaaactttttaaaaaccacccacctttggggaagcatttctgaatttatccatcaccaaccatttcttcttggataccatcaagtaacagctattatttgccaagtggagctgtcatttaatttgatgcacctctggattcagatgaaacattaaattgtcttcctcgattctccatcgggtgtagagtttttaaactatcaatggcatttcaagtcttctgaaacagcatggctgtatgtgcgtggtccatagcacagtacatgcagcatctaataagagtttccattgtagaatgttttcacatacttgaataaatcaaatctttaattgag

SEQ ID NO: 28321 - protein, 87 aa, Homo sapiens; identical to SEQ ID NO: 28319

SEQ ID NO: 28322 - DNA, 1842 bp, Homo sapiens
cctgctctgtagagccggcggaaccgggtagcttggccaggttgtgaggaaccgcagcgcgccgcaggaccgggccgctgagcctgcagccgccccgcgccgtgacctgcgaccctagaccccgactccctttggctcagcccgcgcgccccaggcccggcccgggcggcgcgacgggaggatgagcggcgggcggcggaaggaggagccgcctcagccgcagctggccaacggggccctcaaagtctccgtctggagtaaggtgctgcggagcgacgcggcctgggaggataaggatgaatttttagatgtgatctactggttccgacagatcattgctgtggtcctgggtgtcatttggggagttttgccattaccaattacctacagattgatgaggaagaatatggtggcacgtgggagctcacgaaggaagggtttatgacctcttttgccttgttcatggtcatttggatcatcttttacactgccatccattatgactgatggtgtacagctcccaagtgctccctatccagtccaaaggaccctcttgattacagcacaggaacttgatcgttggggaaccccagccccttggaacttggaagacccgtgtttcctggaccgcgaatcagtgtgttgggcatcagtgttttctgcaagggttgtgacctgaaactttttaaaaaccacccacctttggggaagcatttctgaatttatccatcaccaaccatttcttcttggataccatcaagtaacagctattatttgccaagtggagctgtcatttaatttgatgcacctctggattcagatgaaacattaaattgtcttcctcgattctccatcgggtgtagagtttttaaactatcaatggcatttcaagtcttctgaaacagcatggctgtatgtgcgtggtccatagcacagtacatgcagcatctaataagagtttccattgtagaatgttttcacatacttgaataaatcaaatctttaattgagaacctgttgatgatacctgataaagcctttcccaccccacctgtagcttgggaaccagtaggagcactggagggggtgcctcccaccccatccctctttcttcctctccctgatcccttagcggatccagcagacctctttctgtttatggaggcagcagggaaatcaagggctggatttggtgtaggctgtggtctccgtcttggcattgtggagagagggcttagcaccttctgatgcccctgcccagcactgaggtgcctggcctcactgcagtgtgctagacttaagaggtgttattttttattcggccacaagatggcaaggccagtgtgctagggaatggtaagccacaaaatgaaatagagatctgagagctaggctgggtgccgtggctcacacctgtaatcccagcactttgggaggccaaggtgggtggatcacctgaggtcaggagttcgacaccagcctggccaatgtggtgaaaccccatgtctactaaaaatacaaaaaaattagccaggcatggtggtgtacgcctgtaatcccagctattctggaggctgaggcaggagaattgtttgaatccaggagatggaggttgcagtgagctgagatcgtgccattgcactccagcatgggcaacagggcaagactccgtctcaaaaaaaagaaaaagagctggggctgttgtcctcaatgggggacatttgaggacctagactgtccgaagtctttctctttgctctggaggtcacatagagcctggaccatccaagatctgctgctacggtaagacatcatctcagctttcctttcccttctaggcca

SEQ ID NO: 28323 - protein, 87 aa, Homo sapiens; identical to SEQ ID NO: 28319

SEQ ID NO: 28324 - DNA, 771 bp, Homo sapiens
gtcatttggggagttttgccattacgagggttcttgggaatagcagggtaagtcttgggtatcttatattttcatggtatcatttctttttaaatagaggctttttttcctgttacaggaaaggccattgctgctctggagctgtgtgtgtgtgtgatgactaaagcaaagaagcagccctacagtggcactcctgggtctggtgcaccactcctcaggagcatctcagattctgcctgatcaatgcaggagtcctgtacctctacttcagcaattacctacagattgatgaggaagaatatggtggcacgtgggagctcacgaaggaagggtttatgacctcttttgccttgttcatggtcatttggatcatcttttacactgccatccattatgactgatggtgtacagctcccaagtgctccctatccagtccaaaggaccctcttgattacagcacaggaacttgatcgttggggaaccccagccccttggaacttggaagacccgtgtttcctggaccgcgaatcagtgtgttgggcatcagtgttttctgcaagggttgtgacctgaaactttttaaaaaccacccacctttggggaagcatttctgaatttatccatcaccaaccatttcttcttggataccatcaagtaacagctattatttgccaagtggagctgtcatttaatttgatgcacctctggattcagatgaaacattaaattgtcttcctcgattctccatcgggtgtagagtttttaaactat

SEQ ID NO: 28325 - protein, 59 aa, Homo sapiens
MTDGVQLPSAPYPVQRTLLITAQELDRWGTPAPWNLEDPCFLDRESVCWASVFSARVVT

SEQ ID NO: 28326 - DNA, 905 bp, Homo sapiens
gtcatttggggagttttgccattacgagggttcttgggaatagcagggtaagtcttgggtatcttatattttcatggtatcatttctttttaaatagaggctttttttcctgttacaggaaaggccattgctgctctggagctgtgtgtgtgtgtgatgactaaagcaaagaagcagccctacagtggcactcctgggtctggtgcaccactcctcaggagcatctcagattctgcctgatcaatgcaggagtcctgtacctctacttcagcaattacctacagattgatgaggaagaatatggtggcacgtgggagctcacgaaggaagggtttatgacctcttttgccttgttcatggtcatttggatcatcttttacactgccatccattatgactgatggtgtacagctcccaagtgctccctatccagtccaaaggaccctcttgattacagcacaggaacttgatcgttggggaaccccagccccttggaacttggaagacccgtgtttcctggaccgcgaatcagtgtgttgggcatcagtgttttctgcaagggttgtgacctgaaactttttaaaaaccacccacctttggggaagcatttctgaatttatccatcaccaaccatttcttcttggataccatcaagtaacagctattatttgccaagtggagctgtcatttaatttgatgcacctctggattcagatgaaacattaaattgtcttcctcgattctccatcgggtgtagagtttttaaactatcaatggcatttcaagtcttctgaaacagcatggctgtatgtgcgtggtccatagcacagtacatgcagcatctaataagagtttccattgtagaatgttttcacatacttgaataaatcaaatctttaattgag

SEQ ID NO: 28327 - protein, 59 aa, Homo sapiens; identical to SEQ ID NO: 28325

SEQ ID NO: 28328 - DNA, 1736 bp, Homo sapiens
gtcatttggggagttttgccattacgagggttcttgggaatagcagggtaagtcttgggtatcttatattttcatggtatcatttctttttaaatagaggctttttttcctgttacaggaaaggccattgctgctctggagctgtgtgtgtgtgtgatgactaaagcaaagaagcagccctacagtggcactcctgggtctggtgcaccactcctcaggagcatctcagattctgcctgatcaatgcaggagtcctgtacctctacttcagcaattacctacagattgatgaggaagaatatggtggcacgtgggagctcacgaaggaagggtttatgacctcttttgccttgttcatggtcatttggatcatcttttacactgccatccattatgactgatggtgtacagctcccaagtgctccctatccagtccaaaggaccctcttgattacagcacaggaacttgatcgttggggaaccccagccccttggaacttggaagacccgtgtttcctggaccgcgaatcagtgtgttgggcatcagtgttttctgcaagggttgtgacctgaaactttttaaaaaccacccacctttggggaagcatttctgaatttatccatcaccaaccatttcttcttggataccatcaagtaacagctattatttgccaagtggagctgtcatttaatttgatgcacctctggattcagatgaaacattaaattgtcttcctcgattctccatcgggtgtagagtttttaaactatcaatggcatttcaagtcttctgaaacagcatggctgtatgtgcgtggtccatagcacagtacatgcagcatctaataagagtttccattgtagaatgttttcacatacttgaataaatcaaatctttaattgagaacctgttgatgatacctgataaagcctttcccaccccacctgtagcttgggaaccagtaggagcactggagggggtgcctcccaccccatccctctttcttcctctccctgatcccttagcggatccagcagacctctttctgtttatggaggcagcagggaaatcaagggctggatttggtgtaggctgtggtctccgtcttggcattgtggagagagggcttagcaccttctgatgcccctgcccagcactgaggtgcctggcctcactgcagtgtgctagacttaagaggtgttattttttattcggccacaagatggcaaggccagtgtgctagggaatggtaagccacaaaatgaaatagagatctgagagctaggctgggtgccgtggctcacacctgtaatcccagcactttgggaggccaaggtgggtggatcacctgaggtcaggagttcgacaccagcctggccaatgtggtgaaaccccatgtctactaaaaatacaaaaaaattagccaggcatggtggtgtacgcctgtaatcccagctattctggaggctgaggcaggagaattgtttgaatccaggagatggaggttgcagtgagctgagatcgtgccattgcactccagcatgggcaacagggcaagactccgtctcaaaaaaaagaaaaagagctggggctgttgtcctcaatgggggacatttgaggacctagactgtccgaagtctttctctttgctctggaggtcacatagagcctggaccatccaagatctgctgctacggtaagacatcatctcagctttcctttcccttctaggcca

SEQ ID NO: 28329 - protein, 75 aa, Homo sapiens [sequence omitted]

SEQ ID NO: 28330 - DNA, 1410 bp, Homo sapiens
agcagactgtgcaacggatagcccctggagagtgccccgtgtttacattctcatctggcatttttgttttgtggaatcggcctgtgttaagccaggtgacctatgaacagtgcttgtctcctcactaggtcatttggatcatcttttacactgccatccattatgactgatggtgtacagctcccaagtgctccctatccagtccaaaggaccctcttgattacagcacaggaacttgatcgttggggaaccccagccccttggaacttggaagacccgtgtttcctggaccgcgaatcagtgtgttgggcatcagtgttttctgcaagggttgtgacctgaaactttttaaaaaccacccacctttggggaagcatttctgaatttatccatcaccaaccatttcttcttggataccatcaagtaacagctattatttgccaagtggagctgtcatttaatttgatgcacagcatggctgtatgtgcgtggtccatagcacagtacatgcagcatctaataagagtttccattgtagaatgttttcacatacttgaataaatcaaatctttaattgagaacctgttgatgatacctgataaagcctttcccaccccacctgtagcttgggaaccagtaggagcactggagggggtgcctcccaccccatccctctttcttcctctccctgatcccttagcggatccagcagacctctttctgtttatggaggcagcagggaaatcaagggctggatttggtgtaggctgtggtctccgtcttggcattgtggagagagggcttagcaccttctgatgcccctgcccagcactgaggtgcctggcctcactgcagtgtgctagacttaagaggtgttattttttattcggccacaagatggcaaggccagtgtgctagggaatggtaagccacaaaatgaaatagagatctgagagctaggctgggtgccgtggctcacacctgtaatcccagcactttgggaggccaaggtgggtggatcacctgaggtcaggagttcgacaccagcctggccaatgtggtgaaaccccatgtctactaaaaatacaaaaaaattagccaggcatggtggtgtacgcctgtaatcccagctattctggaggctgaggcaggagaattgtttgaatccaggagatggaggttgcagtgagctgagatcgtgccattgcactccagcatgggcaacagggcaagactccgtctcaaaaaaaagaaaaagagctggggctgttgtcctcaatgggggacatttgaggacctagactgtccgaagtctttctctttgctctggaggtcacatagagcctggaccatccaagatctgctgctacggtaagacatcatctcagctttcctttcccttctaggcca

SEQ ID NO: 28331 - protein, 31 aa, Homo sapiens [sequence omitted]

SEQ ID NO: 28332 - DNA, 3164 bp, Homo sapiens
tagagctccaaggaccccacgcctgtgtctctgtgacagagctcaaagggccctgggccttccctccctggctcggctgtgcttgggagggttccccagtccagaatccctaaggagcatggggcagctgatccatccctggtgtacaaactgctgactgcagacagatgctgagctacccaaaccaacacctagcctctccctgaagatcctcccaggctgagagagttctgggtgtcctaggaccaaggacactggcagacttccagaagggcccccaaagccctaacctgtccagccagagcatgcgtctcagcagagctgtcttcccaagcctttgatgacaaaccaatttccctcgatgatgtgcttctgagtgctctgctgaggaacaatgggaagtctgcccagcagaagaaaatctctgccaagcccaagcttgagttcctctgtccaaggccagggacctgtgaccatggaagcagagagaagcaaggccacagccgtggccctgggcagtttcccggcaggtggcccggccgagctgtcgctgagactcggggagccattgaccatcgtctctgaggatggagactggtggacggtgctgtctgaagtctcaggcagagagtataacatccccagcgtccacgtggccaaagtctcccatgggtggctgtatgagggcctgagcagggagaaagcagaggaactgctgttgttacctgggaaccctggaggggccttcctcatccgggagagccagaccaggagaggctcttactctctgtcagtccgcctcagccgccctgcatcctgggaccggatcagacactacaggatccactgccttgacaatggctggctgtacatctcaccgcgcctcaccttcccctcactccaggccctggtggaccattactctgagctggcggatgacatctgctgcctactcaaggagccctgtgtcctgcagagggctggcccgctccctggcaaggatatacccctacctgtgactgtgcagaggacaccactcaactggaaagagctggacagctccctcctgttttctgaagctgccacaggggaggagtctcttctcagtgagggtctccgggagtccctcagcttctacatcagcctgaatgacgaggctgtctctttggatgatgcctaggcccaaaggagaggccaaaagggaaaccaaggctgcacacctagaaccccaattcagcctcctgggcaccccagaggcaaggctgtgcactcagggagggagggtgggacacagaggtgcatctagggtcccacctgtacccttgctctttcctctcttagcccttagaagtcacctacttccttccagtgccatgatcccacctgcgacctctagtgcgagtgcagagaaggtgggaccagggccagggttccaaaaagagaataagcctcctggggggtctgacctagttagttcttgagtttggggtttccagtaccatctggatgccctgcctgttgagccccattctacatccccaccattaaccaggccccacccacaaggtagaaacaacccctagagtcaacgagaaagtcattttcagaaaatctacaagtctcgttgagaccaccaccatacctcagaaggtaggactgtggcctagaagggaaaggaaagctgagatgatgtcttaccgtagcagcagatcttggatggtccaggctctatgtgacctccagagcaaagagaaagacttcggacagtctaggtcctcaaatgtcccccattgaggacaacagccccagctctttttcttttttttgagacggagtcttgccctgttgcccatgctggagtgcaatggcacgatctcagctcactgcaacctccatctcctggattcaaacaattctcctgcctcagcctccagaatagctgggattacaggcgtacaccaccatgcctggctaatttttttgtatttttagtagacatggggtttcaccacattggccaggctggtgtcgaactcctgacctcaggtgatccacccaccttggcctcccaaagtgctgggattacaggtgtgagccacggcacccagcctagctctcagatctctatttcattttgtggcttaccattccctagcacactggccttgccatcttgtggccgaataaaaaataacacctcttaagtctagcacactgcagtgaggccaggcacctcagtgctgggcaggggcatcagaaggtgctaagccctctctccacaatgccaagacggagaccacagcctacaccaaatccagcccttgatttccctgctgcctccataaacagaaagaggtctgctggatccgctaagggatcagggagaggaagaaagagggatggggtgggaggcaccccctccagtgctcctactggttcccaagctacaggtggggtgggaaaggctttatcaggtatcatcaacaggttctcaattaaagatttgatttattcaagtatgtgaaaacattctacaatggaaactcttattagatgctgcatgtactgtgctatggaccacgcacatacagccatgctgtttcagaagacttgaaatgccattgatagtttaaaaactctacacccgatggagaatcgaggaagacaatttaatgtttcatctgaatccagaggtgcatcaaattaaatgacagctccacttggcaaataatagctgttacttgatggtatccaagaagaaatggttggtgatggataaattcagaaatgcttccccaaaggtgggtggtttttaaaaagtttcaggtcacaacccttgcagaaaacactgatgcccaacacactgattcgcggtccaggaaacacgggtcttccaagttccaaggggctggggttccccaacgatcaagttcctgtgctgtaatcaagagggtcctttggactggatagggagcacttgggagctgtacaccatcagtcataatggatggcagtgtaaaagatgatccaaatgacctagtgaggagacaagcactgttcataggtcacctggcttaacacaggccgattccacaaaacaaaaatgccagatgagaatgtaaacacggggcactctccaggggctatccgttgcacagtctgct

SEQ ID NO: 28333 - protein, 261 aa, Homo sapiens; identical to SEQ ID NO: 3879

SEQ ID NO: 28334 - DNA, 3114 bp, Homo sapiens
tagagctccaaggaccccacgcctgtgtctctgtgacagagctcaaagggccctgggccttccctccctggctcggctgtgcttgggagggttccccagtccagaatccctaaggagcatggggcagctgatccatccctggtgtacaaactgctgactgcagacagatgctgagctacccaaaccaacacctagcctctccctgaagatcctcccaggctgagagagttctgggtgtcctaggaccaaggacactggcagacttccagaagggcccccaaagccctaacctgtccagccagagcatgcgtctcagcagagctgtcttcccaagcctttgatgacaaaccaatttccctcgatgatgtgcttctgagtgctctgctgaggaacaatgggaagtctgcccagcagaagaaaatctctgccaagcccaagcttgagttcctctgtccaaggccagggacctgtgaccatggaagcagagagaagcaaggccacagccgtggccctgggcagtttcccggcaggtggcccggccgagctgtcgctgagactcggggagccattgaccatcgtctctgaggatggagactggtggacggtgctgtctgaagtctcaggcagagagtataacatccccagcgtccacgtggccaaagtctcccatgggtggctgtatgagggcctgagcagggagaaagcagaggaactgctgttgttacctgggaaccctggaggggccttcctcatccgggagagccagaccaggagaggctcttactctctgtcagtccgcctcagccgccctgcatcctgggaccggatcagacactacaggatccactgccttgacaatggctggctgtacatctcaccgcgcctcaccttcccctcactccaggccctggtggaccattactctgagggctggcccgctccctggcaaggatatacccctacctgtgactgtgcagaggacaccactcaactggaaagagctggacagctccctcctgttttctgaagctgccacaggggaggagtctcttctcagtgagggtctccgggagtccctcagcttctacatcagcctgaatgacgaggctgtctctttggatgatgcctaggcccaaaggagaggccaaaagggaaaccaaggctgcacacctagaaccccaattcagcctcctgggcaccccagaggcaaggctgtgcactcagggagggagggtgggacacagaggtgcatctagggtcccacctgtacccttgctctttcctctcttagcccttagaagtcacctacttccttccagtgccatgatcccacctgcgacctctagtgcgagtgcagagaaggtgggaccagggccagggttccaaaaagagaataagcctcctggggggtctgacctagttagttcttgagtttggggtttccagtaccatctggatgccctgcctgttgagccccattctacatccccaccattaaccaggccccacccacaaggtagaaacaacccctagagtcaacgagaaagtcattttcagaaaatctacaagtctcgttgagaccaccaccatacctcagaaggtaggactgtggcctagaagggaaaggaaagctgagatgatgtcttaccgtagcagcagatcttggatggtccaggctctatgtgacctccagagcaaagagaaagacttcggacagtctaggtcctcaaatgtcccccattgaggacaacagccccagctctttttcttttttttgagacggagtcttgccctgttgcccatgctggagtgcaatggcacgatctcagctcactgcaacctccatctcctggattcaaacaattctcctgcctcagcctccagaatagctgggattacaggcgtacaccaccatgcctggctaatttttttgtatttttagtagacatggggtttcaccacattggccaggctggtgtcgaactcctgacctcaggtgatccacccaccttggcctcccaaagtgctgggattacaggtgtgagccacggcacccagcctagctctcagatctctatttcattttgtggcttaccattccctagcacactggccttgccatcttgtggccgaataaaaaataacacctcttaagtctagcacactgcagtgaggccaggcacctcagtgctgggcaggggcatcagaaggtgctaagccctctctccacaatgccaagacggagaccacagcctacaccaaatccagcccttgatttccctgctgcctccataaacagaaagaggtctgctggatccgctaagggatcagggagaggaagaaagagggatggggtgggaggcaccccctccagtgctcctactggttcccaagctacaggtggggtgggaaaggctttatcaggtatcatcaacaggttctcaattaaagatttgatttattcaagtatgtgaaaacattctacaatggaaactcttattagatgctgcatgtactgtgctatggaccacgcacatacagccatgctgtttcagaagacttgaaatgccattgatagtttaaaaactctacacccgatggagaatcgaggaagacaatttaatgtttcatctgaatccagaggtgcatcaaattaaatgacagctccacttggcaaataatagctgttacttgatggtatccaagaagaaatggttggtgatggataaattcagaaatgcttccccaaaggtgggtggtttttaaaaagtttcaggtcacaacccttgcagaaaacactgatgcccaacacactgattcgcggtccaggaaacacgggtcttccaagttccaaggggctggggttccccaacgatcaagttcctgtgctgtaatcaagagggtcctttggactggatagggagcacttgggagctgtacaccatcagtcataatggatggcagtgtaaaagatgatccaaatgacctagtgaggagacaagcactgttcataggtcacctggcttaacacaggccgattccacaaaacaaaaatgccagatgagaatgtaaacacggggcactctccaggggctatccgttgcacagtctgct

SEQ ID NO: 28335 - protein, 210 aa, Homo sapiens; identical to SEQ ID NO: 3881

SEQ ID NO: 28336 - DNA, 2391 bp, Homo sapiens
acatgctctgtgaggagatttccctcgatgatgtgcttctgagtgctctgctgaggaacaatgggaagtctgcccagcagaagaaaatctctgccaagcccaagcttgagttcctctgtccaaggccagggacctgtgaccatggaagcagagagaagcaaggccacagccgtggccctgggcagtttcccggcaggtggcccggccgagctgtcgctgagactcggggagccattgaccatcgtctctgaggatggagactggtggacggtgctgtctgaagtctcaggcagagagtataacatccccagcgtccacgtggccaaagtctcccatgggtggctgtatgagggcctgagcagggagaaagcagaggaactgctgttgttacctgggaaccctggaggggccttcctcatccgggagagccagaccaggagaggctcttactctctgtcagtccgcctcagccgccctgcatcctgggaccggatcagacactacaggatccactgccttgacaatggctggctgtacatctcaccgcgcctcaccttcccctcactccaggccctggtggaccattactctgagctggcggatgacatctgctgcctactcaaggagccctgtgtcctgcagagggctggcccgctccctggcaaggatatacccctacctgtgactgtgcagaggacaccactcaactggaaagagctggacagctccctcctgttttctgaagctgccacaggggaggagtctcttctcagtgagggtctccgggagtccctcagcttctacatcagcctgaatgacgaggctgtctctttggatgatgcctaggcccaaaggagaggccaaaagggaaaccaaggctgcacacctagaaccccaattcagcctcctgggcaccccagaggcaaggctgtgcactcagggagggagggtgggacacagaggtgcatctagggtcccacctgtacccttgctctttcctctcttagcccttagaagtcacctacttccttccagtgccatgatcccacctgcgacctctagtgcgagtgcagagaaggtgggaccagggccagggttccaaaaagagaataagcctcctggggggtctgacctagttagttcttgagtttggggtttccagtaccatctggatgccctgcctgttgagccccattctacatccccaccattaaccaggccccacccacaaggtagaaacaacccctagagtcaacgagaaagtcattttcagaaaatctacaagtctcgttgagaccaccaccatacctcagaaggtaggactgtggcctagaagggaaaggaaagctgagatgatgtcttaccgtagcagcagatcttggatggtccaggctctatgtgacctccagagcaaagagaaagacttcggacagtctaggtcctcaaatgtcccccattgaggacaacagccccagctctttttcttttttttgagacggagtcttgccctgttgcccatgctggagtgcaatggcacgatctcagctcactgcaacctccatctcctggattcaaacaattctcctgcctcagcctccagaatagctgggattacaggcgtacaccaccatgcctggctaatttttttgtatttttagtagacatggggtttcaccacattggccaggctggtgtcgaactcctgacctcaggtgatccacccaccttggcctcccaaagtgctgggattacaggtgtgagccacggcacccagcctagctctcagatctctatttcattttgtggcttaccattccctagcacactggccttgccatcttgtggccgaataaaaaataacacctcttaagtctagcacactgcagtgaggccaggcacctcagtgctgggcaggggcatcagaaggtgctaagccctctctccacaatgccaagacggagaccacagcctacaccaaatccagcccttgatttccctgctgcctccataaacagaaagaggtctgctggatccgctaagggatcagggagaggaagaaagagggatggggtgggaggcaccccctccagtgctcctactggttcccaagctacaggtggggtgggaaaggctttatcaggtatcatcaacaggttctcaattaaagatttgatttattcaagtatgtgaaaacattctacaatggaaactcttattagatgctgcatgtactgtgctatggaccacgcacatacagccatgctgtttcagaagacttgaaatgccattgatagtttaaaaactctacacccgatggagaatcgaggaagacaatttaatgtttcatctgaatccagaggtgcatcaaattaaatgacagctccacttggc

SEQ ID NO: 28337 - protein, 261 aa, Homo sapiens; identical to SEQ ID NO: 3879

SEQ ID NO: 28338 - DNA, 2523 bp, Homo sapiens
tagagctccaaggaccccacgcctgtgtctctgtgacagagctcaaagggccctgggccttccctccctggctcggctgtgcttgggagggttccccagtccagaatccctaaggagcatggggcagctgatccatccctggtgtacaaactgctgactgcagacagatgctgagctacccaaaccaacacctagcctctccctgaagatcctcccaggctgagagagttctgggtgtcctaggaccaaggacactggcagacttccagaagggcccccaaagccctaacctgtccagccagagcatgcgtctcagcagagctgtcttcccaagcctttgatgacaaaccaatttccctcgatgatgtgcttctgagtgctctgctgaggaacaatgggaagtctgcccagcagaagaaaatctctgccaagcccaagcttgagttcctctgtccaaggccagggacctgtgaccatggaagcagagagaagcaaggccacagccgtggccctgggcagtttcccggcaggtggcccggccgagctgtcgctgagactcggggagccattgaccatcgtctctgaggatggagactggtggacggtgctgtctgaagtctcaggcagagagtataacatccccagcgtccacgtggccaaagtctcccatgggtggctgtatgagggcctgagcagggagaaagcagaggaactgctgttgttacctgggaaccctggaggggccttcctcatccgggagagccagaccaggagaggctcttactctctgtcagtccgcctcagccgccctgcatcctgggaccggatcagacactacaggatccactgccttgacaatggctggctgtacatctcaccgcgcctcaccttcccctcactccaggccctggtggaccattactctgagctggcggatgacatctgctgcctactcaaggagccctgtgtcctgcagagggctggcccgctccctggcaaggatatacccctacctgtgactgtgcagaggacaccactcaactggaaagagctggacagctccctcctgttttctgaagctgccacaggggaggagtctcttctcagtgagggtctccgggagtccctcagcttctacatcagcctgaatgacgaggctgtctctttggatgatgcctaggcccaaaggagaggccaaaagggaaaccaaggctgcacacctagaaccccaattcagcctcctgggcaccccagaggcaaggctgtgcactcagggagggagggtgggacacagaggtgcatctagggtcccacctgtacccttgctctttcctctcttagcccttagaagtcacctacttccttccagtgccatgatcccacctgcgacctctagtgcgagtgcagagaaggtgggaccagggccagggttccaaaaagagaataagcctcctggggggtctgacctagttagttcttgagtttggggtttccagtaccatctggatgccctgcctgttgagccccattctacatccccaccattaaccaggccccacccacaaggtagaaacaacccctagagtcaacgagaaagtcattttcagaaaatctacaagtctcgttgagaccaccaccatacctcagaaggtaggactgtggcctagaagggaaaggaaagctgagatgatgtcttaccgtagcagcagatcttggatggtccaggctctatgtgacctccagagcaaagagaaagacttcggacagtctaggtcctcaaatgtcccccattgaggacaacagccccagctctttttcttttttttgagacggagtcttgccctgttgcccatgctggagtgcaatggcacgatctcagctcactgcaacctccatctcctggattcaaacaattctcctgcctcagcctccagaatagctgggattacaggcgtacaccaccatgcctggctaatttttttgtatttttagtagacatggggtttcaccacattggccaggctggtgtcgaactcctgacctcaggtgatccacccaccttggcctcccaaagtgctgggattacaggtgtgagccacggcacccagcctagctctcagatctctatttcattttgtggcttaccattccctagcacactggccttgccatcttgtggccgaataaaaaataacacctcttaagtctagcacactgcagtgaggccaggcacctcagtgctgggcaggggcatcagaaggtgctaagccctctctccacaatgccaagacggagaccacagcctacaccaaatccagcccttgatttccctgctgcctccataaacagaaagaggtctgctggatccgctaagggatcagggagaggaagaaagagggatggggtgggaggcaccccctccagtgctcctactggttcccaagctacaggtggggtgggaaaggctttatcaggtatcatcaacaggttctcaattaaagatttgatttattcaagtatgtg

SEQ ID NO: 28339 - protein, 261 aa, Homo sapiens; identical to SEQ ID NO: 3879

SEQ ID NO: 28340 - DNA, 2473 bp, Homo sapiens
tagagctccaaggaccccacgcctgtgtctctgtgacagagctcaaagggccctgggccttccctccctggctcggctgtgcttgggagggttccccagtccagaatccctaaggagcatggggcagctgatccatccctggtgtacaaactgctgactgcagacagatgctgagctacccaaaccaacacctagcctctccctgaagatcctcccaggctgagagagttctgggtgtcctaggaccaaggacactggcagacttccagaagggcccccaaagccctaacctgtccagccagagcatgcgtctcagcagagctgtcttcccaagcctttgatgacaaaccaatttccctcgatgatgtgcttctgagtgctctgctgaggaacaatgggaagtctgcccagcagaagaaaatctctgccaagcccaagcttgagttcctctgtccaaggccagggacctgtgaccatggaagcagagagaagcaaggccacagccgtggccctgggcagtttcccggcaggtggcccggccgagctgtcgctgagactcggggagccattgaccatcgtctctgaggatggagactggtggacggtgctgtctgaagtctcaggcagagagtataacatccccagcgtccacgtggccaaagtctcccatgggtggctgtatgagggcctgagcagggagaaagcagaggaactgctgttgttacctgggaaccctggaggggccttcctcatccgggagagccagaccaggagaggctcttactctctgtcagtccgcctcagccgccctgcatcctgggaccggatcagacactacaggatccactgccttgacaatggctggctgtacatctcaccgcgcctcaccttcccctcactccaggccctggtggaccattactctgagggctggcccgctccctggcaaggatatacccctacctgtgactgtgcagaggacaccactcaactggaaagagctggacagctccctcctgttttctgaagctgccacaggggaggagtctcttctcagtgagggtctccgggagtccctcagcttctacatcagcctgaatgacgaggctgtctctttggatgatgcctaggcccaaaggagaggccaaaagggaaaccaaggctgcacacctagaaccccaattcagcctcctgggcaccccagaggcaaggctgtgcactcagggagggagggtgggacacagaggtgcatctagggtcccacctgtacccttgctctttcctctcttagcccttagaagtcacctacttccttccagtgccatgatcccacctgcgacctctagtgcgagtgcagagaaggtgggaccagggccagggttccaaaaagagaataagcctcctggggggtctgacctagttagttcttgagtttggggtttccagtaccatctggatgccctgcctgttgagccccattctacatccccaccattaaccaggccccacccacaaggtagaaacaacccctagagtcaacgagaaagtcattttcagaaaatctacaagtctcgttgagaccaccaccatacctcagaaggtaggactgtggcctagaagggaaaggaaagctgagatgatgtcttaccgtagcagcagatcttggatggtccaggctctatgtgacctccagagcaaagagaaagacttcggacagtctaggtcctcaaatgtcccccattgaggacaacagccccagctctttttcttttttttgagacggagtcttgccctgttgcccatgctggagtgcaatggcacgatctcagctcactgcaacctccatctcctggattcaaacaattctcctgcctcagcctccagaatagctgggattacaggcgtacaccaccatgcctggctaatttttttgtatttttagtagacatggggtttcaccacattggccaggctggtgtcgaactcctgacctcaggtgatccacccaccttggcctcccaaagtgctgggattacaggtgtgagccacggcacccagcctagctctcagatctctatttcattttgtggcttaccattccctagcacactggccttgccatcttgtggccgaataaaaaataacacctcttaagtctagcacactgcagtgaggccaggcacctcagtgctgggcaggggcatcagaaggtgctaagccctctctccacaatgccaagacggagaccacagcctacaccaaatccagcccttgatttccctgctgcctccataaacagaaagaggtctgctggatccgctaagggatcagggagaggaagaaagagggatggggtgggaggcaccccctccagtgctcctactggttcccaagctacaggtggggtgggaaaggctttatcaggtatcatcaacaggttctcaattaaagatttgatttattcaagtatgtg

SEQ ID NO: 28341 - protein, 210 aa, Homo sapiens; identical to SEQ ID NO: 3881

SEQ ID NO: 28342 - DNA, 1330 bp, Homo sapiens
gataagattctttgatcccgactctgtgtgtgcgagcacgcgtgtctgtgtttgtgtgtgcatagttctgtggttttagacacgctttcttgtagtgcttctgcaaaaaacaaaaaagggacttattttgcattctcaatggtgtttttaagggaattaggcagaacagatttctaggttgggtaggccactgcattctcttttgtttgcaaattggtcaacaaaatttgcaaagtgatttcaggagagagcagctttgaggaatgtggaaaatcataattgccgtctggaccattgattgattgtgaccagtagcagaagggtgcctgttacatagagaggctccttctgtccaaatgaatttctgtatactcttctataaataaaagggaggaatatattctgctggaagcccatgaaccatcgctgaggttctgatacaacatagagttttttccaaggagtgaatgtggtttaattactggactctcttagcacaggaaggtggaaacaaaatgccaggcctctgctctgaagagcaaaactgctgtcgctgcagtatctgataccagacatccacatatccacaagaagtgcctcttaggtctgtgacagagagtgtgtctccattcctcagttcccagaaaggggagaggtttggcctaaaaagcatgtagatgggggagaaatgggtggggggagaggaacagccattaacacagtatcatgtttaacaagtatagccttgatttcagtagatgtaatggaagccaaattaaattgatacagaacccatttctcagagtctttttttttttttgagacagagtctcgctgttacccaggctggagtgcaatggcgcaaacttggctcactgcaacctctgccccctgggttcaagcgattctcctgcctcagcctcccaaagtgctgggattacaggcatgagtcattgctcccagccattagaaagattgttaatcctatgaactcccttttgtaggagagaaagggccaatctgtaggggtagccctgtccaggtaaagttgttttcagcctcatgtctactgttaggtgagggagtcacagccagacagagagtattgctggagggtgagagaattgtggagaccaactaccacatagcaagagcccagctcttgggagcattgagatgtaagctcagggttacacagttccaaatcttgggaaggggcttttcagacagactgtttgctttctgctgagataaggaatgcatcactctgccagagtatgactttttacagattattaaataaagctgcatatgtctcattgttacctga

SEQ ID NO: 28343 - protein, 30 aa, Homo sapiens
MAQTWLTATSAPWVQAILLPQPPKVLGLQA

SEQ ID NO: 28344 - DNA, 2964 bp, Homo sapiens; identical to SEQ ID NO: 3884

SEQ ID NO: 28345 - protein, 375 aa, Homo sapiens; identical to SEQ ID NO: 3885

SEQ ID NO: 28346 - DNA, 2697 bp, Homo sapiens
gctgctgcactgacggcgggtgcccgcgcctcagagttactgatttattcttgagattcctctactctcgttatctgacctcatggatgaacttcaggatgttcagctcacagagatcaaaccacttctaaatgataagaatggtacaagaaacttccaggactttgactgtcaggaacatgatatagaaacaactcatggtgtggtccacgtcactataagagttggagctggagcttacatcctcagcagatttgcactcaaccatccagagcttgtggaaggccttgtgctcattaatgttgacccttgcgctaaaggctggattgactgggcagcttccaaactctctggcctgacaaccaatgttgtggacattattttggctcatcactttgggcaggaagagttacaggccaacctggacctgatccaaacctacagaatgcatattgcccaagacatcaaccaagacaacctgcagctcttcttgaattcctacaatggacgcagagacctggagatcgaaagacccatactgggccaaaatgataacaaatcaaaaacattaaagtgttctactttactggtggtaggggacaattcgcctgcagttgaggctgtggtcgaatgcaattcccgcctgaaccctataaatacaactttgctaaagatggcggactgtgggggactgccccaggtagttcagcctgggaagctcaccgaggccttcaagtactttttgcagggaatgggctacataccatctgccagcatgactcggctcgcccgatcacgaacccactcaacctcgagtagcctcggctctggagaaagtcccttcagccggtctgtcaccagcaatcagtcagatggaactcaagaatcctgtgagtcccctgatgtcctggacagacaccagaccatggaggtgtcctgctaagcagatgctcctcccctggaccattgcaagtccatccttcaaatgaccactccataatataacatttcatccagtaaactggcctctactatctttaactcatgcatggccactgaacctctctctagtagcctggatttatcattctctctgcctgcccacccccttttttgtatagcccaagaaccacttccatgccatactgtaacattccaacatctttagctgatcagatctctccatatcctctcttgccagctttttcccgtgctcccccaactatgtatcagataagattctttgatcccgactctgtgtgtgcgagcacgcgtgtctgtgtttgtgtgtgcatagttctgtggttttagacacgctttcttgtagtgcttctgcaaaaaacaaaaaagggacttattttgcattctcaatggtgtttttaagggaattaggcagaacagatttctaggttgggtaggccactgcattctcttttgtttgcaaattggtcaacaaaatttgcaaagtgatttcaggagagagcagctttgaggaatgtggaaaatcataattgccgtctggaccattgattgattgtgaccagtagcagaagggtgcctgttacatagagaggctccttctgtccaaatgaatttctgtatactcttctataaataaaagggaggaatatattctgctggaagcccatgaaccatcgctgaggttctgatacaacatagagttttttccaaggagtgaatgtggtttaattactggactctcttagcacaggaaggtggaaacaaaatgccaggcctctgctctgaagagcaaaactgctgtcgctgcagtatctgataccagacatccacatatccacaagaagtgcctcttaggtctgtgacagagagtgtgtctccattcctcagttcccagaaaggggagaggtttggcctaaaaagcatgtagatgggggagaaatgggtggggggagaggaacagccattaacacagtatcatgtttaacaagtatagccttgatttcagtagatgtaatggaagccaaattaaattgatacagaacccatttctcagagtctttttttttttttgagacagagtctcgctgttacccaggctggagtgcaatggcgcaaacttggctcactgcaacctctgccccctgggttcaagcgattctcctgcctcagcctcccgagtagctgagactacaggcacctgccaccatacccagctaagttatgtatttttagtagagatggagtttcaccatgttggccaggctggtctcaaactcctgacctcaggtgatccacctgcctcagcctcccaaagtgctgggattacaggcatgagtcattgctcccagccattagaaagattgttaatcctatgaactcccttttgtaggagagaaagggccaatctgtaggggtagccctgtccaggtaaagttgttttcagcctcatgtctactgttaggtgagggagtcacagccagacagagagtattgctggagggtgagagaattgtggagaccaactaccacatagcaagagcccagctcttgggagcattgagatgtaagctcagggttacacagttccaaatcttgggaaggggcttttcagacagactgtttgctttctgctgagataaggaatgcatcactctgccagagtatgactttttacagattattaaataaagctgcatatgtctcattgttacctga

SEQ ID NO: 28347 - protein, 286 aa, Homo sapiens
MDELQDVQLTEIKPLLNDKNGTRNFQDFDCQEHDIETTHGVVHVTIRVGAGAYILSRFALNHPELVEGLVLINVDPCAKGWIDWAASKLSGLTTNVVDIILAHHFGQEELQANLDLIQTYRMHIAQDINQDNLQLFLNSYNGRRDLEIERPILGQNDNKSKTLKCSTLLVVGDNSPAVEAVVECNSRLNPINTTLLKMADCGGLPQVVQPGKLTEAFKYFLQGMGYIPSASMTRLARSRTHSTSSSLGSGESPFSRSVTSNQSDGTQESCESPDVLDRHQTMEVSC

SEQ ID NO: 28348 - DNA, 2928 bp, Homo sapiens; identical to SEQ ID NO: 3882

SEQ ID NO: 28349 - protein, 363 aa, Homo sapiens; identical to SEQ ID NO: 3883

SEQ ID NO: 28350 - DNA, 1784 bp, Homo sapiens
atttttcagttttgttagttgctaactatgtaactatccagctccttaaatgtggctatgttttatgttagagctcagccggtctatcagtgtcgatttagcagaaagcaaacggcttggctgtctcctgctttccagtttccagttctctattcagaaacttgaacctttcctaagggacactaagggcttcagtcttgaaagttttagagccaaagcatcttctctttctgaagaattgaaacattttgcagacggactggaaactgatggaactctacaaaaatgttttgaagattcaaatggaaaagcatcagatttttctttggaagcatctgtggctgagatgaaggaatacataacaaagttttctttagaacgtcagacttgggatcagctcttgcttcactaccagcaggaggctaaagagatattgtccagaggatcaactgaggccaaaattactgaggtcaaagtggaacctatgacatatcttgggtcttctcagaatgaagttcttaatacaaaacctgactaccagaaaatattacagaaccagagcaaagtctttgactgtatggagttggtgatggatgaactgcaaggatcagtgaaacagctgcaggcctttatggatgaaagtacccagtgcttccagaaggtgtcagtacagctcggaaagagaagcatgcaacaattagatccctcaccagctcgaaaactgttgaagcttcagctacagaacccacctgccatacatggatctggatctggatcttgtcagtgactttatgagagtttctgccacaaggtgcccaagaggagaggaatgggaagagtgccccagcacgtggtgactgcgtgatttctgctcgttgcctttgaagataactggcaggactgactgtagaacactttgacttttttcaaaaagtgatggaatttgtacatccaaatgaatattgtatagacaattttcccaggaatgtgcaaaatgcttgaaagttcaaacttcttttttgaaatgatcttcagatccagtggcccattcttttatctttatcctgtgaaggtgtttttcaggttttgaaacaatccaaaaatcatttaggaccaagtctaaggaaacattttagtggccaagttggattccgattgtaaaggaatgatactaattttctagcatggctctgaaggtgattttaggtagaagagttttgaggctgggcgcaatggctcacgcctgtaatcctagcattttgggtgactgaggcgggtggattgcttgagcccagaagttgaagaccagcctgagaaataaggtgaaaccctgtctacaaaaaatacaaaaagttagctgggtgtggtggcgtgtgcctgtagtgctagctactcagaaggctgaggtgggaggattgtttgagcccaggaggttgaggctgcagtgagttctaattgcgccactgcactccagcctgagcgacagagtgagacactgtcttaaaaaaaattaaaaattgtaaaaaaatgaaaaaaaaagttttgagcattatttgcatcattgggatacatatgtcacttcacaagatgttcaatttgaaggaaataccactcattctctatgtcctgttgtctgtagtgtgcttcagtttttcatattgagttgacctaaatcctggattcatgacaagaaaggagtaagtactactattcattgttctatttgtttataatctgtattataaaattgcacataattaaaagctttcccttgtcttcatcta

SEQ ID NO: 28351 - protein, 245 aa, Homo sapiens
MWLCFMLELSRSISVDLAESKRLGCLLLSSFQFSIQKLEPFLRDTKGFSLESFRAKASSLSEELKHFADGLETDGTLQKCFEDSNGKASDFSLEASVAEMKEYITKFSLERQTWDQLLLHYQQEAKEILSRGSTEAKITEVKVEPMTYLGSSQNEVLNTKPDYQKILQNQSKVFDCMELVMDELQGSVKQLQAFMDESTQCFQKVSVQLGKRSMQQLDPSPARKLLKLQLQNPPAIHGSGSGSCQ

SEQ ID NO: 28352 - DNA, 1926 bp, Homo sapiens
gcaaggcgtccaggagtgacctggggctgtggagagcgacccgtggccttgtgtttcagagtttaccacctaggatgacttcagtgactagatcagagatcatagatgaacaatctgccagttatcaagacaggaggcaatcctggcggcgagcaagtatgaaagaaacgaaccggcggaagtcgctgcatcccattcaccagggcatcacagagctcagccggtctatcagtgtcgatttagcagaaagcaaacggcttggctgtctcctgctttccagtttccagttctctattcagaaacttgaacctttcctaagggacactaagggcttcagtcttgaaagttttagagccaaagcatcttctctttctgaagaattgaaacattttgcagacggactggaaactgatggaactctacaaaaatgttttgaagattcaaatggaaaagcatcagatttttctttggaagcatctgtggctgagatgaaggaatacataacaaagttttctttagaacgtcagacttgggatcagctcttgcttcactaccagcaggaggctaaagagatattgtccagaggatcaactgaggccaaaattactgaggtcaaagtggaacctatgacatatcttgggtcttctcagaatgaagttcttaatacaaaacctgactaccagaaaatattacagaaccagagcaaagtctttgactgtatggagttggtgatggatgaactgcaaggatcagtgaaacagctgcaggcctttatggatgaaagtacccagtgcttccagaaggtgtcagtacagctcggaaagagaagcatgcaacaattagatccctcaccagctcgaaaactgttgaagcttcagctacagaacccacctgccatacatggatctggatctggatcttgtcagtgactttatgagagtttctgccacaaggtgcccaagaggagaggaatgggaagagtgccccagcacgtggtgactgcgtgatttctgctcgttgcctttgaagataactggcaggactgactgtagaacactttgacttttttcaaaaagtgatggaatttgtacatccaaatgaatattgtatagacaattttcccaggaatgtgcaaaatgcttgaaagttcaaacttcttttttgaaatgatcttcagatccagtggcccattcttttatctttatcctgtgaaggtgtttttcaggttttgaaacaatccaaaaatcatttaggaccaagtctaaggaaacattttagtggccaagttggattccgattgtaaaggaatgatactaattttctagcatggctctgaaggtgattttaggtagaagagttttgaggctgggcgcaatggctcacgcctgtaatcctagcattttgggtgactgaggcgggtggattgcttgagcccagaagttgaagaccagcctgagaaataaggtgaaaccctgtctacaaaaaatacaaaaagttagctgggtgtggtggcgtgtgcctgtagtgctagctactcagaaggctgaggtgggaggattgtttgagcccaggaggttgaggctgcagtgagttctaattgcgccactgcactccagcctgagcgacagagtgagacactgtcttaaaaaaaattaaaaattgtaaaaaaatgaaaaaaaaagttttgagcattatttgcatcattgggatacatatgtcacttcacaagatgttcaatttgaaggaaataccactcattctctatgtcctgttgtctgtagtgtgcttcagtttttcatattgagttgacctaaatcctggattcatgacaagaaaggagtaagtactactattcattgttctatttgtttataatctgtattataaaattgcacataattaaaagctttcccttgtcttcatcta

SEQ ID NO: 28353 - protein, 284 aa, Homo sapiens
MTSVTRSEIIDEQSASYQDRRQSWRRASMKETNRRKSLHPIHQGITELSRSISVDLAESKRLGCLLLSSFQFSIQKLEPFLRDTKGFSLESFRAKASSLSEELKHFADGLETDGTLQKCFEDSNGKASDFSLEASVAEMKEYITKFSLERQTWDQLLLHYQQEAKEILSRGSTEAKITEVKVEPMTYLGSSQNEVLNTKPDYQKILQNQSKVFDCMELVMDELQGSVKQLQAFMDESTQCFQKVSVQLGKRSMQQLDPSPARKLLKLQLQNPPAIHGSGSGSCQ

SEQ ID NO: 28354 - DNA, 2061 bp, Homo sapiens
gggagtatcggctgcgggtgcgcaaggcgtccaggagtgacctggggctgtggagagcgacccgtggccttgtgtttcaggtacggaggttccggactggacgggcgtcaggaagtcacagacttgtcctctgatgtggccccgcccgccgccgcactaatctcttcggcgtcgtacccgtcggcccagctcgacccgccgcagccccggccccgaccgtggacactgggggtccccgagggcgctgcgacctcctcccgggtgaaatgaaacccgagggcagtcccccttaccgaccccattagagacgtatctgccgtgccaggggtctaggctccagaaacagggagctcagccggtctatcagtgtcgatttagcagaaagcaaacggcttggctgtctcctgctttccagtttccagttctctattcagaaacttgaacctttcctaagggacactaagggcttcagtcttgaaagttttagagccaaagcatcttctctttctgaagaattgaaacattttgcagacggactggaaactgatggaactctacaaaaatgttttgaagattcaaatggaaaagcatcagatttttctttggaagcatctgtggctgagatgaaggaatacataacaaagttttctttagaacgtcagacttgggatcagctcttgcttcactaccagcaggaggctaaagagatattgtccagaggatcaactgaggccaaaattactgaggtcaaagtggaacctatgacatatcttgggtcttctcagaatgaagttcttaatacaaaacctgactaccagaaaatattacagaaccagagcaaagtctttgactgtatggagttggtgatggatgaactgcaaggatcagtgaaacagctgcaggcctttatggatgaaagtacccagtgcttccagaaggtgtcagtacagctcggaaagagaagcatgcaacaattagatccctcaccagctcgaaaactgttgaagcttcagctacagaacccacctgccatacatggatctggatctggatcttgtcagtgactttatgagagtttctgccacaaggtgcccaagaggagaggaatgggaagagtgccccagcacgtggtgactgcgtgatttctgctcgttgcctttgaagataactggcaggactgactgtagaacactttgacttttttcaaaaagtgatggaatttgtacatccaaatgaatattgtatagacaattttcccaggaatgtgcaaaatgcttgaaagttcaaacttcttttttgaaatgatcttcagatccagtggcccattcttttatctttatcctgtgaaggtgtttttcaggttttgaaacaatccaaaaatcatttaggaccaagtctaaggaaacattttagtggccaagttggattccgattgtaaaggaatgatactaattttctagcatggctctgaaggtgattttaggtagaagagttttgaggctgggcgcaatggctcacgcctgtaatcctagcattttgggtgactgaggcgggtggattgcttgagcccagaagttgaagaccagcctgagaaataaggtgaaaccctgtctacaaaaaatacaaaaagttagctgggtgtggtggcgtgtgcctgtagtgctagctactcagaaggctgaggtgggaggattgtttgagcccaggaggttgaggctgcagtgagttctaattgcgccactgcactccagcctgagcgacagagtgagacactgtcttaaaaaaaattaaaaattgtaaaaaaatgaaaaaaaaagttttgagcattatttgcatcattgggatacatatgtcacttcacaagatgttcaatttgaaggaaataccactcattctctatgtcctgttgtctgtagtgtgcttcagtttttcatattgagttgacctaaatcctggattcatgacaagaaaggagtaagtactactattcattgttctatttgtttataatctgtattataaaattgcacataattaaaagctttcccttgtcttcatcta

SEQ ID NO: 28355 - protein, 146 aa, Homo sapiens
MKEYITKFSLERQTWDQLLLHYQQEAKEILSRGSTEAKITEVKVEPMTYLGSSQNEVLNTKPDYQKILQNQSKVFDCMELVMDELQGSVKQLQAFMDESTQCFQKVSVQLGKRSMQQLDPSPARKLLKLQLQNPPAIHGSGSGSCQ

SEQ ID NO: 28356 - DNA, 2349 bp, Homo sapiens
gatcagggagtatcggctgcgggtgcgcaaggcgtccaggagtgacctggggctgtggagagcgacccgtggccttgtgtttcaggtacggaggttccggactggacgggcgtcaggaagtcacagacttgtcctctgatgtggccccgcccgccgccgcactaatctcttcggcgtcgtacccgtcggcccagctcgacccgccgcagccccggccccgaccgtggacactgggggtccccgagggcgctgcgacctcctcccggagtttaccacctaggatgacttcagtgactagatcagagatcatagatgaaaaaggaccagtgatgtctaagactcatgatcatcaattggaatcaagtctcagtcctgtggaagtgtttgctaaaacatctgcctccctggagatgaatcaaggcgtttcagaggaaagaattcaccttggctctagccctaaaaaagggggaaattgtgatctcagccaccaggaaagacttcagtcgaagtcccttcatttgtctcctcaagaacaatctgccagttatcaagacaggaggcaatcctggcggcgagcaagtatgaaagaaacgaaccggcggaagtcgctgcatcccattcaccagggcatcacagagctcagccggtctatcagtgtcgatttagcagaaagcaaacggcttggctgtctcctgctttccagtttccagttctctattcagaaacttgaacctttcctaagggacactaagggcttcagtcttgaaagttttagagccaaagcatcttctctttctgaagaattgaaacattttgcagacggactggaaactgatggaactctacaaaaatgttttgaagattcaaatggaaaagcatcagatttttctttggaagcatctgtggctgagatgaaggaatacataacaaagttttctttagaacgtcagacttgggatcagctcttgcttcactaccagcaggaggctaaagagatattgtccagaggatcaactgaggccaaaattactgaggtcaaagtggaacctatgacatatcttgggtcttctcagaatgaagttcttaatacaaaacctgactaccagaaaatattacagaaccagagcaaagtctttgactgtatggagttggtgatggatgaactgcaaggatcagtgaaacagctgcaggcctttatggatgaaagtacccagtgcttccagaaggtgtcagtacagctcggaaagagaagcatgcaacaattagatccctcaccagctcgaaaactgttgaagcttcagctacagaacccacctgccatacatggatctggatctggatcttgtcagtgactttatgagagtttctgccacaaggtgcccaagaggagaggaatgggaagagtgccccagcacgtggtgactgcgtgatttctgctcgttgcctttgaagataactggcaggactgactgtagaacactttgacttttttcaaaaagtgatggaatttgtacatccaaatgaatattgtatagacaattttcccaggaatgtgcaaaatgcttgaaagttcaaacttcttttttgaaatgatcttcagatccagtggcccattcttttatctttatcctgtgaaggtgtttttcaggttttgaaacaatccaaaaatcatttaggaccaagtctaaggaaacattttagtggccaagttggattccgattgtaaaggaatgatactaattttctagcatggctctgaaggtgattttaggtagaagagttttgaggctgggcgcaatggctcacgcctgtaatcctagcattttgggtgactgaggcgggtggattgcttgagcccagaagttgaagaccagcctgagaaataaggtgaaaccctgtctacaaaaaatacaaaaagttagctgggtgtggtggcgtgtgcctgtagtgctagctactcagaaggctgaggtgggaggattgtttgagcccaggaggttgaggctgcagtgagttctaattgcgccactgcactccagcctgagcgacagagtgagacactgtcttaaaaaaaattaaaaattgtaaaaaaatgaaaaaaaaagttttgagcattatttgcatcattgggatacatatgtcacttcacaagatgttcaatttgaaggaaataccactcattctctatgtcctgttgtctgtagtgtgcttcagtttttcatattgagttgacctaaatcctggattcatgacaagaaaggagtaagtactactattcattgttctatttgtttataatctgtattataaaattgcacataattaaaagctttcccttgtcttcatcta

SEQ ID NO: 28357 - protein, 356 aa, Homo sapiens
MTSVTRSEIIDEKGPVMSKTHDHQLESSLSPVEVFAKTSASLEMNQGVSEERIHLGSSPKKGGNCDLSHQERLQSKSLHLSPQEQSASYQDRRQSWRRASMKETNRRKSLHPIHQGITELSRSISVDLAESKRLGCLLLSSFQFSIQKLEPFLRDTKGFSLESFRAKASSLSEELKHFADGLETDGTLQKCFEDSNGKASDFSLEASVAEMKEYITKFSLERQTWDQLLLHYQQEAKEILSRGSTEAKITEVKVEPMTYLGSSQNEVLNTKPDYQKILQNQSKVFDCMELVMDELQGSVKQLQAFMDESTQCFQKVSVQLGKRSMQQLDPSPARKLLKLQLQNPPAIHGSGSGSCQ

SEQ ID NO: 28358 - DNA, 1798 bp, Homo sapiens
gatcagggagtatcggctgcgggtgcgcaaggcgtccaggagtgacctggggctgtggagagcgacccgtggccttgtgtttcagagctcagccggtctatcagtgtcgatttagcagaaagcaaacggcttggctgtctcctgctttccagtttccagttctctattcagaaacttgaacctttcctaagggacactaagggcttcagtcttgaaagttttagagccaaagcatcttctctttctgaagaattgaaacattttgcagacggactggaaactgatggaactctacaaaaatgttttgaagattcaaatggaaaagcatcagatttttctttggaagcatctgtggctgagatgaaggaatacataacaaagttttctttagaacgtcagacttgggatcagctcttgcttcactaccagcaggaggctaaagagatattgtccagaggatcaactgaggccaaaattactgaggtcaaagtggaacctatgacatatcttgggtcttctcagaatgaagttcttaatacaaaacctgactaccagaaaatattacagaaccagagcaaagtctttgactgtatggagttggtgatggatgaactgcaaggatcagtgaaacagctgcaggcctttatggatgaaagtacccagtgcttccagaaggtgtcagtacagctcggaaagagaagcatgcaacaattagatccctcaccagctcgaaaactgttgaagcttcagctacagaacccacctgccatacatggatctggatctggatcttgtcagtgactttatgagagtttctgccacaaggtgcccaagaggagaggaatgggaagagtgccccagcacgtggtgactgcgtgatttctgctcgttgcctttgaagataactggcaggactgactgtagaacactttgacttttttcaaaaagtgatggaatttgtacatccaaatgaatattgtatagacaattttcccaggaatgtgcaaaatgcttgaaagttcaaacttcttttttgaaatgatcttcagatccagtggcccattcttttatctttatcctgtgaaggtgtttttcaggttttgaaacaatccaaaaatcatttaggaccaagtctaaggaaacattttagtggccaagttggattccgattgtaaaggaatgatactaattttctagcatggctctgaaggtgattttaggtagaagagttttgaggctgggcgcaatggctcacgcctgtaatcctagcattttgggtgactgaggcgggtggattgcttgagcccagaagttgaagaccagcctgagaaataaggtgaaaccctgtctacaaaaaatacaaaaagttagctgggtgtggtggcgtgtgcctgtagtgctagctactcagaaggctgaggtgggaggattgtttgagcccaggaggttgaggctgcagtgagttctaattgcgccactgcactccagcctgagcgacagagtgagacactgtcttaaaaaaaattaaaaattgtaaaaaaatgaaaaaaaaagttttgagcattatttgcatcattgggatacatatgtcacttcacaagatgttcaatttgaaggaaataccactcattctctatgtcctgttgtctgtagtgtgcttcagtttttcatattgagttgacctaaatcctggattcatgacaagaaaggagtaagtactactattcattgttctatttgtttataatctgtattataaaattgcacataattaaaagctttcccttgtcttcatcta

SEQ ID NO: 28359 - protein, 146 aa, Homo sapiens; identical to SEQ ID NO: 28355

SEQ ID NO: 28360 - DNA, 2212 bp, Homo sapiens
ggaggcggtgaccgtgacgtagaaggtggagaccgcttcaccctgatcagggagtatcggctgcgggtgcgcaaggcgtccaggagtgacctggggctgtggagagcgacccgtggccttgtgtttcagagtttaccacctaggatgacttcagtgactagatcagagatcatagatgaaaaaggaccagtgatgtctaagactcatgatcatcaattggaatcaagtctcagtcctgtggaagtgtttgctaaaacatctgcctccctggagatgaatcaaggcgtttcagaggaaagaattcaccttggctctagccctaaaaaagggggaaattgtgatctcagccaccaggaaagacttcagtcgaagtcccttcatttgtctcctcaagaacaatctgccagttatcaagacaggaggcaatcctggcggcgagcaagtatgaaagaaacgaaccggcggaagtcgctgcatcccattcaccagggcatcacagagctcagccggtctatcagtgtcgatttagcagaaagcaaacggcttggctgtctcctgctttccagtttccagttctctattcagaaacttgaacctttcctaagggacactaagggcttcagtcttgaaagttttagagccaaagcatcttctctttctgaagaattgaaacattttgcagacggactggaaactgatggaactctacaaaaatgttttgaagattcaaatggaaaagcatcagatttttctttggaagcatctgtggctgagatgaaggaatacataacaaagttttctttagaacgtcagacttgggatcagctcttgcttcactaccagcaggaggctaaagagatattgtccagaggatcaactgaggccaaaattactgaggtcaaagtggaacctatgacatatcttgggtcttctcagaatgaagttcttaatacaaaacctgactaccagaaaatattacagaaccagagcaaagtctttgactgtatggagttggtgatggatgaactgcaaggatcagtgaaacagctgcaggcctttatggatgaaagtacccagtgcttccagaaggtgtcagtacagctcggaaagagaagcatgcaacaattagatccctcaccagctcgaaaactgttgaagcttcagctacagaacccacctgccatacatggatctggatctggatcttgtcagtgactttatgagagtttctgccacaaggtgcccaagaggagaggaatgggaagagtgccccagcacgtggtgactgcgtgatttctgctcgttgcctttgaagataactggcaggactgactgtagaacactttgacttttttcaaaaagtgatggaatttgtacatccaaatgaatattgtatagacaattttcccaggaatgtgcaaaatgcttgaaagttcaaacttcttttttgaaatgatcttcagatccagtggcccattcttttatctttatcctgtgaaggtgtttttcaggttttgaaacaatccaaaaatcatttaggaccaagtctaaggaaacattttagtggccaagttggattccgattgtaaaggaatgatactaattttctagcatggctctgaaggtgattttaggtagaagagttttgaggctgggcgcaatggctcacgcctgtaatcctagcattttgggtgactgaggcgggtggattgcttgagcccagaagttgaagaccagcctgagaaataaggtgaaaccctgtctacaaaaaatacaaaaagttagctgggtgtggtggcgtgtgcctgtagtgctagctactcagaaggctgaggtgggaggattgtttgagcccaggaggttgaggctgcagtgagttctaattgcgccactgcactccagcctgagcgacagagtgagacactgtcttaaaaaaaattaaaaattgtaaaaaaatgaaaaaaaaagttttgagcattatttgcatcattgggatacatatgtcacttcacaagatgttcaatttgaaggaaataccactcattctctatgtcctgttgtctgtagtgtgcttcagtttttcatattgagttgacctaaatcctggattcatgacaagaaaggagtaagtactactattcattgttctatttgtttataatctgtattataaaattgcacataattaaaagctttcccttgtcttcatcta

SEQ ID NO: 28361 - protein, 356 aa, Homo sapiens; identical to SEQ ID NO: 28357

SEQ ID NO: 28362 - DNA, 2079 bp, Homo sapiens
gagtttcggaggcggtgaccgtgacgtagaaggtggagaccgcttcaccctgatcagggagtatcggctgcgggtgcgcaaggcgtccaggagtgacctggggctgtggagagcgacccgtggccttgtgtttcagagtttaccacctaggatgacttcagtgactagatcagagatcatagatgaaaaaggaccagtgatgtctaagactcatgatcatcaattggaatcaagtctcagtcctgtggaagtgtttgctaaaacaatctgccagttatcaagacaggaggcaatcctggcggcgagcaagtatgaaagaaacgaaccggcggaagtcgctgcatcccattcaccagggcatcacagagctcagccggtctatcagtgtcgatttagcagaaagcaaacggcttggctgtctcctgctttccagtttccagttctctattcagaaacttgaacctttcctaagggacactaagggcttcagtcttgaaagttttagagccaaagcatcttctctttctgaagaattgaaacattttgcagacggactggaaactgatggaactctacaaaaatgttttgaagattcaaatggaaaagcatcagatttttctttggaagcatctgtggctgagatgaaggaatacataacaaagttttctttagaacgtcagacttgggatcagctcttgcttcactaccagcaggaggctaaagagatattgtccagaggatcaactgaggccaaaattactgaggtcaaagtggaacctatgacatatcttgggtcttctcagaatgaagttcttaatacaaaacctgactaccagaaaatattacagaaccagagcaaagtctttgactgtatggagttggtgatggatgaactgcaaggatcagtgaaacagctgcaggcctttatggatgaaagtacccagtgcttccagaaggtgtcagtacagctcggaaagagaagcatgcaacaattagatccctcaccagctcgaaaactgttgaagcttcagctacagaacccacctgccatacatggatctggatctggatcttgtcagtgactttatgagagtttctgccacaaggtgcccaagaggagaggaatgggaagagtgccccagcacgtggtgactgcgtgatttctgctcgttgcctttgaagataactggcaggactgactgtagaacactttgacttttttcaaaaagtgatggaatttgtacatccaaatgaatattgtatagacaattttcccaggaatgtgcaaaatgcttgaaagttcaaacttcttttttgaaatgatcttcagatccagtggcccattcttttatctttatcctgtgaaggtgtttttcaggttttgaaacaatccaaaaatcatttaggaccaagtctaaggaaacattttagtggccaagttggattccgattgtaaaggaatgatactaattttctagcatggctctgaaggtgattttaggtagaagagttttgaggctgggcgcaatggctcacgcctgtaatcctagcattttgggtgactgaggcgggtggattgcttgagcccagaagttgaagaccagcctgagaaataaggtgaaaccctgtctacaaaaaatacaaaaagttagctgggtgtggtggcgtgtgcctgtagtgctagctactcagaaggctgaggtgggaggattgtttgagcccaggaggttgaggctgcagtgagttctaattgcgccactgcactccagcctgagcgacagagtgagacactgtcttaaaaaaaattaaaaattgtaaaaaaatgaaaaaaaaagttttgagcattatttgcatcattgggatacatatgtcacttcacaagatgttcaatttgaaggaaataccactcattctctatgtcctgttgtctgtagtgtgcttcagtttttcatattgagttgacctaaatcctggattcatgacaagaaaggagtaagtactactattcattgttctatttgtttataatctgtattataaaattgcacataattaaaagctttcccttgtcttcatcta

SEQ ID NO: 28363 - protein, 289 aa, Homo sapiens
MIINWNQVSVLWKCLLKQSASYQDRRQSWRRASMKETNRRKSLHPIHQGITELSRSISVDLAESKRLGCLLLSSFQFSIQKLEPFLRDTKGFSLESFRAKASSLSEELKHFADGLETDGTLQKCFEDSNGKASDFSLEASVAEMKEYITKFSLERQTWDQLLLHYQQEAKEILSRGSTEAKITEVKVEPMTYLGSSQNEVLNTKPDYQKILQNQSKVFDCMELVMDELQGSVKQLQAFMDESTQCFQKVSVQLGKRSMQQLDPSPARKLLKLQLQNPPAIHGSGSGSCQ

SEQ ID NO: 28364 - DNA, 1919 bp, Homo sapiens
gcatgcgcccttggttggcgggagtttcggaggcggtgaccgtgacgtagaaggtggagaccgcttcaccctgatcagggagtatcggctgcgggtgcgcaaggcgtccaggagtgacctggggctgtggagagcgacccgtggccttgtgtttcagagtttaccacctaggatgacttcagtgactagatcagagatcatagatgagctcagccggtctatcagtgtcgatttagcagaaagcaaacggcttggctgtctcctgctttccagtttccagttctctattcagaaacttgaacctttcctaagggacactaagggcttcagtcttgaaagttttagagccaaagcatcttctctttctgaagaattgaaacattttgcagacggactggaaactgatggaactctacaaaaatgttttgaagattcaaatggaaaagcatcagatttttctttggaagcatctgtggctgagatgaaggaatacataacaaagttttctttagaacgtcagacttgggatcagctcttgcttcactaccagcaggaggctaaagagatattgtccagaggatcaactgaggccaaaattactgaggtcaaagtggaacctatgacatatcttgggtcttctcagaatgaagttcttaatacaaaacctgactaccagaaaatattacagaaccagagcaaagtctttgactgtatggagttggtgatggatgaactgcaaggatcagtgaaacagctgcaggcctttatggatgaaagtacccagtgcttccagaaggtgtcagtacagctcggaaagagaagcatgcaacaattagatccctcaccagctcgaaaactgttgaagcttcagctacagaacccacctgccatacatggatctggatctggatcttgtcagtgactttatgagagtttctgccacaaggtgcccaagaggagaggaatgggaagagtgccccagcacgtggtgactgcgtgatttctgctcgttgcctttgaagataactggcaggactgactgtagaacactttgacttttttcaaaaagtgatggaatttgtacatccaaatgaatattgtatagacaattttcccaggaatgtgcaaaatgcttgaaagttcaaacttcttttttgaaatgatcttcagatccagtggcccattcttttatctttatcctgtgaaggtgtttttcaggttttgaaacaatccaaaaatcatttaggaccaagtctaaggaaacattttagtggccaagttggattccgattgtaaaggaatgatactaattttctagcatggctctgaaggtgattttaggtagaagagttttgaggctgggcgcaatggctcacgcctgtaatcctagcattttgggtgactgaggcgggtggattgcttgagcccagaagttgaagaccagcctgagaaataaggtgaaaccctgtctacaaaaaatacaaaaagttagctgggtgtggtggcgtgtgcctgtagtgctagctactcagaaggctgaggtgggaggattgtttgagcccaggaggttgaggctgcagtgagttctaattgcgccactgcactccagcctgagcgacagagtgagacactgtcttaaaaaaaattaaaaattgtaaaaaaatgaaaaaaaaagttttgagcattatttgcatcattgggatacatatgtcacttcacaagatgttcaatttgaaggaaataccactcattctctatgtcctgttgtctgtagtgtgcttcagtttttcatattgagttgacctaaatcctggattcatgacaagaaaggagtaagtactactattcattgttctatttgtttataatctgtattataaaattgcacataattaaaagctttcccttgtcttcatcta

SEQ ID NO: 28365 - protein, 249 aa, Homo sapiens
MTSVTRSEIIDELSRSISVDLAESKRLGCLLLSSFQFSIQKLEPFLRDTKGFSLESFRAKASSLSEELKHFADGLETDGTLQKCFEDSNGKASDFSLEASVAEMKEYITKFSLERQTWDQLLLHYQQEAKEILSRGSTEAKITEVKVEPMTYLGSSQNEVLNTKPDYQKILQNQSKVFDCMELVMDELQGSVKQLQAFMDESTQCFQKVSVQLGKRSMQQLDPSPARKLLKLQLQNPPAIHGSGSGSCQ

SEQ ID NO: 28366 - DNA, 2197 bp, Homo sapiens
ggagtttcggaggcggtgaccgtgacgtagaaggtggagaccgcttcaccctgatcagggagtatcggctgcgggtgcgcaaggcgtccaggagtgacctggggctgtggagagcgacccgtggccttgtgtttcagagtttaccacctaggatgacttcagtgactagatcagagatcatagatggtaagtattgtagtgaaattcagtacctcttaccttgggttcaggcttctgagctatacccaaatctttcctggctcctggtagatttggaatcacatactcattatttgcagagatgctttctttatgtttccacgatctaggggcatacatttactttttccacttttttgcacaaatagttgtggcgggcttgatcttgtattttgacttttttataacaaatactagaaaaaggaccagtgatgtctaagactcatgatcatcaattggaatcaagtctcagtcctgtggaagtgtttgctaaaacatctgcctccctggagatgaatcaaggcgtttcagaggaaagaattcaccttggctctagccctaaaaaagggggaaattgtgatctcagccaccaggaaagacttcagtcgaagtcccttcatttgtctcctcaagaacaatctgccagttatcaagacaggaggcaatcctggcggcgagcaagtatgaaagaaacgaaccggcggaagtcgctgcatcccattcaccagggcatcacagagctcagccggtctatcagtgtcgatttagcagaaagcaaacggcttggctgtctcctgctttccagtttccagttctctattcagaaacttgaacctttcctaagggacactaagggcttcagtcttgaaagttttagagccaaagcatcttctctttctgaagaattgaaacattttgcagacggactggaaactgatggaactctacaaaaatgttttgaagattcaaatggaaaagcatcagatttttctttggaagcatctgtggctgagatgaaggaatacataacaaagttttctttagaacgtcagacttgggatcagctcttgcttcactaccagcaggaggctaaagagatattgtccagaggatcaactgaggccaaaattactgaggtcaaagtggaacctatgacatatcttgggtcttctcagaatgaagttcttaatacaaaacctgactaccagaaaatattacagaaccagagcaaagtctttgactgtatggagttggtgatggatgaactgcaaggatcagtgaaacagctgcaggcctttatggatgaaagtacccagtgcttccagaaggtgtcagtacagctcggaaagagaagcatgcaacaattagatccctcaccagctcgaaaactgttgaagcttcagctacagaacccacctgccatacatggatctggatctggatcttgtcagtgactttatgagagtttctgccacaaggtgcccaagaggagaggaatgggaagagtgccccagcacgtggtgactgcgtgatttctgctcgttgcctttgaagataactggcaggactgactgtagaacactttgacttttttcaaaaagtgatggaatttgtacatccaaatgaatattgtatagacaattttcccaggaatgtgcaaaatgcttgaaagttcaaacttcttttttgaaatgatcttcagatccagtggcccattcttttatctttatcctgtgaaggtgtttttcaggttttgaaacaatccaaaaatcatttaggaccaagtctaaggaaacattttagtggccaagttggattccgattgtaaaggaatgatactaattttctagcatggctctgaaggtgattttaggtagaagagttttgaggctgggcgcaatggctcacgcctgtaatcctagcattttgggtgactgaggcgggtggattgcttgagcccagaagttgaagaccagcctgagaaataaggtgaaaccctgtctacaaaaaatacaaaaagttagctgggtgtggtggcgtgtgcctgtagtgctagctactcagaaggctgaggtgggaggattgtttgagcccaggaggttgaggctgcagtgagttctaattgcgccactgcactccagcctgagcgacagagtgagacactgtcttaaaaaaaattaaaaattgtaaaaaaatg

SEQ ID NO: 28367 - protein, 340 aa, Homo sapiens
MSKTHDHQLESSLSPVEVFAKTSASLEMNQGVSEERIHLGSSPKKGGNCDLSHQERLQSKSLHLSPQEQSASYQDRRQSWRRASMKETNRRKSLHPIHQGITELSRSISVDLAESKRLGCLLLSSFQFSIQKLEPFLRDTKGFSLESFRAKASSLSEELKHFADGLETDGTLQKCFEDSNGKASDFSLEASVAEMKEYITKFSLERQTWDQLLLHYQQEAKEILSRGSTEAKITEVKVEPMTYLGSSQNEVLNTKPDYQKILQNQSKVFDCMELVMDELQGSVKQLQAFMDESTQCFQKVSVQLGKRSMQQLDPSPARKLLKLQLQNPPAIHGSGSGSCQ

SEQ ID NO: 28368 - DNA, 234 bp, Homo sapiens
cagtcctgtggaagtgtttgctaaaacatctgcctccctggagatgaatcaaggcgtttcagaggaaagaattcaccttggctctagccctaaaaaagggggaaattgtgatctcagccaccaggaaagacttcagtcgaagtcccttcatttgtctctcaagcgatcctcctgcctctgcctcccaaagtgctgggattacagccatgagcccccacacccagcggattcagc

SEQ ID NO: 28369 - protein, 62 aa, Homo sapiens
MNQGVSEERIHLGSSPKKGGNCDLSHQERLQSKSLHLSLKRSSCLCLPKCWDYSHEPPHPAD

SEQ ID NO: 28370 - DNA, 2780 bp, Homo sapiens
ctctcctcacccccttcactagtcttcatgaatagcaaggaggccataacataatttggtctaaaccccttcctttttaaaagaatgatggcaaaatgtgcataacattaaatttaccattttaaagatttctaagtgtctcgaagtacatttgcaatgtgtaactgccacctccagaactttttcatcatcctaaactgaaactctgtacccactaaacagtaactccccactccccctgtccccagtccctggtaacctctattctactttttttttttctctgtggattggcctattctaggtatctcttttaagtagaatcatatagtatttgtccttttgtgtccagccccctcattttttgagatgaggaatcaggcccagagaaggcagtggctcacccaaggtcacatcgcaaaccagaggcagagccaagaccagaacccaggtttcctgactcctaacaggtcttgcatccccagtagtgaatgagacactgctttgactttctgtaatcttggtttagccccttcctttctctgggctcagtctgcttcccaccactcacccattctttctttatcatctccctccaaagcctcttgtcctcctgcctcctcttctccttggctggttcctgccagcaaatggagtggccctggtccatgccaggttttcctcttctgggtccggagctcactatagtattcagccctcagtcctcccaggatgttcttcccagcactgctgcctcgtgcggattttcccgtaacctcagtaactggcttcttgtccccctgcttcctaccagggaagccttcctgtccgcgtctgtggtttcccaactctgatatttgctctcaaatgtggtggtgtcctggttctgtgtttatttattttgtgttttctcacacacacaaaaaaaagcctcttcctccaatgcatcaggaggcaccagccctgccagcccttctcactgggctcaccctgccccagcaaccccccggtgccacccttaagccacactgtcttctctgtaagcagcctgccagcagcagccccagcactttgcaatgggcgtgtgtgtggtggtgggtggggggggcttggatccctcctttttcctcccctgccctgcccaggcccagatggccttgactgtaaagcaggtgctgcctgacaggttcttctctccctgtctctggtcattgatccatctctttgtccattcagtatccaaccatcctctccattctcctctggacctcaccactctcagagctgcttgtctggctgccttgtcactctttatttggaagccactcaaaccattcccaagaagagggacctcagctggcaatctggaaacctggcccaggtctgggcagatgtcttcacttctcctaccttcccagtcttgtgatcctgtgatgagcaccaggatggccctgtggtccctagagcacccctcatgctgtagggtcctgcagccccatcctttctctactgggccctggtatcctggctcctctctcagctctgccactgatctctgtgccttagtttacttctctgcacgggggactcaccccaagaccatttccagcagcttcccaggtgatgtggtgccccaaggctgggctttgccagctgtggcccagctccttagtgctgcccaggagacaccaggctgctcagaatgaggtgactgcgggcaccattctcagccagtggttcttgtattgcattccagcagcaggaatatcacctgggaacttgatagaagtgcagattagcagccccacccaagacccactgaattagagcttgtggagtggggccctacaagctggggttttaaggagccctccaaatgattctgacgcataagaatatgccaactgctgatctgggctagccattagtagagcctggggagggactgggactggctaggccaagaacaggtggaaaacaccagccttatctggactcctgagattgggaaccaccaccaacaaaaaccaaccctatagtcgctcctcttggaagaggaagagaagttgaagggcctggagaaagcacacattgtttgtttccctgctcctgctcacctctctcacttgtcttggttttacaaaaggctgtgtggatggtgccagccagggagggggtgggagtcctggggaggcaggaggcagaagaccctgactgtttctcccttgggaacctcaccataggccagatagcgcctcttcaaactgaaagaaatcttaactccacaaagaaagcatcctaaatccccagttcctcctcctcccaaccccagggataccttgtagacagtgccaaaaaacagctccaacccccagcagctgggaagagagccagaagctgcccttcctcctcatcctggcccctccccagcccccgccaatactgtgaacccccttcccactcagcctggtttcctggtgagggtcctgcagtcatgggccctgggggacccccagggcaaggcccatgggagggaagggaccaagggcatccttgggccaactgtccacctctcttgtccactattctctcctttccacttctgtcttcaaaaggctccttcctaggatggatcgggtgctaggacaactgcagtccaatccaccagctctccctgcccctgtgtcttatttcagacatgagaataactgtacagtgtaaacttataaagcgtttttaatggttgtagattggaaataaagtatgtcatatgaacagct

SEQ ID NO: 28371 - protein, 209 aa, Homo sapiens
MGVCVVVGGGGLDPSFFLPCPAQAQMALTVKQVLPDRFFSPCLWSLIHLFVHSVSNHPLHSPLDLTTLRAACLAALSLFIWKPLKPFPRRGTSAGNLETWPRSGQMSSLLLPSQSCDPVMSTRMALWSLEHPSCCRVLQPHPFSTGPWYPGSSLSSATDLCALVYFSARGTHPKTISSSFPGDVVPQGWALPAVAQLLSAAQETPGCSE

SEQ ID NO: 28372 - DNA, 3851 bp, Homo sapiens
tagccaggtgtggtggcacatgcctgtaatcccagctacttgggaggctgaggcaggagaatcacttgaacctggtggggagcagcggttgcagtgagccgagattgtgccattgcgctctagcctgggcaacggaatgagacttgtctcaaaaaaaataaaaaataaaaccagccctccccgggggatcttaggcactattggccacaccattggtgttcgtggccctgattattaggctatcttttggtgtaattcccataatcatgcaattaagttttactcttgagtttcctgacagccattggtaaaaagagaaacacatcaggatttataatttttatcatccaattatgggaagcaagcatgttggccccaggagacgaactcttctactaatttatagcatgtatcctttcatcaagggccactgagccagttggtgagtcaacgggtgaacctaagatgcaaggatgttttccaggtgactatttaaaaaaataaataatccaccaacgtgattgaccttggcgagatcatgtttctagtctatacctcagtttccccatctgtaaagtgaggataatgtcccaccccatgtaactgtggtgaggaccaactgcaacactgtgcctgcgagtctccttggaaaagtgtaaggttctacacaaatggaaagtgatctgatcacactcagtgtccccagcccagcctttcagtgccctggccctggggtgggggacaatactctcctcacccccttcactagtcttcatgaatagcaaggaggccataacataatttggtctaaaccccttcctttttaaaagaatgatggcaaaatgtgcataacattaaatttaccattttaaagatttctaagtgtctcgaagtacatttgcaatgtgtaactgccacctccagaactttttcatcatcctaaactgaaactctgtacccactaaacagtaactccccactccccctgtccccagtccctggtaacctctattctactttttttttttctctgtggattggcctattctaggtatctcttttaagtagaatcatatagtatttgtccttttgtgtccagccccctcattttttgagatgaggaatcaggcccagagaaggcagtggctcacccaaggtcacatcgcaaaccagaggcagagccaagaccagaacccaggtttcctgactcctaacaggtcttgcatccccagtagtgaatgagacactgctttgactttctgtaatcttggtttagccccttcctttctctgggctcagtctgcttcccaccactcacccattctttctttatcatctccctccaaagcctcttgtcctcctgcctcctcttctccttggctggttcctgccagcaaatggagtggccctggtccatgccaggttttcctcttctgggtccggagctcactatagtattcagccctcagtcctcccaggatgttcttcccagcactgctgcctcgtgcggattttcccgtaacctcagtaactggcttcttgtccccctgcttcctaccagggaagccttcctgtccgcgtctgtggtttcccaactctgatatttgctctcaaatgtggtggtgtcctggttctgtgtttatttattttgtgttttctcacacacacaaaaaaaagcctcttcctccaatgcatcaggaggcaccagccctgccagcccttctcactgggctcaccctgccccagcaaccccccggtgccacccttaagccacactgtcttctctgtaagcagcctgccagcagcagccccagcactttgcaatgggcgtgtgtgtggtggtgggtggggggggcttggatccctcctttttcctcccctgccctgcccaggcccagatggccttgactgtaaagcaggtgctgcctgacaggttcttctctccctgtctctggtcattgatccatctctttgtccattcagtatccaaccatcctctccattctcctctggacctcaccactctcagagctgcttgtcctggcagaatctacagttcaccccaactctatgccttacccctcccaacccaacagcatttgcagtttgcaaaatatacagacccaagtcctgaggggactgaggacatgatgctgggcccaagtctcctgctcagggcttctctccaatgccagccctgccactccttcctcaccctccttggagcctcctctgctgcttgtctatcccaacggccctgctcccctcccttcctgcccttcaccagctttctggacaccatgccctgaggaagggacctttggttttctctaaacatctttgaagggctgaggcagtcagggctggctgccttgtcactctttatttggaagccactcaaaccattcccaagaagagggacctcagctggcaatctggaaacctggcccaggtctgggcagatgtcttcacttctcctaccttcccagtcttgtgatcctgtgatgagcaccaggatggccctgtggtccctagagcacccctcatgctgtagggtcctgcagccccatcctttctctactgggccctggtatcctggctcctctctcagctctgccactgatctctgtgccttagtttacttctctgcacgggggactcaccccaagaccatttccagcagcttcccaggtgatgtggtgccccaaggctgggctttgccagctgtggcccagctccttagtgctgcccaggagacaccaggctgctcagaatgaggtgactgcgggcaccattctcagccagtggttcttgtattgcattccagcagcaggaatatcacctgggaacttgatagaagtgcagattagcagccccacccaagacccactgaattagagcttgtggagtggggccctacaagctggggttttaaggagccctccaaatgattctgacgcataagaatatgccaactgctgatctgggctagccattagtagagcctggggagggactgggactggctaggccaagaacaggtggaaaacaccagccttatctggactcctgagattgggaaccaccaccaacaaaaaccaaccctatagtcgctcctcttggaagaggaagagaagttgaagggcctggagaaagcacacattgtttgtttccctgctcctgctcacctctctcacttgtcttggttttacaaaaggctgtgtggatggtgccagccagggagggggtgggagtcctggggaggcaggaggcagaagaccctgactgtttctcccttgggaacctcaccataggccagatagcgcctcttcaaactgaaagaaatcttaactccacaaagaaagcatcctaaatccccagttcctcctcctcccaaccccagggataccttgtagacagtgccaaaaaacagctccaacccccagcagctgggaagagagccagaagctgcccttcctcctcatcctggcccctccccagcccccgccaatactgtgaacccccttcccactcagcctggtttcctggtgagggtcctgcagtcatgggccctgggggacccccagggcaaggcccatgggagggaagggaccaagggcatccttgggccaactgtccacctctcttgtccactattctctcctttccacttctgtcttcaaaaggctccttcctaggatggatcgggtgctaggacaactgcagtccaatccaccagctctccctgcccctgtgtcttatttcagacatgagaataactgtacagtgtaaacttataaagcgtttttaatggttgtagattggaaataaagtatgtcatatgaacagct

SEQ ID NO: 28373 - protein, 161 aa, Homo sapiens [sequence omitted]

SEQ ID NO: 28374 - DNA, 4182 bp, Homo sapiens
tctcatcccagagcatgagaagtcactgagtttagatgagaacttgggtccaactctgtcctgtttgctgtgcaaatccgctgccctgctgggggcttttggtgggtccagaatacccagaatatgctgctggccaacccaggcataaaacaagtccattctagatcactgagccttgtgtattccagagggtgatctgaggtccccattcagcagaattctctgagggcatgttcagaatgtagattcctgggccccaccttgaatttgcatgtttaacaaactctcctggggttgaggggtgggtgcagtggtcacacctgtactcccaaagtactgggattataggcgtgagccacggcatccagcctcatctttcttttaaccaataaacatgatgctgtatcttaaaaagagcactgagcagggacttaagggatcgagtcctcaaccaaactgatttaattactcaggattttcaaaaagcatcagaggctatttacaatcttaatcataggggttcagtaaaataaaaataagaagtaaaaaagcaagagaaattattctgtaaatctaactggtgtaattcccataatcatgcaattaagttttactcttgagtttcctgacagccattggtaaaaagagaaacacatcaggatttataatttttatcatccaattatgggaagcaagcatgttggccccaggagacgaactcttctactaatttatagcatgtatcctttcatcaagggccactgagccagttggtgagtcaacgggtgaacctaagatgcaaggatgttttccaggtgactatttaaaaaaataaataatccaccaacgtgattgaccttggcgagatcatgtttctagtctatacctcagtttccccatctgtaaagtgaggataatgtcccaccccatgtaactgtggtgaggaccaactgcaacactgtgcctgcgagtctccttggaaaagtgtaaggttctacacaaatggaaagtgatctgatcacactcagtgtccccagcccagcctttcagtgccctggccctggggtgggggacaatactctcctcacccccttcactagtcttcatgaatagcaaggaggccataacataatttggtctaaaccccttcctttttaaaagaatgatggcaaaatgtgcataacattaaatttaccattttaaagatttctaagtgtctcgaagtacatttgcaatgtgtaactgccacctccagaactttttcatcatcctaaactgaaactctgtacccactaaacagtaactccccactccccctgtccccagtccctggtaacctctattctactttttttttttctctgtggattggcctattctaggtatctcttttaagtagaatcatatagtatttgtccttttgtgtccagccccctcattttttgagatgaggaatcaggcccagagaaggcagtggctcacccaaggtcacatcgcaaaccagaggcagagccaagaccagaacccaggtttcctgactcctaacaggtcttgcatccccagtagtgaatgagacactgctttgactttctgtaatcttggtttagccccttcctttctctgggctcagtctgcttcccaccactcacccattctttctttatcatctccctccaaagcctcttgtcctcctgcctcctcttctccttggctggttcctgccagcaaatggagtggccctggtccatgccaggttttcctcttctgggtccggagctcactatagtattcagccctcagtcctcccaggatgttcttcccagcactgctgcctcgtgcggattttcccgtaacctcagtaactggcttcttgtccccctgcttcctaccagggaagccttcctgtccgcgtctgtggtttcccaactctgatatttgctctcaaatgtggtggtgtcctggttctgtgtttatttattttgtgttttctcacacacacaaaaaaaagcctcttcctccaatgcatcaggaggcaccagccctgccagcccttctcactgggctcaccctgccccagcaaccccccggtgccacccttaagccacactgtcttctctgtaagcagcctgccagcagcagccccagcactttgcaatgggcgtgtgtgtggtggtgggtggggggggcttggatccctcctttttcctcccctgccctgcccaggcccagatggccttgactgtaaagcaggtgctgcctgacaggttcttctctccctgtctctggtcattgatccatctctttgtccattcagtatccaaccatcctctccattctcctctggacctcaccactctcagagctgcttgtcctggcagaatctacagttcaccccaactctatgccttacccctcccaacccaacagcatttgcagtttgcaaaatatacagacccaagtcctgaggggactgaggacatgatgctgggcccaagtctcctgctcagggcttctctccaatgccagccctgccactccttcctcaccctccttggagcctcctctgctgcttgtctatcccaacggccctgctcccctcccttcctgcccttcaccagctttctggacaccatgccctgaggaagggacctttggttttctctaaacatctttgaagggctgaggcagtcagggctggctgccttgtcactctttatttggaagccactcaaaccattcccaagaagagggacctcagctggcaatctggaaacctggcccaggtctgggcagatgtcttcacttctcctaccttcccagtcttgtgatcctgtgatgagcaccaggatggccctgtggtccctagagcacccctcatgctgtagggtcctgcagccccatcctttctctactgggccctggtatcctggctcctctctcagctctgccactgatctctgtgccttagtttacttctctgcacgggggactcaccccaagaccatttccagcagcttcccaggtgatgtggtgccccaaggctgggctttgccagctgtggcccagctccttagtgctgcccaggagacaccaggctgctcagaatgaggtgactgcgggcaccattctcagccagtggttcttgtattgcattccagcagcaggaatatcacctgggaacttgatagaagtgcagattagcagccccacccaagacccactgaattagagcttgtggagtggggccctacaagctggggttttaaggagccctccaaatgattctgacgcataagaatatgccaactgctgatctgggctagccattagtagagcctggggagggactgggactggctaggccaagaacaggtggaaaacaccagccttatctggactcctgagattgggaaccaccaccaacaaaaaccaaccctatagtcgctcctcttggaagaggaagagaagttgaagggcctggagaaagcacacattgtttgtttccctgctcctgctcacctctctcacttgtcttggttttacaaaaggctgtgtggatggtgccagccagggagggggtgggagtcctggggaggcaggaggcagaagaccctgactgtttctcccttgggaacctcaccataggccagatagcgcctcttcaaactgaaagaaatcttaactccacaaagaaagcatcctaaatccccagttcctcctcctcccaaccccagggataccttgtagacagtgccaaaaaacagctccaacccccagcagctgggaagagagccagaagctgcccttcctcctcatcctggcccctccccagcccccgccaatactgtgaacccccttcccactcagcctggtttcctggtgagggtcctgcagtcatgggccctgggggacccccagggcaaggcccatgggagggaagggaccaagggcatccttgggccaactgtccacctctcttgtccactattctctcctttccacttctgtcttcaaaaggctccttcctaggatggatcgggtgctaggacaactgcagtccaatccaccagctctccctgcccctgtgtcttatttcagacatgagaataactgtacagtgtaaacttataaagcgtttttaatggttgtagattggaaataaagtatgtcatatgaacagct

SEQ ID NO: 28375 - protein, 161 aa, Homo sapiens [sequence omitted]

SEQ ID NO: 28376 - DNA, 5272 bp, Homo sapiens
ggggccctccaaggttatctccaggtgaggggattcacatcaggccacaagccaccagaggccttctgccacctcccagagcgacagccagggaggctgcgtactcagcctcggggagaaatccccgtgggacctgagccccaagacctacggaccactcagccttaccatcgtaccgtccaggattgtccttgccatctttgttgtctcagccagaccttggttttcagtaaagccccagtttctacttcctgcatgccactgtgcaaggccactcatcactgttcctgcagaagcctctggacgtggggctggatggggttgaaaatgttacatgtaaatattggtttggttcggtttttagcattttacttggtaactggttgttttcttttttggggtggggggattggtttgtaaaaattctctactcttttggaatgtgatttctaagtttgttggtttcttcaaatgccttttaagtcttggtaacattcccaaagcagaaaactgcctgacccacagtggggattccctggagaattggggtcccaagaaggaatgctgcccttctcgaacccgttctcccccttcctcctgcctctctgccttttactgctattcccttcttctcctcctttatccttctttctgttttccccatctccactctctcttcaaccaaagtcccaaggaaccctcggggctcaatcccccatagaccacttggcttgggtccatggggttggcatcagttggttggcggaaatgggggaccagttggcatgatggccctaaactgggaaacctcatgtttcttatgtctcacctctttccagagccaaatcagccccttttggaatgatgacttcattggaatgcaaatcaagtcattttggtgcatcagtggctcttaggcctgcacacacgagacatcagaatccaatcctctgaccctgtgccagccctttcccccagtttatttcccaccaaaggctgacctctaagaggtcttgctttctatgaactcaagatgggtcccacctctaggtgtccccaggtgcactcttctaccggttggcttccgatgtgacaaggccaagggcccaaagacttgaccctcttacacccttgctgacatggttccatcatgtccacccgcatgcacttttatggtttcatcacccagcctcttctcctctggcccacccagcgtccaggctctttctccctctcccctcctatctagaatgtcccctgcttctagcctcaccagaccccccaagctcccactacttcttccataataatagtaataacaatggttatcatcatcccctgcacatcccgcctaaagcactttactatatagaaaacgtttccctcctgacctcaggtgatccacccacctcggcctcccaaagtactgggattataggcgtgagccacggcatccagcctcatctttcttttaaccaataaacatgatgctgtatcttaaaaagagcactgagcagggacttaagggatcgagtcctcaaccaaactgatttaattactcaggattttcaaaaagcatcagaggctatttacaatcttaatcataggggttcagtaaaataaaaataagaagtaaaaaagcaagagaaattattctgtaaatctaactggtgtaattcccataatcatgcaattaagttttactcttgagtttcctgacagccattggtaaaaagagaaacacatcaggatttataatttttatcatccaattatgggaagcaagcatgttggccccaggagacgaactcttctactaatttatagcatgtatcctttcatcaagggccactgagccagttggtgagtcaacgggtgaacctaagatgcaaggatgttttccaggtgactatttaaaaaaataaataatccaccaacgtgattgaccttggcgagatcatgtttctagtctatacctcagtttccccatctgtaaagtgaggataatgtcccaccccatgtaactgtggtgaggaccaactgcaacactgtgcctgcgagtctccttggaaaagtgtaaggttctacacaaatggaaagtgatctgatcacactcagtgtccccagcccagcctttcagtgccctggccctggggtgggggacaatactctcctcacccccttcactagtcttcatgaatagcaaggaggccataacataatttggtctaaaccccttcctttttaaaagaatgatggcaaaatgtgcataacattaaatttaccattttaaagatttctaagtgtctcgaagtacatttgcaatgtgtaactgccacctccagaactttttcatcatcctaaactgaaactctgtacccactaaacagtaactccccactccccctgtccccagtccctggtaacctctattctactttttttttttctctgtggattggcctattctaggtatctcttttaagtagaatcatatagtatttgtccttttgtgtccagccccctcattttttgagatgaggaatcaggcccagagaaggcagtggctcacccaaggtcacatcgcaaaccagaggcagagccaagaccagaacccaggtttcctgactcctaacaggtcttgcatccccagtagtgaatgagacactgctttgactttctgtaatcttggtttagccccttcctttctctgggctcagtctgcttcccaccactcacccattctttctttatcatctccctccaaagcctcttgtcctcctgcctcctcttctccttggctggttcctgccagcaaatggagtggccctggtccatgccaggttttcctcttctgggtccggagctcactatagtattcagccctcagtcctcccaggatgttcttcccagcactgctgcctcgtgcggattttcccgtaacctcagtaactggcttcttgtccccctgcttcctaccagggaagccttcctgtccgcgtctgtggtttcccaactctgatatttgctctcaaatgtggtggtgtcctggttctgtgtttatttattttgtgttttctcacacacacaaaaaaaagcctcttcctccaatgcatcaggaggcaccagccctgccagcccttctcactgggctcaccctgccccagcaaccccccggtgccacccttaagccacactgtcttctctgtaagcagcctgccagcagcagccccagcactttgcaatgggcgtgtgtgtggtggtgggtggggggggcttggatccctcctttttcctcccctgccctgcccaggcccagatggccttgactgtaaagcaggtgctgcctgacaggttcttctctccctgtctctggtcattgatccatctctttgtccattcagtatccaaccatcctctccattctcctctggacctcaccactctcagagctgcttgtcctggcagaatctacagttcaccccaactctatgccttacccctcccaacccaacagcatttgcagtttgcaaaatatacagacccaagtcctgaggggactgaggacatgatgctgggcccaagtctcctgctcagggcttctctccaatgccagccctgccactccttcctcaccctccttggagcctcctctgctgcttgtctatcccaacggccctgctcccctcccttcctgcccttcaccagctttctggacaccatgccctgaggaagggacctttggttttctctaaacatctttgaagggctgaggcagtcagggctggctgccttgtcactctttatttggaagccactcaaaccattcccaagaagagggacctcagctggcaatctggaaacctggcccaggtctgggcagatgtcttcacttctcctaccttcccagtcttgtgatcctgtgatgagcaccaggatggccctgtggtccctagagcacccctcatgctgtagggtcctgcagccccatcctttctctactgggccctggtatcctggctcctctctcagctctgccactgatctctgtgccttagtttacttctctgcacgggggactcaccccaagaccatttccagcagcttcccaggtgatgtggtgccccaaggctgggctttgccagctgtggcccagctccttagtgctgcccaggagacaccaggctgctcagaatgaggtgactgcgggcaccattctcagccagtggttcttgtattgcattccagcagcaggaatatcacctgggaacttgatagaagtgcagattagcagccccacccaagacccactgaattagagcttgtggagtggggccctacaagctggggttttaaggagccctccaaatgattctgacgcataagaatatgccaactgctgatctgggctagccattagtagagcctggggagggactgggactggctaggccaagaacaggtggaaaacaccagccttatctggactcctgagattgggaaccaccaccaacaaaaaccaaccctatagtcgctcctcttggaagaggaagagaagttgaagggcctggagaaagcacacattgtttgtttccctgctcctgctcacctctctcacttgtcttggttttacaaaaggctgtgtggatggtgccagccagggagggggtgggagtcctggggaggcaggaggcagaagaccctgactgtttctcccttgggaacctcaccataggccagatagcgcctcttcaaactgaaagaaatcttaactccacaaagaaagcatcctaaatccccagttcctcctcctcccaaccccagggataccttgtagacagtgccaaaaaacagctccaacccccagcagctgggaagagagccagaagctgcccttcctcctcatcctggcccctccccagcccccgccaatactgtgaacccccttcccactcagcctggtttcctggtgagggtcctgcagtcatgggccctgggggacccccagggcaaggcccatgggagggaagggaccaagggcatccttgggccaactgtccacctctcttgtccactattctctcctttccacttctgtcttcaaaaggctccttcctaggatggatcgggtgctaggacaactgcagtccaatccaccagctctccctgcccctgtgtcttatttcagacatgagaataactgtacagtgtaaacttataaagcgtttttaatggttgtagattggaaataaagtatgtcatatgaacagct

SEQ ID NO: 28377 - protein, 161 aa, Homo sapiens [sequence omitted]

SEQ ID NO: 28378 - DNA, 3821 bp, Homo sapiens
ctggaggtgttgtgttgtttattccacagatgggaaaactgtggccagagtgggtcccagagcagggtcgctaggctgccagggcttggagtaagcatgtgttagactcttgatgtgttttctgcctttctggactactttgcctctaagatgcagaaactgagtacaagggaaaggactccaaatccccagtatgtcccctgcaggagcagagttgaaggaggtcccaccaggtctggtgggtggccctgctcaggcttacctcccccttgtaggggtcactgggaactgtcaactgcgaaggactgtgatctccagtctggtatggtctgctctggggtccaagtgaggaaagcataaatcgggcaactctctcccagtgagaagatagaaggagcttctacagagaaggacgagattgaggagctgcgggccgagatgctggagatgcgggacgtctatatggaggaggacgtgtatcagctgcaggagctgcgacagcagctggaccaggccagcaagacctgccgcatcctgcagtaccggctgcgcaaagccgagcgccgcagtctccgtgccgcccagaccggccaggtggacggcgagcttatccgtggtctggagcaggatgtcaaggtctctaaggacatctccatgcggctgcataaggagctcgaggtggtggagaagaaacgggcgcggctggaggaggagaacgaagagcttcgtcagcggctcatcgagactgagctggctaagcaggtgctgcagacggagctggagcgaccgagagagcattccttgaagaaaagaggaacccgctccctggggaaggccgataagaagactttggtgcaggaggacagtgcagacctgaagtgccagttgcactttgcaaaggaggagtcagccctcatgtgcaagaagctcactaagcttgccaaggagaatgacagcatgaaggaggagctgctgaagtaccgctcgctctatggggacctggacagcgcgctgtcagccgaggagctggccgatgccccccactcgcgggagaccgagctgaaggtgcacctgaagctggtggaggaggaagccaacctgctgagccgccgcatcgtggagctggaggtggagaaccgaggcctgcgggctgagatggacgacatgaaggatcatggaggtggctgtgggggtcctgaggcacgcctggccttctccgcgctgggtggcggagagtgcggggagagcttggcagagctgcggcgacacctgcagtttgtcgaagaggaggccgagctgctgcggcgctcctctgccgagctcgaggaccagaacaagctgctgctgaacgagctggccaagttccgctcggagcacgagctggacgtggcgctgtcggaggacagttgttctgtgctcagcgaaccttcacaggaggagctggcggccgccaagctgcagatcggcgagctcagcggcaaggtcaagaagctgcagtacgagaaccgcgtgctcctctccaacctccagcgctgtgacctcgcctcctgccagagtacgcggcccatgctggagacggacgccgaggccggggactctgcccagtgtgtgcctgctcccctgggcgagacacacgagtcccatgcggtccgactctgcagagccagggaggccgaggtgctgcctgggctgagagagcaggccgccctggtcagtaaggccatcgatgtcctggtggctgatgccaatggcttcacggctggcctccggctgtgtctggacaacgagtgtgctgacttccggctgcatgaggcccccgacaacagcgagggccccagggacaccaagctcatccatgccatcctggtgcgcctgagcgtgctgcagcaggagctgaatgccttcacgcggaaggcagatgcagtcctcgggtgctctgtcaaggaacagcaggagtccttctcatcactgccccccttgggctcccaggggctctctaaggagattcttctggcaaaagaccttggctcagactttcagccacctgacttcagggacctgccggaatgggagcccaggatccgagaggctttccgcactggtgacttggactctaagcccgaccccagccggagcttcaggccttaccgagctgaagacaatgattcctatgcctctgagatcaaggagctgcagctggtgctggctgaggcccacgacagcctccggggcttgcaagagcagctctcccaggagcggcagctacgaaaggaggaggccgacaatttcaaccagaaaatggtccagctgaaggaggaccagcagagggcgctcctgaggcgggagtttgagctgcagagtctgagcctccagcggaggctggagcagaaattctggagccaggagaagaacatgctggtgcaggagtcccagcaattcaagcacaacttcctgctgctcttcatgaagctcaggtggttcctcaagcgctggcggcagggcaaggttttgcccagcgaaggggatgacttcctcgaggtgaacagcatgaaggagctgtacttgctgatggaggaagaggagataaacgctcagcattctgataacaaggcctgcacgggggacagctggacccagaacacgcccaatgagtacatcaagacactggccgacatgaaggtgacgctgaaggagctgtgctggctgctccgggatgaacgccgtggtctgacggagcttcagcaacagtttgccaaggccaaggctacctgggagacagagcgggcagagctcaagggccatacctcccagatggagctgaagacagggaagggggccggggagcgggcagggcccgactggaaggcagccctacagcgggagcgtgaggagcagcagcacctcctagctgagtcctacagcgctgtcatggagctgactcggcagctgcagatcagtgagcgcaactggagccaggaaaagctgcagctggtggagcggctgcagggtgagaagcagcaggtggagcagcaggtgaaggagctgcagaaccgcctaagccagctgcagaaggctgccgacccctgggtcctgaagcactcggagctggagaagcaggacaacagctggaaggagacacgcagtgagaagatccacgacaaggaggctgtttccgaagttgagcttggaggaaatggtttaaagagaaccaaatctgtttcttccatgtctgagtttgaaagtttgctcgactgttccccttaccttgctggcggagatgcccggggcaagaagctgcctaacaaccctgcctttggctttgtgagctccgagccaggggatccagagaaagacaccaaggagaagcctgggctctcgtcgagggactgcaaccacctgggtgccctggcctgccaggaccccccagggagccagaagctgcccttcctcctcatcctggcccctccccagcccccgccaatactgtgaacccccttcccactcagcctggtttcctggtgagggtcctgcagtcatgggccctgggggacccccagggcaaggcccatgggagggaagggaccaagggcatccttgggccaactgtccacctctcttgtccactattctctcctttccacttctgtcttcaaaaggctccttcctaggatggatcgggtgctaggacaactgcagtccaatccaccagctctccctgcccctgtgtcttatttcagacatgagaataactgtacagtgtaaacttataaagcgtttttaatggttgtagattggaaataaagtatgtcatatgaacagct

SEQ ID NO: 28379 - protein, 1016 aa, Homo sapiens; identical to SEQ ID NO: 5250

SEQ ID NO: 28380 - DNA, 892 bp, Homo sapiens
aacaccattagagcacctggtatgtagtaaacctctgatcactgctcttgtcagaggcacgggacatgtttccatgtgcacccagcctgttctcttgtggattctgtgagggcagaatagatcctcttcatcacccaaggcaggctgggctctttctcctggcccctcattggttcattcggcagctgtttatttagaacctgccgtgtgctagggcagatctgggatacagctgtggacaagggaggatgaggtgtctgttttcatagagcttttggggagaccagaattaaacaatagtcatacaagaaatcacaacacagatcataatgagggtaaaggggacagtttgccaggagcacacgaaggtgggggctggggtgcacagggaggctgagggctgcaggatgccgtggagccaactgagtgagggtctggagtaagaagatttcaggctaagggaaattggaatgctcgttgagttcaagaacagcgctaagagccagaagctgcccttcctcctcatcctggcccctccccagcccccgccaatactgtgaacccccttcccactcagcctggtttcctggtgagggtcctgcagtcatgggccctgggggacccccagggcaaggcccatgggagggaagggaccaagggcatccttgggccaactgtccacctctcttgtccactattctctcctttccacttctgtcttcaaaaggctccttcctaggatggatcgggtgctaggacaactgcagtccaatccaccagctctccctgcccctgtgtcttatttcagacatgagaataactgtacagtgtaaacttataaagcgtttttaatggttgtagattggaaataaagtatgtcatatgaacagct

SEQ ID NO: 28381 - protein, 64 aa, Homo sapiens
MGGKGPRASLGQLSTSLVHYSLLSTSVFKRLLPRMDRVLGQLQSNPPALPAPVSYFRHENNCTV

SEQ ID NO: 28382 - DNA, 1152 bp, Homo sapiens
caagtcctgaggggactgaggacatgatgctgggcccaagtctcctgctcagggcttctctccaatgccagccctgccactccttcctcaccctccttggagcctcctctgctgcttgtctatcccaacggccctgctcccctcccttcctgcccttcaccagctttctggacaccatgccctgaggaagggacctttggttttctctaaacatctttgaagggctgaggcagtcagggctggctgccttgtcactctttatttggaagccactcaaaccattcccaagaagagggacctcagctggcaatctggaaacctggcccaggtctgggcagatgtcttcacttctcctaccttcccagtcttgtgatcctgtgatgagcaccaggatggccctgtggtccctagagcacccctcatgctgtagggtcctgcagccccatcctttctctactgggccctggtatcctggctcctctctcagctctgccactgatctctgtgccttagtttacttctctgcacgggggactcaccccaagaccatttccagcagcttcccaggtgatgtggtgccccaaggctgggctttgccagctgtggcccagctccttagtgctgcccaggagacaccaggctgctcagaatgaggtgactgcgggcaccattctcagccagtggttcttgtattgcattccagcagcaggaatatcacctgggaacttgatagaagtgcagattagcagccccacccaagacccactgaattagagcttgtggagtggggccctacaagctggggttttaaggagccctccaaatgattctgacgcataagaatatgccaactgctgatctgggctagccattagtagagcctggggagggactgggactggctaggccaagaacaggtggaaaacaccagccttatctggactcctgagattgggaaccaccaccaacaaaaaccaaccctatagtcgctcctcttggaagaggaagagaagttgaagggcctggagaaagcacacattgtttctctccctgcccctgtgtcttatttcagacatgagaataactgtacagtgtaaacttataaagcgtttttaatggttgtagattggaaataaagtatgtcatatgaac

SEQ ID NO: 28383 - protein, 104 aa, Homo sapiens
MSSLLLPSQSCDPVMSTRMALWSLEHPSCCRVLQPHPFSTGPWYPGSSLSSATDLCALVYFSARGTHPKTISSSFPGDVVPQGWALPAVAQLLSAAQETPGCSE

SEQ ID NO: 28384 - DNA, 1851 bp, Homo sapiens
cggaggctcagcgggcagcccctcggcggccgggcctggcttcccagcggccctgcatgactttgagatgtcaggcaacatgagtgatgacatgaaggagatcaccaactgtgtgcgccaggccatgcgctccggctcactggagaggaaagtgaagagcacatccagccagacggtgggcctggccagtgtgggcacacagaccatccgcacggtcagcgtgggcctgcagaccgacccaccccgcagcagcctccatggcaaggcctggtcaccccgcagctcttcgctcgtgtctgtgcgcagcaagcagatctcctcctccctggacaaggtccattcgcgcatcgagcggccctgctgctcccccaagtatggctcaccaaagctccagaggcggtctgtgtccaagctggacagcagcaaggaccgcagcctgtggaacctgcaccagggcaagcagaacggctcggcctgggcccgctccaccaccacgcgggacagccctgtattgagaaacatcaacgatggactctccagcctcttcagtgtggtggagcactcagggagcacggagtctgtctggaaactaggcatgtctgagacgcgggccaagcccgagcctcccaagtacggcattgtgcaggaattcttccgtaatgtgtgtggccgggcaccgagccccacctcatcagcaggagaggagggcaccaagaagccagagcccctctccccagccagctaccatcagccagagggtgtggccaggatcctgaacaagaaggcagccaagttgggcagcagtgaggaggtcagactcaccatgctcccccaggtggggaaggatggtgtcctccgggacggagatggagccgtggtccttcccaatgaggacgctgtttgtgactgtagtacccagtctctcacctcctgcttcgcccgatcgtcccgctctgccatccgccactctccttccaagtgcaggctgcacccttcagagtccagctggggtggggaggagagggcactcccccccagcgagtgacagagcagccaagctccccgcctcaaccagcccagcccctggatagcagaagggaaccagcagagacgagacgaggtgaggcgaggggctgtgtcctcagcattgcctggccctggagggacagcagtgatgccactgccagaatgcagctttcacatcaaggtaaagccgggtctcctgctggcccctgggtggtgagcttcgacttcccaggggaaggcagtgagtgggagagagaccaaacctgggcttcccaagcatccactgagagatctgtcaagagccgatccctgggtcctaagagagagccttgcctggttctgcccatgccaccctcttggaagagcccaagaaggatacatgtctggccatgcctttggggaaaaggagtcggagagatgtttcctgctgaccatccaccccttcatttgggaggagacactgctgagaagaacaggctttgctctagggctccatgtttggttcctggtggagccctgttgggcatcatcaccatcacctccttctctccaccacctcctcctcccagccccactgctctagattgctgggacactagggagtatgatagggcagtagccagggccattgcttagtgtcctggagccctggatctccctgcccatagcctggatgcagcaagagctgggaggcgaagtggaaacatgcagggctcagggttggggagtgattgcaattgccttccttgccaaagtgacttggggccccaacgttcccagcagaccccttgaggacagaaataggtagagtcagtctcaagacct

SEQ ID NO: 28385 - protein, 325 aa, Homo sapiens [sequence omitted]

SEQ ID NO: 28386 - DNA, 3533 bp, Homo sapiens
tccggatgctgagacaggagaatctcttgaacctggagggtggaagttgtagtgagccgagatcatgccactgcactccagcctgggtgacagaacaagactctgtctcaagaaaaaaaaaagaaaaaaaaaagccaggtttggtggtgcacacctgtagtcccagctactctggaggctgaaatgggaggatcacttgagcccaggagtttgaggctgcagtgagctattattgcactactgcattccagcctgggtgacatatcaagacctgtttgggagaaaaaaaaaaaaaagaaaatgcagacagaatgtgggactgggcaccaacaacatctctacaagaggtgaacaagacggtcctggtctttgccctcacgcagcacacggaccagggtggtagaccagagtgtgccctcagtgttatttccactaataacgacgtttcctcctctgtccttcgcagaaccaaatctgtttcttccatgtctgagtttgaaagtttgctcgactgttccccttaccttgctggcggagatgcccggggcaagaagctgcctaacaaccctgcctttggctttgtgagctccgagccaggggatccagagaaagacaccaaggagaagcctgggctctcgtcgagggactgcaaccacctgggtgccctggcctgccaggaccccccagggaggcagatgcagcgcagctacacggctcctgacaagacgggcatccgagtctactatagtcccccggtggcccggcgcctcggagtccctgtggttcatgacaaagagggcaagatcattatcgagcccggcttcctcttcaccacagccaagcccaaagagtcggccgaggctgatgggctggctgagagctcctatggtcggtggctctgcaacttctcacggcagcgcctggacggaggctcagcgggcagcccctcggcggccgggcctggcttcccagcggccctgcatgactttgagatgtcaggcaacatgagtgatgacatgaaggagatcaccaactgtgtgcgccaggccatgcgctccggctcactggagaggaaagtgaagagcacatccagccagacggtgggcctggccagtgtgggcacacagaccatccgcacggtcagcgtgggcctgcagaccgacccaccccgcagcagcctccatggcaaggcctggtcaccccgcagctcttcgctcgtgtctgtgcgcagcaagcagatctcctcctccctggacaaggtccattcgcgcatcgagcggccctgctgctcccccaagtatggctcaccaaagctccagaggcggtctgtgtccaagctggacagcagcaaggaccgcagcctgtggaacctgcaccagggcaagcagaacggctcggcctgggcccgctccaccaccacgcgggacagccctgtattgagaaacatcaacgatggactctccagcctcttcagtgtggtggagcactcagggagcacggagtctgtctggaaactaggcatgtctgagacgcgggccaagcccgagcctcccaagtacggcattgtgcaggaattcttccgtaatgtgtgtggccgggcaccgagccccacctcatcagcaggagaggagggcaccaagaagccagagcccctctccccagccagctaccatcagccagagggtgtggccaggatcctgaacaagaaggcagccaagttgggcagcagtgaggaggtcagactcaccatgctcccccaggtggggaaggatggtgtcctccgggacggagatggagccgtggtccttcccaatgaggtaggtgggtgggatctgtcctttctcttagtaggtggagttagtatataaggtccaagctcttttggtttttaagttcagagatatgggccgaggtgggtggatcgcctgagatcaggagttcaagaccagtcatgttggccaggctggtctcgaactcccgacctcaagtgatccgcccaccttggcctcccaaagtgttaggattacaggcgtgagccaccgcgcctggccacatctctgtgtttaacatcaccttggtaccttgagattggccacagtgggaggatttacagcataaaaattggtaaacactacaaatcggggctcctcctatcactcctggaaaactaattgttaaacattagcgggcataccacttctccaccccatcaagacttcacacctaagtgctcacatttcctctgagaatctttcacaccccactcctgctatcagtttcttataagttaattagtaaaccttatttgaatgttagtgagcattatttgaatgtgttagaatgtgcataagttaactttgcagaaagggaaggaaatgtatttgaaggatggcatgttttataaaacccaagagtaggaacctgacaacctcagcagcttctccctgtcttcctctcctctctttaagcttcaccctctctgatatcatattcctcctttttctctgtttctctctctgttgcatttgcacaaggactgggtgggctgtcccagctctgactttacaacatcttccagttcaagcccctaggagagactgacacaaatccctgtctcccaattccacatttctgaaagaaggaaactctgattggtgcagctagaggcgagtgtaccccttggtccagtctatggctgggagtggtaccatgtggtctgctgtggggcacagagacatgagaagggctgtgtgtggaatgggctgtgatagactcaaacattctacttttctattattgtacgtttaggtggtttctagtttgtccctactgcaaataatgctgtggtgaacatcttggtgcaaaatcatttttttacatttcagactatttccttaggtataagttgcagaaatgagccaccgtgcctggcagcagcacttttgatcattatttctgtttattggtaatagtaaaaaattagaaactacccagatgtacataaaaagtgaattggggccaggcacagtggctcacacctgcaatcccaccactttggaaggccgaggcgggcagatcactagaggtcaggagtttgagcctgaccaacatgctaaaatcccctctctactaaaaatacaaaaattagctaggcatggtggcacacgcttgtaatcttagctacttgggaggctgaggcacaagaatcacttgaatccgtgaggtggaggttgtagtgagtcaagatcgtaccactgcactccagcctggggaacagagcaagattctgtctaaaaaataaaaaaataaaaaaagcgaattgggtatataaatcagttatttctatctagtgaaatggtacagagacactaaaaaagaaggcgatcagccaggcatggtggctcatgcctttgggaggcatgagcacccaaaggtgctaattccagcagtttgggaggctgaggcaggaggatcgcttgagcccaggagttcaagaccagcctgagcaacatagtgagaccctgtctcaaacg

SEQ ID NO: 28387 - protein, 518 aa, Homo sapiens
MWDWAPTTSLQEVNKTVLVFALTQHTDQGGRPECALSVISTNNDVSSSVLRRTKSVSSMSEFESLLDCSPYLAGGDARGKKLPNNPAFGFVSSEPGDPEKDTKEKPGLSSRDCNHLGALACQDPPGRQMQRSYTAPDKTGIRVYYSPPVARRLGVPVVHDKEGKIIIEPGFLFTTAKPKESAEADGLAESSYGRWLCNFSRQRLDGGSAGSPSAAGPGFPAALHDFEMSGNMSDDMKEITNCVRQAMRSGSLERKVKSTSSQTVGLASVGTQTIRTVSVGLQTDPPRSSLHGKAWSPRSSSLVSVRSKQISSSLDKVHSRIERPCCSPKYGSPKLQRRSVSKLDSSKDRSLWNLHQGKQNGSAWARSTTTRDSPVLRNINDGLSSLFSVVEHSGSTESVWKLGMSETRAKPEPPKYGIVQEFFRNVCGRAPSPTSSAGEEGTKKPEPLSPASYHQPEGVARILNKKAAKLGSSEEVRLTMLPQVGKDGVLRDGDGAVVLPNEVGGWDLSFLLVGGVSI

SEQ ID NO: 28388 - DNA, 725 bp, Homo sapiens
ggtggctcatacctgttcccagcactttgggaggccaaggcagggagaatcgcttgaagtagggaggaggaggttgcagtgagctgagattgtgccactacactccagcctgggcaacagagtgagactccgtctcaaaaacaacaaaaaaatgaacaccagattattatcttctgatcctggaggtcaaaggtctagaaatcaaggtttgggcagggctgcattcctcgggaaggctccaggggagaaaccttttccttgccttgagaggcacccccttcctccgtcatcacagccccttcctccaacatcaaagcatctcactccagcctctgcttctgtttccctgtcttgggatccttaatttactcatatttgcaaagtctcttttgccatgtaaggcaacattcacagatcctgggaatgtgaacatggacgtctttggaggtctgtcattcagcctgccacatccaggtcccccacggtgcttcattcagtcctaggtgtggccagtactccggcctcctagctgctactgtgggcccagtgacctgactcttccttccctccgcaggacgagattgaggagctgcgggccgagatgctggagatgcgggacgtctatatggaggaggacgtgtatcagctgcaggagctgcgacagcagctggaccaggccagcaagacctgccgcatcctgcagtaccggctgcgcaaagccgagc

SEQ ID NO: 28389 - protein, 70 aa, Homo sapiens
MNTRLLSSDPGGQRSRNQGLGRAAFLGKAPGEKPFPCLERHPLPPSSQPLPPTSKHLTPASASVSLSWDP

SEQ ID NO: 28390 - DNA, 397 bp, Homo sapiens
tgagagaatgtgcactccctggcggggatcaggggtgcacagggagcatctcatttcttggcattggagaggcgggtccaggccccagtcttccctcattattcccaaccagaggagcaggacgtggtgagtctccagggccaggcagcctctgtgttgtctggagtggggacatcatgtggcacggtgatgccaggctgcgtgtcctggccttctttccccgggacctttttttttttttttttggagacgaagtctcactctgtcgcccaagctggagtgcatgagctgagattgcaccattgcactccagcctgggtaacaagagtgaaactccgtcacaaaaaaaaaaaaaaaaaaggaaaccaactatattgaaacacagttattaaagtat

SEQ ID NO: 28391 - protein, 62 aa, Homo sapiens [sequence omitted]

SEQ ID NO: 28392 - DNA, 2043 bp, Homo sapiens
acaggagaatgagaggcctccgctggcgttacactcggctgcccagccaggtggaggacaccctgtctggggaggagggtaacgaagaggaagaggaggaggaggcagctccagacccagctgctgctcctgaggatcccacggtgccccagctgacagaagccagccaggttttgagtgcctcagagattcggcagctcagctttcacttcccaccaagagtcaccggccatccctggagtctggtcttctgcacgtcaagggacggtttcagcctgcagagcctgtaccggcggatggagggctgcagcgggccagtgctgctggtgctcagggaccaggacgggcagatatttggagccttctcctcctcggctatccgactcagcaaaggcttctatggtactggcgagacattcctcttctccttctccccacagctgaaggtctttaagtggactggaagcaactctttctttgtgaagggagacttggattcactgatgatgggcagtggcagtggccggtttgggctgtggttggatggagacttgttccgcgggggaagctccccttgcccgaccttcaacaacgaggtgctggcccggcaggagcagttctgcatccaggagctggaggcttggcttctcagctgacagccctgcggcaacagaattctatgattgaagcctctaaatgaattgtgcaggagagggagtttgtaaacaactgactacagacattcacattgggtcatctttaaaaagctggactctgcttttggatgcttctcggaggcgagttggattttggactgaagtactgtcgttccattcctttttttgaggtgttatgagtggggctataacatcgccatcctattaggaagagagagaaaaacaggcaatagagaaaagccagtttccatcatcttatttctgagtgaaagtctcaagtgcgcacatcctcatcttgcatatagattgcttctagctgtcctcaatccagggaaactccaaattacatatgccctgtgcttggggcaaattagaaacactacagtcttacgcaggaagagccttcatgaaaacagccactggcctctgcagagatgactgggagcagcataccactgcccacctctatggcctccttcacacaccttcacggagcacaaactctgtcctgttttcccaggagaaagacgggatgcactgaacccctagcttctctctcgcctggtcccctctgcaataaaaggcccaggtctacaagatggcaaagaaggggaggaagaacagtatgtacctgcagaatttaaatttttctctgcatcaaagctctaacgttggtcccatcagcataggctccagccaaagaagctcctccacccaaaataagggagagatccaaagggaggcgatacaatgacgtgaaaccatagaggtaagaagcaaggcctcctaatacttgactctatgctaaactgttctgaacttgtgggtagatcttctttggttacaagatgatgcacgatcttggagagcctctgttgtaccaggaatacaatgctggtgggaggattcgtgctcctcatctgcttatttgctctcagatccattcttcactcttcctctccctactctgtctcacaggagctactccggtaaattacatttctcagctcccatgcctgttggtttccagttagatttggtcagtgggaggctctggtgggagactggaggtgagaagagggcagagaagtcaggttttttctctccctacctcctctggcacgagcggcagtggcagtgactattctgtggttctagcttttgcaggtggccccagctcctggactcccacctgctcccttggtctctcctatcctagaggtggtagcagcttcctgctgttgaatcactgtcctctatgctcatttagctctgccaaaacttttgtatctcacccccatgttaaattttttctgttgaactacactggatctgacttgatagaactattaaaaatagtttttaa

SEQ ID NO: 28393 - protein, 215 aa, Homo sapiens; identical to SEQ ID NO: 5252

SEQ ID NO: 28394 - DNA, 1879 bp, Homo sapiens
atgagaggcctccgctggcgttacactcggctgctcagctttcacttcccaccaagagtcaccggccatccctggagtctggtcttctgcacgtcaagggacggtttcagcctgcagagcctgtaccggcggatggagggctgcagcgggccagtgctgctggtgctcagggaccaggacgggcagatatttggagccttctcctcctcggctatccgactcagcaaaggcttctatggtactggcgagacattcctcttctccttctccccacagctgaaggtctttaagtggactggaagcaactctttctttgtgaagggagacttggattcactgatgatgggcagtggcagtggccggtttgggctgtggttggatggagacttgttccgcgggggaagctccccttgcccgaccttcaacaacgaggtgctggcccggcaggagcagttctgcatccaggagctggaggcttggcttctcagctgacagccctgcggcaacagaattctatgattgaagcctctaaatgaattgtgcaggagagggagtttgtaaacaactgactacagacattcacattgggtcatctttaaaaagctggactctgcttttggatgcttctcggaggcgagttggattttggactgaagtactgtcgttccattcctttttttgaggtgttatgagtggggctataacatcgccatcctattaggaagagagagaaaaacaggcaatagagaaaagccagtttccatcatcttatttctgagtgaaagtctcaagtgcgcacatcctcatcttgcatatagattgcttctagctgtcctcaatccagggaaactccaaattacatatgccctgtgcttggggcaaattagaaacactacagtcttacgcaggaagagccttcatgaaaacagccactggcctctgcagagatgactgggagcagcataccactgcccacctctatggcctccttcacacaccttcacggagcacaaactctgtcctgttttcccaggagaaagacgggatgcactgaacccctagcttctctctcgcctggtcccctctgcaataaaaggcccaggtctacaagatggcaaagaaggggaggaagaacagtatgtacctgcagaatttaaatttttctctgcatcaaagctctaacgttggtcccatcagcataggctccagccaaagaagctcctccacccaaaataagggagagatccaaagggaggcgatacaatgacgtgaaaccatagaggtaagaagcaaggcctcctaatacttgactctatgctaaactgttctgaacttgtgggtagatcttctttggttacaagatgatgcacgatcttggagagcctctgttgtaccaggaatacaatgctggtgggaggattcgtgctcctcatctgcttatttgctctcagatccattcttcactcttcctctccctactctgtctcacaggagctactccggtaaattacatttctcagctcccatgcctgttggtttccagttagatttggtcagtgggaggctctggtgggagactggaggtgagaagagggcagagaagtcaggttttttctctccctacctcctctggcacgagcggcagtggcagtgactattctgtggttctagcttttgcaggtggccccagctcctggactcccacctgctcccttggtctctcctatcctagaggtggtagcagcttcctgctgttgaatcactgtcctctatgctcatttagctctgccaaaacttttgtatctcacccccatgttaaattttttctgttgaactacactggatctgacttgatagaactattaaaaatagtttttaa

SEQ ID NO: 28395 - protein, 163 aa, Homo sapiens
MRGLRWRYTRLLSFHFPPRVTGHPWSLVFCTSRDGFSLQSLYRRMEGCSGPVLLVLRDQDGQIFGAFSSSAIRLSKGFYGTGETFLFSFSPQLKVFKWTGSNSFFVKGDLDSLMMGSGSGRFGLWLDGDLFRGGSSPCPTFNNEVLARQEQFCIQELEAWLLS

SEQ ID NO: 28396 - DNA, 1447 bp, Homo sapiens
caggtctttaagtggactggaagcaactctttctttgtgaagggagacttggattcactgatgatgggcagtggcagaattctatgattgaagcctctaaatgaattgtgcaggagagggagtttgtaaacaactgactacagacattcacattgggtcatctttaaaaagctggactctgcttttggatgcttctcggaggcgagttggattttggactgaagtactgtcgttccattcctttttttgaggtgttatgagtggggctataacatcgccatcctattaggaagagagagaaaaacaggcaatagagaaaagccagtttccatcatcttatttctgagtgaaagtctcaagtgcgcacatcctcatcttgcatatagattgcttctagctgtcctcaatccagggaaactccaaattacatatgccctgtgcttggggcaaattagaaacactacagtcttacgcaggaagagccttcatgaaaacagccactggcctctgcagagatgactgggagcagcataccactgcccacctctatggcctccttcacacaccttcacggagcacaaactctgtcctgttttcccaggagaaagacgggatgcactgaacccctagcttctctctcgcctggtcccctctgcaataaaaggcccaggtctacaagatggcaaagaaggggaggaagaacagtatgtacctgcagaatttaaatttttctctgcatcaaagctctaacgttggtcccatcagcataggctccagccaaagaagctcctccacccaaaataagggagagatccaaagggaggcgatacaatgacgtgaaaccatagaggtaagaagcaaggcctcctaatacttgactctatgctaaactgttctgaacttgtgggtagatcttctttggttacaagatgatgcacgatcttggagagcctctgttgtaccaggaatacaatgctggtgggaggattcgtgctcctcatctgcttatttgctctcagatccattcttcactcttcctctccctactctgtctcacaggagctactccggtaaattacatttctcagctcccatgcctgttggtttccagttagatttggtcagtgggaggctctggtgggagactggaggtgagaagagggcagagaagtcaggttttttctctccctacctcctctggcacgagcggcagtggcagtgactattctgtggttctagcttttgcaggtggccccagctcctggactcccacctgctcccttggtctctcctatcctagaggtggtagcagcttcctgctgttgaatcactgtcctctatgctcatttagctctgccaaaacttttgtatctcacccccatgttaaattttttctgttgaactacactggatctgacttgatagaactattaaaaatagtttttaa

SEQ ID NO: 28397 - protein, 69 aa, Homo sapiens
MTGSSIPLPTSMASFTHLHGAQTLSCFPRRKTGCTEPLASLSPGPLCNKRPRSTRWQRRGGRTVCTCRI

SEQ ID NO: 28398 - DNA, 2822 bp, Homo sapiens
catagaggtgggcagtggtatgctgctcccagtcatctctgcagaggccagtggctgttttcatgaaggctcttcctgcgtaagactgtagtgtttctaatttgccccaagcacagggcatatgtaatttggagtttccctggattgaggacagctagaagcaatctatatgcaagatgaggatgtgcgcacttgagactttcactcagaaataagatgatggaaactggcttttctctattgcctgtttttctctctcttcctaataggatggcgatgttatagccccactcataacacctcaaaaaaaggaatggaacgacagtacttcagtccaaaatccaactcgcctccgagaagcatccaaaagcagagtccagctttttaaagatgacccaatgtgaatgtctgtagtcagttgtttacaaactccctctcctgcacaattcatttagaggcttcaatcatagaattctgcaaattaatgacaactcatgctttaattttgtattttgaatgtacacgcatgctgaagctaagtaacttttaatcaaagaaataagatggtattaggcaaatcttactatactatgaaaagcattaccttgcctatttttaatattattaaagcctttctccttcagtagtctattttcttagaataacaactcttttatctattctgaactctattttttttcttttttaagagacaaggttttgctctgttgcccagcttggactcgaactttcctgggctcaagcgaccctcctgcccagctacttgggaggctgaggcaggaggattgctcgaacctgggaggcggaggttgcagtgagcctagatcacgccattgcactccagcctgggtgacagagtgagactccatctccaaaaaaaaaagcacaaacactgcactgcctgtgctgaaattagtgaccacccagtgggctccaggctccgctaggtaacttcgttttcccagcagtggagtgggcaccaccttggtggggcagtgcccctgtgcccagggcacacctcattcccagttctatagcaattcaccaagaacaaagtctgcagttagagccaaagctggtggtggccagagggtgctgaagatacaggccagtggggatgggagccatgagccccgaatgtcttctgctctgatgctccccggactaagcctccctggcacactgggagtgaggggcagcctgagcaagtaggggaactcagaccacaggccagcagatttcccagcagtccatcactggccaccgtgtagccagattctgttccgtccacactggggtgaagagtacttggaatgtctgccatcctgtatgatcaccccaccccctgtccatccatcagtagataataagggttggttacaattcataagagaatagttaaaacacttctcctctcatgcctaccatggtgctgtatcaaggggatttgttcacatatgggctcagcaacgcacaagtgaggtcagccatggcactaggtcattcccattttagccaaggtgcctctataggggtcagacatcatgtgcccagacctaaggtcaggaatgtcatatttttctgttaaaatcattttatttctgtgtatcttacctttaaatcattgtggtttactctgagattctgtagtcctaatattgtatcattgtgctgtctgcaaaacaacttgaatctattttgtttgcatcttttgttacatgtaacgcagctgtactttatgttctttgcaactgtttccattatgagaacgctgtgctatttacaaggttacatttttcttggccaggcgaggtggtcatgcctgtaatcccagcactttgggaggccaaggtgggcggatcacttgaggtaaagagttgagaccagcctggctagcatggcgaaacccagtctctactaaaaatacaaaaattagccgggtgaaattagccgggcgtggtggtgtgtgcttgtaatcccagctactcgggaggctgaggcaggagaatcgcttgaatccgggaggcagaggttgcagtgagccaagatcaggccactgcactccagcctcggggtcaagagcgaaactctgtctcaaacaaaaagaaagaaaggaaggaaggaaggagggaaggaaggaaggaaagagagaaagaaaagaaagaaagaaagaaagaaagagaaagaaatatctttgctatttgtataaaaatggaaattttaacagcttagcctctagagagttactgaacgtggttaccttgggaatgtaaatagaactgcaaattaaaatgactggccacttcaactgggtaagggaaacagctgcaataaagcttcgtgaatatatatctccatcttgaaagttgtgttccacaaaggtttcgacctctttgtccaaaaatgcatattactcatttactcctttcataccttcattgtgaaattaaataacagactcacaagcacctggcactggtggcagacaaaaaggcctcaacattctgcagcaggccagaggaggaacgacgctgctacagtatttattagttccagtgctcaagcccaggtttctaaggtttgacaatattctgtaagttaaaatcatttccacacatacagagtagaatcctgtttttgtaagtatacacacacacacacacacacattcatggaacattgtctggaaggatatacatgaaaatgttaagagttggggggggttgaattttaggcaattttaatttttttaacgtcttctggtttttctacaataaacatgaatcagttgtagaacctct

SEQ ID NO: 28399 - protein, 56 aa, Homo sapiens
MPTMVLYQGDLFTYGLSNAQVRSAMALGHSHFSQGASIGVRHHVPRPKVRNVIFFC

SEQ ID NO: 28400 - DNA, 5209 bp, Homo sapiens
aagagccgctaggctgccctgcccgaagggctcaactgtcagtgagcctgcgcaggaggccaataggctgccaatactccttggactccccgccagggccctgctgtcagtgcgcctgcgcgcgggtccggcgccgaggttcttgactgctgtgccggacgccaggtgtagccatgcagcgagccgattccgagcagccctccaagcgtccccgttgcgatgacagcccgagaaccccctcaaacaccccttccgcagaggcagactggtccccgggcctggaactccatcccgactacaagacatggggtccggagcaggtgtgctccttcctcaggcgcggtggctttgaagagccggtgctgctgaagaacatccgagaaaatgaaatcacaggcgcattactgccttgtcttgatgagtctcgttttgaaaatcttggagtaagttccttgggggagaggaagaagctgcttagttatatccagcgattggttcaaatccacgttgatacaatgaaggtaattaatgatcctatccatggccacattgagctccaccctctcctcgtccgaatcattgatacacctcaatttcaacgtcttcgatacatcaaacagctgggaggtggttactatgtttttccaggagcttcacacaatcgatttgagcatagtctaggggtggggtatctagcaggatgtctagttcacgcactgggtgaaaaacaaccagagctgcagataagtgaacgagatgttctctgtgttcagattgctggactttgtcatgatctcggtcatgggccattttctcacatgtttgatggacgatttattccacttgctcgcccggaggtgaaatggacgcatgaacaaggctcagttatgatgtttgagcaccttattaattctaatggaattaagcctgtcatggaacaatatggtctcatccctgaagaagatatttgctttataaaggaacaaattgtaggaccacttgaatcacctgtcgaagattcattgtggccatataaagggcgtcctgaaaacaaaagcttcctttatgagatagtatctaataaaagaaatggcattgatgtggacaaatgggattattttgccagggactgccatcatcttggaatccaaaataattttgattacaagcgctttattaagtttgcccgtgtctgtgaagtagacaatgagttgcgtatttgtgctagagataaggaagttggaaatctgtatgacatgttccacactcgcaactctttacaccgtagagcttatcaacacaaagttggcaacattattgatacaatgattacagatgctttcctcaaagcagatgactacatagagattacaggtgctggaggaaaaaagtatcgcatttctacagcaattgacgacatggaagcctatactaagctgacagataacatttttctggagattttatactctactgatcccaaattgaaagacgcacgagagattttaaaacaaattgaataccgtaatctattcaagtatgtgggtgagacgcagccaacaggacaaataaagattaaaagggaggactatgaatctcttccaaaagaggttgccagtgctaaacccaaagtattgctagacgtgaaactgaaggctgaagattttatagtggatgttatcaacatggattatggaatgcaagaaaagaatccaattgatcatgttagcttctattgtaagactgcccccaacagagcaatcaggattactaaaaaccaggtttcacaacttctgccagagaaatttgcagagcagctgattcgagtatattgtaagaaggtggacagaaagagtttgtatgccgcaagacaatattttgttcagtggtgtgcagacagaaatttcaccaagccgcaggatggcgatgttatagccccactcataacacctcaaaaaaaggaatggaacgacagtacttcagtccaaaatccaactcgcctccgagaagcatccaaaagcagagtccagctttttaaagatgacccaatgtgaatgtctgtagtcagttgtttacaaactccctctcctgcacaattcatttagaggcttcaatcatagaattctgcaaattaatgacaactcatgctttaattttgtattttgaatgtacacgcatgctgaagctaagtaacttttaatcaaagaaataagatggtattaggcaaatcttactatactatgaaaagcattaccttgcctatttttaatattattaaagcctttctccttcagtagtctattttcttagaataacaactcttttatctattctgaactctattttttttcttttttaagagacaaggttttgctctgttgcccagcttggactcgaactttcctgggctcaagcgaccctcctgcctcagccccccaagtagctgggactaaagtcatgtgccaccacacccagcttactctgaacttttatgacagatgattgttttttgtttttaatgtagaaatgagacaagggtacaaattggaactagaaattgacattgtcattgacaaacatggctaaaaacaaaacatcaaatcctgcccccgtgaagagttccctgtcacctcaagtttgaggatagtcctctaagagtgacctaagcataagtgaaagacacctcccctcacccttctagccccctacaaggtgccaggttggggtaaagagttggagatgatggccaggagtggcctccaacacgctggtgagaggcctgattaggttttggggaagatctgagagctctggcctcttcgtgagtggaacataaagccgcctcttgttgggagatcctaccccagtgacagaggaatcccccaaactaggctgtgccctggctccgtggcggctccagacccgggtagtgcctttgtcccctgaatactcactcccccggtccagagggccttcccactgcccagcctggagaaggcctcccctgacctgctctctcagtatcctggagagctggccagaggccatcacaggcatcatcctcagagctcctcagacctgggactttgtttttgctggttcagtgcattttgtgtatttaagagcaaacactagccaggcgtggcggcgtgtgcctgtagtcccagctacttgggaggctgaggcaggaggattgctcgaacctgggaggcggaggttgcagtgagcctagatcacgccattgcactccagcctgggtgacagagtgagactccatctccaaaaaaaaaagcacaaacactgcactgcctgtgctgaaattagtgaccacccagtgggctccaggctccgctaggtaacttcgttttcccagcagtggagtgggcaccaccttggtggggcagtgcccctgtgcccagggcacacctcattcccagttctatagcaattcaccaagaacaaagtctgcagttagagccaaagctggtggtggccagagggtgctgaagatacaggccagtggggatgggagccatgagccccgaatgtcttctgctctgatgctccccggactaagcctccctggcacactgggagtgaggggcagcctgagcaagtaggggaactcagaccacaggccagcagatttcccagcagtccatcactggccaccgtgtagccagattctgttccgtccacactggggtgaagagtacttggaatgtctgccatcctgtatgatcaccccaccccctgtccatccatcagtagataataagggttggttacaattcataagagaatagttaaaacacttctcctctcatgcctaccatggtgctgtatcaaggggatttgttcacatatgggctcagcaacgcacaagtgaggtcagccatggcactaggtcattcccattttagccaaggtgcctctataggggtcagacatcatgtgcccagacctaaggtcaggaatgtcatatttttctgttaaaatcattttatttctgtgtatcttacctttaaatcattgtggtttactctgagattctgtagtcctaatattgtatcattgtgctgtctgcaaaacaacttgaatctattttgtttgcatcttttgttacatgtaacgcagctgtactttatgttctttgcaactgtttccattatgagaacgctgtgctatttacaaggttacatttttcttggccaggcgaggtggtcatgcctgtaatcccagcactttgggaggccaaggtgggcggatcacttgaggtaaagagttgagaccagcctggctagcatggcgaaacccagtctctactaaaaatacaaaaattagccgggtgaaattagccgggcgtggtggtgtgtgcttgtaatcccagctactcgggaggctgaggcaggagaatcgcttgaatccgggaggcagaggttgcagtgagccaagatcaggccactgcactccagcctcggggtcaagagcgaaactctgtctcaaacaaaaagaaagaaaggaaggaaggaaggagggaaggaaggaaggaaagagagaaagaaaagaaagaaagaaagaaagaaagagaaagaaatatctttgctatttgtataaaaatggaaattttaacagcttagcctctagagagttactgaacgtggttaccttgggaatgtaaatagaactgcaaattaaaatgactggccacttcaactgggtaagggaaacagctgcaataaagcttcgtgaatatatatctccatcttgaaagttgtgttccacaaaggtttcgacctctttgtccaaaaatgcatattactcatttactcctttcataccttcattgtgaaattaaataacagactcacaagcacctggcactggtggcagacaaaaaggcctcaacattctgcagcaggccagaggaggaacgacgctgctacagtatttattagttccagtgctcaagcccaggtttctaaggtttgacaatattctgtaagttaaaatcatttccacacatacagagtagaatcctgtttttgtaagtatacacacacacacacacacacattcatggaacattgtctggaaggatatacatgaaaatgttaagagttggggggggttgaattttaggcaattttaatttttttaacgtcttctggtttttctacaataaacatgaatcagttgtagaacctct

SEQ ID NO: 28401 - protein, 626 aa, Homo sapiens; identical to SEQ ID NO: 3889

SEQ ID NO: 28402 - DNA, 2377 bp, Homo sapiens
catagaggtgggcagtggtatgctgctcccagtcatctctgcagaggccagtggctgttttcatgaaggctcttcctgcgtaagactgtagtgtttctaatttgccccaagcacagggcatatgtaatttggagtttccctggattgaggacagctagaagcaatctatatgcaagatgaggatgtgcgcacttgagactttcactcagaaataagatgatggaaactggcttttctctattgcctgtttttctctctcttcctaataggatggcgatgttatagccccactcataacacctcaaaaaaaggaatggaacgacagtacttcagtccaaaatccaactcgcctccgagaagcatccaaaagcagagtccagctttttaaagatgacccaatgtgaatgtctgtagtcagttgtttacaaactccctctcctgcacaattcatttagaggcttcaatcatagaattctgcaaattaatgacaactcatgctttaattttgtattttgaatgtacacgcatgctgaagctaagtaacttttaatcaaagaaataagatggtattaggcaaatcttactatactatgaaaagcattaccttgcctatttttaatattattaaagcctttctccttcagtagtctattttcttagaataacaactcttttatctattctgaactctattttttttcttttttaagagacaaggttttgctctgttgcccagcttggactcgaactttcctgggctcaagcgaccctcctgcccagctacttgggaggctgaggcaggaggattgctcgaacctgggaggcggaggttgcagtgagcctagatcacgccattgcactccagcctgggtgacagagtgagactccatctccaaaaaaaaaagcacaaacactgcactgcctgtgctgaaattagtgaccacccagtgggctccaggctccgctaggtaacttcgttttcccagcagtggagtgggcaccaccttggtggggcagtgcccctgtgcccagggcacacctcattcccagttctatagcaattcaccaagaacaaagtctgcagttagagccaaagctggtggtggccagagggtgctgaagatacaggccagtggggatgggagccatgagccccgaatgtcttctgctctgatgctccccggactaagcctccctggcacactgggagtgaggggcagcctgagcaagtaggggaactcagaccacaggccagcagatttcccagcagtccatcactggccaccgtgtagccagattctgttccgtccacactggggtgaagagtacttggaatgtctgccatcctgtatgatcaccccaccccctgtccatccatcagtagataataagggttggttacaattcataagagaatagttaaaacacttctcctctcatgcctaccatggtgctgtatcaaggggatttgttcacatatgggctcagcaacgcacaagtgaggtcagccatggcactaggtcattcccattttagccaaggtgcctctataggggtcagacatcatgtgcccagacctaaggtcaggaatgtcatatttttctgttaaaatcattttatttctgtgtatcttacctttaaatcattgtggtttactctgagattctgtagtcctaatattgtatcattgtgctgtctgcaaaacaacttgaatctattttgtttgcatcttttgttacatgtaacgcagctgtactttatgttctttgcaactgtttccattatgagaacgctgtgctatttacaaggttacatttttcttggccaggcgaggtggtcatgcctgtaatcccagcactttgggaggccaaggtgggcggatcacttgaggtaaagagttgagaccagcctggctagcatggcgaaacccagtctctactaaaaatacaaaaattagccgggtgaaattagccgggcgtggtggtgtgtgcttgtaatcccagctactcgggaggctgaggcaggagaatcgcttgaatccgggaggcagaggttgcagtgagccaagatcaggccactgcactccagcctcggggtcaagagcgaaactctgtctcaaacaaaaagaaagaaaggaaggaaggaaggagggaaggaaggaaggaaagagagaaagaaaagaaagaaagaaagaaagaaagagaaagaaatatctttgctatttgtataaaaatggaaattttaacagcttagcctctagagagttactgaacgtggttaccttgggaatgtaaatagaactgcaaattaaaatgactggccacttcaactgggtaagggaaacagctgcaataaagcttcgtgaatatatatctcc

SEQ ID NO: 28403 - protein, 56 aa, Homo sapiens; identical to SEQ ID NO: 28399

SEQ ID NO: 28404 - DNA, 4764 bp, Homo sapiens
aagagccgctaggctgccctgcccgaagggctcaactgtcagtgagcctgcgcaggaggccaataggctgccaatactccttggactccccgccagggccctgctgtcagtgcgcctgcgcgcgggtccggcgccgaggttcttgactgctgtgccggacgccaggtgtagccatgcagcgagccgattccgagcagccctccaagcgtccccgttgcgatgacagcccgagaaccccctcaaacaccccttccgcagaggcagactggtccccgggcctggaactccatcccgactacaagacatggggtccggagcaggtgtgctccttcctcaggcgcggtggctttgaagagccggtgctgctgaagaacatccgagaaaatgaaatcacaggcgcattactgccttgtcttgatgagtctcgttttgaaaatcttggagtaagttccttgggggagaggaagaagctgcttagttatatccagcgattggttcaaatccacgttgatacaatgaaggtaattaatgatcctatccatggccacattgagctccaccctctcctcgtccgaatcattgatacacctcaatttcaacgtcttcgatacatcaaacagctgggaggtggttactatgtttttccaggagcttcacacaatcgatttgagcatagtctaggggtggggtatctagcaggatgtctagttcacgcactgggtgaaaaacaaccagagctgcagataagtgaacgagatgttctctgtgttcagattgctggactttgtcatgatctcggtcatgggccattttctcacatgtttgatggacgatttattccacttgctcgcccggaggtgaaatggacgcatgaacaaggctcagttatgatgtttgagcaccttattaattctaatggaattaagcctgtcatggaacaatatggtctcatccctgaagaagatatttgctttataaaggaacaaattgtaggaccacttgaatcacctgtcgaagattcattgtggccatataaagggcgtcctgaaaacaaaagcttcctttatgagatagtatctaataaaagaaatggcattgatgtggacaaatgggattattttgccagggactgccatcatcttggaatccaaaataattttgattacaagcgctttattaagtttgcccgtgtctgtgaagtagacaatgagttgcgtatttgtgctagagataaggaagttggaaatctgtatgacatgttccacactcgcaactctttacaccgtagagcttatcaacacaaagttggcaacattattgatacaatgattacagatgctttcctcaaagcagatgactacatagagattacaggtgctggaggaaaaaagtatcgcatttctacagcaattgacgacatggaagcctatactaagctgacagataacatttttctggagattttatactctactgatcccaaattgaaagacgcacgagagattttaaaacaaattgaataccgtaatctattcaagtatgtgggtgagacgcagccaacaggacaaataaagattaaaagggaggactatgaatctcttccaaaagaggttgccagtgctaaacccaaagtattgctagacgtgaaactgaaggctgaagattttatagtggatgttatcaacatggattatggaatgcaagaaaagaatccaattgatcatgttagcttctattgtaagactgcccccaacagagcaatcaggattactaaaaaccaggtttcacaacttctgccagagaaatttgcagagcagctgattcgagtatattgtaagaaggtggacagaaagagtttgtatgccgcaagacaatattttgttcagtggtgtgcagacagaaatttcaccaagccgcaggatggcgatgttatagccccactcataacacctcaaaaaaaggaatggaacgacagtacttcagtccaaaatccaactcgcctccgagaagcatccaaaagcagagtccagctttttaaagatgacccaatgtgaatgtctgtagtcagttgtttacaaactccctctcctgcacaattcatttagaggcttcaatcatagaattctgcaaattaatgacaactcatgctttaattttgtattttgaatgtacacgcatgctgaagctaagtaacttttaatcaaagaaataagatggtattaggcaaatcttactatactatgaaaagcattaccttgcctatttttaatattattaaagcctttctccttcagtagtctattttcttagaataacaactcttttatctattctgaactctattttttttcttttttaagagacaaggttttgctctgttgcccagcttggactcgaactttcctgggctcaagcgaccctcctgcctcagccccccaagtagctgggactaaagtcatgtgccaccacacccagcttactctgaacttttatgacagatgattgttttttgtttttaatgtagaaatgagacaagggtacaaattggaactagaaattgacattgtcattgacaaacatggctaaaaacaaaacatcaaatcctgcccccgtgaagagttccctgtcacctcaagtttgaggatagtcctctaagagtgacctaagcataagtgaaagacacctcccctcacccttctagccccctacaaggtgccaggttggggtaaagagttggagatgatggccaggagtggcctccaacacgctggtgagaggcctgattaggttttggggaagatctgagagctctggcctcttcgtgagtggaacataaagccgcctcttgttgggagatcctaccccagtgacagaggaatcccccaaactaggctgtgccctggctccgtggcggctccagacccgggtagtgcctttgtcccctgaatactcactcccccggtccagagggccttcccactgcccagcctggagaaggcctcccctgacctgctctctcagtatcctggagagctggccagaggccatcacaggcatcatcctcagagctcctcagacctgggactttgtttttgctggttcagtgcattttgtgtatttaagagcaaacactagccaggcgtggcggcgtgtgcctgtagtcccagctacttgggaggctgaggcaggaggattgctcgaacctgggaggcggaggttgcagtgagcctagatcacgccattgcactccagcctgggtgacagagtgagactccatctccaaaaaaaaaagcacaaacactgcactgcctgtgctgaaattagtgaccacccagtgggctccaggctccgctaggtaacttcgttttcccagcagtggagtgggcaccaccttggtggggcagtgcccctgtgcccagggcacacctcattcccagttctatagcaattcaccaagaacaaagtctgcagttagagccaaagctggtggtggccagagggtgctgaagatacaggccagtggggatgggagccatgagccccgaatgtcttctgctctgatgctccccggactaagcctccctggcacactgggagtgaggggcagcctgagcaagtaggggaactcagaccacaggccagcagatttcccagcagtccatcactggccaccgtgtagccagattctgttccgtccacactggggtgaagagtacttggaatgtctgccatcctgtatgatcaccccaccccctgtccatccatcagtagataataagggttggttacaattcataagagaatagttaaaacacttctcctctcatgcctaccatggtgctgtatcaaggggatttgttcacatatgggctcagcaacgcacaagtgaggtcagccatggcactaggtcattcccattttagccaaggtgcctctataggggtcagacatcatgtgcccagacctaaggtcaggaatgtcatatttttctgttaaaatcattttatttctgtgtatcttacctttaaatcattgtggtttactctgagattctgtagtcctaatattgtatcattgtgctgtctgcaaaacaacttgaatctattttgtttgcatcttttgttacatgtaacgcagctgtactttatgttctttgcaactgtttccattatgagaacgctgtgctatttacaaggttacatttttcttggccaggcgaggtggtcatgcctgtaatcccagcactttgggaggccaaggtgggcggatcacttgaggtaaagagttgagaccagcctggctagcatggcgaaacccagtctctactaaaaatacaaaaattagccgggtgaaattagccgggcgtggtggtgtgtgcttgtaatcccagctactcgggaggctgaggcaggagaatcgcttgaatccgggaggcagaggttgcagtgagccaagatcaggccactgcactccagcctcggggtcaagagcgaaactctgtctcaaacaaaaagaaagaaaggaaggaaggaaggagggaaggaaggaaggaaagagagaaagaaaagaaagaaagaaagaaagaaagagaaagaaatatctttgctatttgtataaaaatggaaattttaacagcttagcctctagagagttactgaacgtggttaccttgggaatgtaaatagaactgcaaattaaaatgactggccacttcaactgggtaagggaaacagctgcaataaagcttcgtgaatatatatctcc

SEQ ID NO: 28405 - protein, 626 aa, Homo sapiens; identical to SEQ ID NO: 3889

SEQ ID NO: 28406 - DNA, 2295 bp, Homo sapiens
aagagccgctaggctgccctgcccgaagggctcaactgtcagtgagcctgcgcaggaggccaataggctgccaatactccttggactccccgccagggccctgctgtcagtgcgcctgcgcgcgggtccggcgccgaggttcttgactgctgtgccggacgccaggtgtagccatgcagcgagccgattccgagcagccctccaagcgtccccgttgcgatgacagcccgagaaccccctcaaacaccccttccgcagaggcagactggtccccgggcctggaactccatcccgactacaagacatggggtccggagcaggtgtgctccttcctcaggcgcggtggctttgaagagccggtgctgctgaagaacatccgagaaaatgaaatcacaggcgcattactgccttgtcttgatgagtctcgttttgaaaatcttggagtaagttccttgggggagaggaagaagctgcttagttatatccagcgattggttcaaatccacgttgatacaatgaaggtaattaatgatcctatccatggccacattgagctccaccctctcctcgtccgaatcattgatacacctcaatttcaacgtcttcgatacatcaaacagctgggaggtggttactatgtttttccaggagcttcacacaatcgatttgagcatagtctaggggtggggtatctagcaggatgtctagttcacgcactgggtgaaaaacaaccagagctgcagataagtgaacgagatgttctctgtgttcagattgctggactttgtcatgatctcggtcatgggccattttctcacatgtttgatggacgatttattccacttgctcgcccggaggtgaaatggacgcatgaacaaggctcagttatgatgtttgagcaccttattaattctaatggaattaagcctgtcatggaacaatatggtctcatccctgaagaagatatttgctttataaaggaacaaattgtaggaccacttgaatcacctgtcgaagattcattgtggccatataaagggcgtcctgaaaacaaaagcttcctttatgagatagtatctaataaaagaaatggcattgatgtggacaaatgggattattttgccagggactgccatcatcttggaatccaaaataattttgattacaagcgctttattaagtttgcccgtgtctgtgaagtagacaatgagttgcgtatttgtgctagagataaggaagttggaaatctgtatgacatgttccacactcgcaactctttacaccgtagagcttatcaacacaaagttggcaacattattgatacaatgattacagatgctttcctcaaagcagatgactacatagagattacaggtgctggaggaaaaaagtatcgcatttctacagcaattgacgacatggaagcctatactaagctgacagataacatttttctggagattttatactctactgatcccaaattgaaagacgcacgagagattttaaaacaaattgaataccgtaatctattcaagtatgtgggtgagacgcagccaacaggacaaataaagattaaaagggaggactatgaatctcttccaaaagaggttgccagtgctaaacccaaagtattgctagacgtgaaactgaaggctgaagattttatagtggatgttatcaacatggattatggaatgcaagaaaagaatccaattgatcatgttagcttctattgtaagactgcccccaacagagcaatcaggattactaaaaaccaggtttcacaacttctgccagagaaatttgcagagcagctgattcgagtatattgtaagaaggtggacagaaagagtttgtatgccgcaagacaatattttgttcagtggtgtgcagacagaaatttcaccaagccgcaggatggcgatgttatagccccactcataacacctcaaaaaaaggaatggaacgacagtacttcagtccaaaatccaactcgcctccgagaagcatccaaaagcagagtccagctttttaaagatgacccaatgtgaatgtctgtagtcagttgtttacaaactccctctcctgcacaattcatttagaggcttcaatcatagaattctgcaaattaatgacaactcatgctttaattttgtattttgaatgtacacgcatgctgaagctaagtaacttttaatcaaagaaataagatggtattaggcaaatcttactatactatgaaaagcattaccttgcctatttttaatattattaaagcctttctccttcagt

SEQ ID NO: 28407 - protein, 626 aa, Homo sapiens; identical to SEQ ID NO: 3889

SEQ ID NO: 28408 - DNA, 1267 bp, Homo sapiens
caagtgcgcacatcctcatcttgcatatagattgcttctagctgtcctcaatccagggaaactccaaattacatatgccctgtgcttggggcaaattagaaacactacagtcttacgcaggaagagccttcatgaaaacagccactggcctctgcagagatgactgggagcagcataccactgcccacctctatggcctccttcacacaccttcacggagcacaaactctgtcctgttttcccaggagaaagacgggatgcactgaacccctagcttctctctcgcctggtcccctctgcaataaaaggcccaggtctacaagatggcaaagaaggggaggaagaacagtatgtacctgcagaatttaaatttttctctgcatcaaagctctaacgttggtcccatcagcataggctccagccaaagaagctcctccacccaaaataagggagagatccaaagggaggcgatacaatgacgtgaaaccatagaggtaagaagcaaggcctcctaatacttgactctatgctaaactgttctgaacttgtgggtagatcttctttggttacaagatgatgcacgatcttggagagcctctgttgtaccaggaatacaatgctggtgggaggattcgtgctcctcatctgcttatttgctctcagatccattcttcactcttcctctccctactctgtctcacaggagctactccggtaaattacatttctcagctcccatgcctgttggtttccagttagatttggtcagtgggaggctctggtgggagactggaggtgagaagagggcagagaagtcaggttttttctctccctacctcctctggcacgagcggcagtggcagtgactattctgtggttctagcttttgcaggtggccccagctcctggactcccacctgctcccttggtctctcctatcctagaggtggtagcagcttcctgctgttgaatcactgtcctctatgctcatttagctctgccaaaacttttgtatctcacccccatgttaaattttttctgttgaactacactggatctgacttgatagaactattaaaaatagtttttaaaaaatgtgttattatttttttttgagatggaattttgcttgcactccagcctgggcaacagagcaagactctgtctcaaaaaaaagtcatcctattgtcatgatacttgtacttaaaggcctatctcaaaatcaacagtatttatttgtctttaaactcatctctatttctaccca

SEQ ID NO: 28409 - protein, 56 aa, Homo sapiens
MCYYFFLRWNFACTPAWATEQDSVSKKSHPIVMILVLKGLSQNQQYLFVFKLISIS

SEQ ID NO: 28410 - DNA, 661 bp, Homo sapiens
gaccttattttcaaaaccataaccaaatgactataacttaaatgggaacttttcagcagatagacttacttttggtttttacttaaaaataaaaaattgtgcaaagtttgtgagtaacaggccacctacctgcggcttggtgaaatttctgtctgcacaccactgaacaaaatattgtcttgcggcatacaaactctttctgtccaccttcttacaatatactcgaatcagctgctctgcaaatttctctggcagaagttgtgaaacctttttaaaatgaagagatttcactatcaccttgaagtcacacattggagatatcagctggtccctaggctcctaactattcctttttttttgagacaagatctcctgcactccagcctaggcaacagagcaagactctgcctccaaaaataaataagtaaagaaaatcctagcccccacaaaccaggcagccctagattgaaattcaacaaataattataaaagtattcaaccacagttgaaaagcaaagggtgctttgaaatgttctaacaggttacctgatgtagcctagggtgcccggagaatgaccggaaacattttcctgggaaagtgactttactaagtgagcaagaaacaaacaggcttaggtgggaagaaaaagaattgcaggca

SEQ ID NO: 28411 - protein, 47 aa, Homo sapiens
MKRFHYHLEVTHWRYQLVPRLLTIPFFLRQDLLHSSLGNRARLCLQK

SEQ ID NO: 28412 - DNA, 938 bp, Homo sapiens
aagagccgctaggctgccctgcccgaagggctcaactgtcagtgagcctgcgcaggaggccaataggctgccaatactccttggactccccgccagggccctgctgtcagtgcgcctgcgcgcgggtccggcgccgaggttcttgactgctgtgccggacgccaggtgtagccatgcagcgagccgattccgagcagccctccaagcgtccccgttgcgatgacagcccgagaaccccctcaaacaccccttccgcagaggcagactggtccccgggcctggaactccatcccgactacaagacatggggtccggagcaggtgtgctccttcctcaggcgcggtggctttgaagagccggtgctgctgaagaacatccgagaaaatgaaatcacaggcgcattactgccttgtcttgatgagtctcgttttgaaaatcttggagtaagttccttgggggagaggaagaagctgcttagttatatccagcgattggttcaaatccacgttgatacaatgaagggtggggtatctagcaggatgtctagttcacgcactgggtgaaaaacaaccagagctgcagataagtgaacgagatgttctctgtgttcagattgctggactttgtcatgatctcggtcatgggccattttctcacatgtttgatggacgatttattccacttgctcgcccggaggtgaaatggacggtatgtattcatacagtcaatagtcaataaaaagaaagactatttaagcaggttatttagttaatttatctgtttggttccactactgtgttataaaatacttccccattacagtgtccagggtgctttcattcacatatatatatatatgcttttgtttggttctcacagtagtctgtaaggaagttatcgttatctccctttttacaaataaaggaacttgaaactct

SEQ ID NO: 28413 - protein, 129 aa, Homo sapiens
MQRADSEQPSKRPRCDDSPRTPSNTPSAEADWSPGLELHPDYKTWGPEQVCSFLRRGGFEEPVLLKNIRENEITGALLPCLDESRFENLGVSSLGERKKLLSYIQRLVQIHVDTMKGGVSSRMSSSRTG

SEQ ID NO: 28414 - DNA, 5690 bp, Homo sapiens
gcaggtggttgtgggtagcgcgcctgggagggagaaagaagtcgggggccgtggcgcgcagcccgcggggcctgaagggatgttcgaggacaagccccacgctgagggggcggcggtggtcgccgcagccggggaggcgctacaggccctgtgccaggagctgaacctggacgaggggagcgcggccgaagccctggacgactttactgccatccgaggcaactacagcctagagggagaagttacacactggttggcatgttcattatatgttgcatgccgcaaaagcattattcccacggttggaaagggtatcatggaaggcaactgtgtttcacttaccagaatactacgttcagctaaattaagtttaatacaattttttagtaaaatgaagaaatggatggacatgtcaaatctaccacaagaatttcgtgaacgtatagaaaggctagagagaaattttgaggtgtctactgtaatattcaaaaaatatgagccaatttttttagatatatttcaaaatccatatgaagaaccaccaaagttaccacgaagccggaagcagaggaggattccttgcagtgttaaggatctgtttaatttctgttggacactttttgtttatactaagggtaattttcggatgattggggatgacttagtaaactcttatcatttacttctatgctgcttggatctgatttttgccaatgcgattatgtgcccaaatagacaagacttgctaaatccatcatttaaaggtttaccatctgattttcatactgctgactttacggcttctgaagagccaccctgcatcattgctgtactgtgtgaactgcatgatggacttctcgtagaagcaaaaggaataaaggagcactactttaagccatatatttcaaaactctttgacaggaagatattaaaaggagaatgcctcctggacctttcaagttttactgataatagcaaagcagtgaataaggagtatgaagagtatgttctaactgttggtgattttgatgagaggatctttttgggagcagacgcagaagaggaaattggaacacctcgaaagttcactcgtgacaccccattagggaaactgacagcacaggctaatgtggagtataaccttcaacagcactttgaaaaaaaaaggtcatttgcaccttctaccccactgaccggacggagatatttacgagaaaaagaagcagtcattactcctgttgcatcagccacccaaagtgtgagccggttacagagtattgtggctggtctgaaaaatgcaccaagtgaccaacttataaatatttttgaatcttgtgtgcgtaatcctgtggaaaacattatgaaaatactaaaaggaataggagagactttctgtcaacactatactcaatcaacagatgaacagccaggatctcacatagactttgctgtaaacagactaaagctggcagaaattttgtattataaaatactagagactgtaatggttcaggaaacacgaagacttcatggaatggacatgtcagttcttttagagcaagatatatttcatcgttccttgatggcttgttgtttggaaattgtgctctttgcctatagctcacctcgtacttttccttggattattgaagttctcaacttgcaaccattttacttttataaggttattgaggtggtgatccgctcagaagaggggctctcaagggacatggtgaaacacctaaacagcattgaagaacagattttggagagtttagcatggagtcacgattctgcactgtgggaggctctccaggtttctgcaaacaaagttcctacctgtgaagaagttatattcccaaataactttgaaacaggaaatggaggaaatgtgcagggacatcttcccctgatgccaatgtctcctctaatgcacccaagagtcaaggaagttcgaactgacagtgggagtcttcgaagagatatgcaaccattgtctccaatttctgtccatgaacgctacagttctcctaccgcagggagtgctaagagaagactctttggagaggaccccccaaaggaaatgcttatggacaagatcataacagaaggaacaaaattgaaaatcgctccttcttcaagcattactgctgaaaatgtatcaattttacctggtcaaactcttctaacaatggccacagccccagtaacaggaacaacaggacataaagttacaattccattacatggtgtcgcaaatgatgctggagagatcacactgatacctctttccatgaatacaaatcaggagtccaaagtcaagagtcctgtatcacttactgctcattcattaattggtgcttctccaaaacagaccaatctgactaaagcacaagaggtacattcaactggaataaacaggccaaagagaactgggtccttagcactattttacagaaaggtctatcatttggcaagtgtacgcttacgtgatctatgtctaaaactggatgtttcaaatgagttacgaaggaagatatggacgtgttttgaattcactttagttcactgtcctgatctaatgaaagacaggcatttggatcagctcctcctttgtgccttttatatcatggcaaaggtaacaaaagaagaaagaacttttcaagaaattatgaaaagttataggaatcagccccaagctaatagtcacgtatatagaagtgttctgctgaaaagtattccaagagaagttgtggcatataataaaaatataaatgatgactttgaaatgatagattgtgacttagaagatgctacaaaaacacctgactgttccagtggaccagtgaaagaggaaagaggtgatcttataaaattttacaatacaatatatgtaggaagagtgaagtcatttgcactgaaatacgacttggcgaatcaggaccatatgatggatgctccaccactctctccttttccacatattaaacaacagccaggctcaccacgccgcatttcccagcagcactccatttatatttccccgcacaagaatgggtcaggccttacaccaagaagcgctctgctgtacaagttcaatggcagcccttctaagagtttgaaagatatcaacaacatgataaggcaaggtgagcagagaaccaagaagcgagtaatagccatcgatagtgatgcagaatcccctgccaaacgcgtctgtcaagaaaatgatgacgttttactgaaacgactacaggatgttgtcagtgaaagagcaaatcattaatgttgttcttgtttctatgataaaagcactttcagattgttctgcagaaagttggagctctgtccttcaaaccttttagccctatagatgataaatatcactgggttataagaaaaaattgcacaaaaattatgtgctttttaaaatatttatccaaaatgtagttgacagagatgtattttgagttggattggaaaggaatattttaagtgccttttaaaaatactaatagtccggccaggcgctgtggctcacgcctgtaatcccaggactttgggaggccaaggcgggcagatcaccggaggtcaggagttcgagaccagcctgaccaacatggagaaaccccatctctactaaaaatacaaaattagccgggtgtggtggcgcatgcctgtaatcccagctacttgggaggctgaggcagaattgcttgaacccaggaagcggaggttgtggtgagccaaggttgcgccactgcactccagcctgggcaacaagagtaaaactccatctcaaaaaatatatatatatatataaatagggaattttttttaatgtttgctccttgagttttcaagatgaaataaggagaaaccccataactttttagctctcttttaaaaataaatgtctccttctgtgttctgtaatatgaggataaataatctacttttgatagcatgctttgagatatttgtattcttaatttaatattgaaggaaggggttggttcccatagtacctggccagagggttatataccatcctgtctctggcccactgtggtaattccacatccaggtaccaccgccattcagagttgtctcaccccttctcgtgccttttctctccttgagctttataaacagatttgtacctgagccccagtgctacactcatccttgctttccagccctaagccatctcagcctgatgtcacaacccaataaatggggcactttcttcttttgtaaactattatcattttggtttctgtgacattaacttaattatatatgatcgtattaactcatgtagttctcaaaataggcagctgcttctgaagccagtaaaataaaattcagttagttattaaaaactaaattcctattagtaaggtaacaccatgattatgtgtgatatactgtttttgagatcatagttatcagtcattctcaatatctaattgagtccctaagaatattttaaaccttttaaaaatcacataaatatcatctcatgcctcataattctaatatatttaatacatcagtaaaatagctgcttattacttcccacactttgttctcagtattgttagtgcatcatgagtttcctgctagtgtttgaccactgggtactcctgaagatgttttttagtactagggatgcttttcagtattagggatgcttttttcagtactagggatgtactagggagtactgagtactcctgaagatgtttttcagtactagggatgcttttttcagtgttagggatgcttttcagtactagggatgcttttttcagtgctagggatgcttttcagtactagggatgctttccaaaatatcacctctttaacgtttactttttctagtgtgtgtctggaatccaaaggacatgaataagccactcataattaattttgagaagttttatcaaatgtttatgtttctaactgcaaaccttaattttggaaaggcacaatgtttaactcacctatgtttaaccatggctaatttaaaatagtctaagatttggccgtcactaattagtattctcaagaatttcatttttcaattttaagaagaaaagggattttggtcacattttgcttgtaaatgaaaattacatcctcattctttgtgtagtatctacacattgttataagccaaaaaacaaagtctgtctggaatctttgtacatatttgtatgttgctataattgttatttttatcttcattattgtgcaaaatataaatgagcatttgtacattgactgtataagaaaccatgggccaggtcctgtggctcatgcctataatcccaacactttgggaggctgaggcaggaggattgcttcagtccaggagttcaagactaacctgggcaacatagccctcatctctacaaaaaataaaaaaattagttgggtgtgatggcatgtgcctgtagtcccagctactcaggagactgacatgagaggatcacttgagactgggagattctgaggctgcagtgagctgtgattgcaccactacactccatcctaggtgagagggcaagaccctttctcagaaaaggaaaaaaagaaattctggacatgtttttatcagttttcaggacttggtatcaatgtacatagaatggctaataaaaattggaattgagattattgaa

SEQ ID NO: 28415 - protein, 1068 aa, Homo sapiens; identical to SEQ ID NO: 3891

SEQ ID NO: 28416 - DNA, 3954 bp, Homo sapiens
gggtagcgcgcctgggagggagaaagaagtcgggggccgtggcgcgcagcccgcggggcctgaagggatgttcgaggacaagccccacgctgagggggcggcggtggtcgccgcagccggggaggcgctacaggccctgtgccaggagctgaacctggacgaggggagcgcggccgaagccctggacgactttactgccatccgaggcaactacagcctagagggagaagttacacactggttggcatgttcattatatgttgcatgccgcaaaagcattattcccacggttggaaagggtatcatggaaggcaactgtgtttcacttaccagaatactacgttcagctaaattaagtttaatacaattttttagtaaaatgaagaaatggatggacatgtcaaatctaccacaagaatttcgtgaacgtatagaaaggctagagagaaattttgaggtgtctactgtaatattcaaaaaatatgagccaatttttttagatatatttcaaaatccatatgaagaaccaccaaagttaccacgaagccggaagcagaggaggattccttgcagtgttaaggatctgtttaatttctgttggacactttttgtttatactaagggtaattttcggatgattggggatgacttagtaaactcttatcatttacttctatgctgcttggatctgatttttgccaatgcgattatgtgcccaaatagacaagacttgctaaatccatcatttaaaggtttaccatctgattttcatactgctgactttacggcttctgaagagccaccctgcatcattgctgtactgtgtgaactgcatgatggacttctcgtagaagcaaaaggaataaaggagcactactttaagccatatatttcaaaactctttgacaggaagatattaaaaggagaatgcctcctggacctttcaagttttactgataatagcaaagcagtgaataaggagtatgaagagtatgttctaactgttggtgattttgatgagaggatctttttgggagcagacgcagaagaggaaattggaacacctcgaaagttcactcgtgacaccccattagggaaactgacagcacaggctaatgtggagtataaccttcaacagcactttgaaaaaaaaaggtcatttgcaccttctaccccactgaccggacggagatatttacgagaaaaagaagcagtcattactcctgttgcatcagccacccaaagtgtgagccggttacagagtattgtggctggtctgaaaaatgcaccaagtgaccaacttataaatatttttgaatcttgtgtgcgtaatcctgtggaaaacattatgaaaatactaaaaggaataggagagactttctgtcaacactatactcaatcaacagatgaacagccaggatctcacatagactttgctgtaaacagactaaagctggcagaaattttgtattataaaatactagagactgtaatggttcaggaaacacgaagacttcatggaatggacatgtcagttcttttagagcaagatatatttcatcgttccttgatggcttgttgtttggaaattgtgctctttgcctatagctcacctcgtacttttccttggattattgaagttctcaacttgcaaccattttacttttataaggttattgaggtggtgatccgctcagaagaggggctctcaagggacatggtgaaacacctaaacagcattgaagaacagattttggagagtttagcatggagtcacgattctgcactgtgggaggctctccaggtttctgcaaacaaagttcctacctgtgaagaagttatattcccaaataactttgaaacaggaaatggaggaaatgtgcagggacatcttcccctgatgccaatgtctcctctaatgcacccaagagtcaaggaagttcgaactgacagtgggagtcttcgaagagatatgcaaccattgtctccaatttctgtccatgaacgctacagttctcctaccgcagggagtgctaagagaagactctttggagaggaccccccaaaggaaatgcttatggacaagatcataacagaaggaacaaaattgaaaatcgctccttcttcaagcattactgctgaaaatgtatcaattttacctggtcaaactcttctaacaatggccacagccccagtaacaggaacaacaggacataaagttacaattccattacatggtgtcgcaaatgatgctggagagatcacactgatacctctttccatgaatacaaatcaggagtccaaagtcaagagtcctgtatcacttactgctcattcattaattggtgcttctccaaaacagaccaatctgactaaagcacaagaggtacattcaactggaataaacaggccaaagagaactgggtccttagcactattttacagaaaggtctatcatttggcaagtgtacgcttacgtgatctatgtctaaaactggatgtttcaaatgagttacgaaggaagatatggacgtgttttgaattcactttagttcactgtcctgatctaatgaaagacaggcatttggatcagctcctcctttgtgccttttatatcatggcaaaggtaacaaaagaagaaagaacttttcaagaaattatgaaaagttataggaatcagccccaagctaatagtcacgtatatagaagtgttctgctgaaaagtattccaagagaagttgtggcatataataaaaatataaatgatgactttgaaatgatagattgtgacttagaagatgctacaaaaacacctgactgttccagtggaccagtgaaagaggaaagaggtgatcttataaaattttacaatacaatatatgtaggaagagtgaagtcatttgcactgaaatacgacttggcgaatcaggaccatatgatggatgctccaccactctctccttttccacatattaaacaacagccaggctcaccacgccgcatttcccagcagcactccatttatatttccccgcacaagaatgggtcaggccttacaccaagaagcgctctgctgtacaagttcaatggcagcccttctaagagtttgaaagatatcaacaacatgataaggcaaggtgagcagagaaccaagaagcgagtaatagccatcgatagtgatgcagaatcccctgccaaacgcgtctgtcaagaaaatgatgacgttttactgaaacgactacaggatgttgtcagtgaaagagcaaatcattaatgttgttcttgtttctatgataaaagcactttcagattgttctgcagaaagttggagctctgtccttcaaaccttttagccctatagatgataaatatcactgggttataagaaaaaattgcacaaaaattatgtgctttttaaaatatttatccaaaatgtagttgacagagatgtattttgagttggattggaaaggaatattttaagtgccttttaaaaatactaatagtccggccaggcgctgtggctcacgcctgtaatcccaggactttgggaggccaaggcgggcagatcaccggaggtcaggagttcgagaccagcctgaccaacatggagaaaccccatctctactaaaaatacaaaattagccgggtgtggtggcgcatgcctgtaatcccagctacttgggaggctgaggcagaattgcttgaacccaggaagcggaggttgtggtgagccaaggttgcgccactgcactccagcctgggcaacaagagtaaaactccatctcaaaaaatatatatatatatataaatagggaattttttttaatgtttgctccttgagttttcaagatgaaataaggagaaaccccataactttttagctctcttttaaaaataaatgtctccttctgtgttctgtaatatgaggataaataatctacttttgatagc

SEQ ID NO: 28417 - protein, 1068 aa, Homo sapiens; identical to SEQ ID NO: 3891

SEQ ID NO: 28418 - DNA, 3243 bp, Homo sapiens
gcaggtggttgtgggtagcgcgcctgggagggagaaagaagtcgggggccgtggcgcgcagcccgcggggcctgaagggatgttcgaggacaagccccacgctgagggggcggcggtggtcgccgcagccggggaggcgctacaggccctgtgccaggagctgaacctggacgaggggagcgcggccgaagccctggacgactttactgccatccgaggcaactacagcctagagggagaagttacacactggttggcatgttcattatatgttgcatgccgcaaaagcattattcccacggttggaaagggtatcatggaaggcaactgtgtttcacttaccagaatactacgttcagctaaattaagtttaatacaattttttagtaaaatgaagaaatggatggacatgtcaaatctaccacaagaatttcgtgaacgtatagaaaggctagagagaaattttgaggtgtctactgtaatattcaaaaaatatgagccaatttttttagatatatttcaaaatccatatgaagaaccaccaaagttaccacgaagccggaagcagaggaggattccttgcagtgttaaggatctgtttaatttctgttggacactttttgtttatactaagggtaattttcggatgattggggatgacttagtaaactcttatcatttacttctatgctgcttggatctgatttttgccaatgcgattatgtgcccaaatagacaagacttgctaaatccatcatttaaaggtttaccatctgattttcatactgctgactttacggcttctgaagagccaccctgcatcattgctgtactgtgtgaactgcatgatggacttctcgtagaagcaaaaggaataaaggagcactactttaagccatatatttcaaaactctttgacaggaagatattaaaaggagaatgcctcctggacctttcaagttttactgataatagcaaagcagtgaataaggagtatgaagagtatgttctaactgttggtgattttgatgagaggatctttttgggagcagacgcagaagaggaaattggaacacctcgaaagttcactcgtgacaccccattagggaaactgacagcacaggctaatgtggagtataaccttcaacagcactttgaaaaaaaaaggtcatttgcaccttctaccccactgaccggacggagatatttacgagaaaaagaagcagtcattactcctgttgcatcagccacccaaagtgtgagccggttacagagtattgtggctggtctgaaaaatgcaccaagtgaccaacttataaatatttttgaatcttgtgtgcgtaatcctgtggaaaacattatgaaaatactaaaaggaataggagagactttctgtcaacactatactcaatcaacagatgaacagccaggatctcacatagactttgctgtaaacagactaaagctggcagaaattttgtattataaaatactagagactgtaatggttcaggaaacacgaagacttcatggaatggacatgtcagttcttttagagcaagatatatttcatcgttccttgatggcttgttgtttggaaattgtgctctttgcctatagctcacctcgtacttttccttggattattgaagttctcaacttgcaaccattttacttttataaggttattgaggtggtgatccgctcagaagaggggctctcaagggacatggtgaaacacctaaacagcattgaagaacagattttggagagtttagcatggagtcacgattctgcactgtgggaggctctccaggtttctgcaaacaaagttcctacctgtgaagaagttatattcccaaataactttgaaacaggaaatggaggaaatgtgcagggacatcttcccctgatgccaatgtctcctctaatgcacccaagagtcaaggaagttcgaactgacagtgggagtcttcgaagagatatgcaaccattgtctccaatttctgtccatgaacgctacagttctcctaccgcagggagtgctaagagaagactctttggagaggaccccccaaaggaaatgcttatggacaagatcataacagaaggaacaaaattgaaaatcgctccttcttcaagcattactgctgaaaatgtatcaattttacctggtcaaactcttctaacaatggccacagccccagtaacaggaacaacaggacataaagttacaattccattacatggtgtcgcaaatgatgctggagagatcacactgatacctctttccatgaatacaaatcaggagtccaaagtcaagagtcctgtatcacttactgctcattcattaattggtgcttctccaaaacagaccaatctgactaaagcacaagaggtacattcaactggaataaacaggccaaagagaactgggtccttagcactattttacagaaaggtctatcatttggcaagtgtacgcttacgtgatctatgtctaaaactggatgtttcaaatgagttacgaaggaagatatggacgtgttttgaattcactttagttcactgtcctgatctaatgaaagacaggcatttggatcagctcctcctttgtgccttttatatcatggcaaaggtaacaaaagaagaaagaacttttcaagaaattatgaaaagttataggaatcagccccaagctaatagtcacgtatatagaagtgttctgctgaaaagtattccaagagaagttgtggcatataataaaaatataaatgatgactttgaaatgatagattgtgacttagaagatgctacaaaaacacctgactgttccagtggaccagtgaaagaggaaagaggtgatcttataaaattttacaatacaatatatgtaggaagagtgaagtcatttgcactgaaatacgacttggcgaatcaggaccatatgatggatgctccaccactctctccttttccacatattaaacaacagccaggctcaccacgccgcatttcccagcagcactccatttatatttccccgcacaagaatgggtcaggccttacaccaagaagcgctctgctgtacaagttcaatggcagcccttctaaggtaaggtgaataggctaaaagttggatttcagattaacagtcagtaactgttaatcctgcctctttttttttttttcttttttggccaagttactactatactaataaaatatgaaatgttaactatg

SEQ ID NO: 28419 - protein, 1014 aa, Homo sapiens; identical to SEQ ID NO: 3893

SEQ ID NO: 28420 - DNA, 635 bp, Homo sapiens
ctattttaggtctatcatttggcaagtgtacgcttacgtgatctatgtctaaaactggatgtttcaaatgagttacgaaggaagatatggacgtgttttgaattcactttagttcactgtcctgatctaatgaaagacaggcatttggatcagctcctcctttgtgccttttatatcatggcaaaggtaacaaaagaagaaagaacttttcaagaaattatgaaaagttataggaatcagccccaagctaatagtcacgtatatagaagtgttctgctgaaaagtattccaagagaagttgtggcatataataaaaatataaatgatgactttgaaatgatagattgtggtaagttatccaatttaacatattatatgtaaaacacattggatcacactgtacataatacagtgggtgtcagacaacatggaaatgtgaatcataaggaggtgaggtggacaatgcatatgttttgaaaacaaataagtttgagattagaatgtgctggtatagtttattgaaaccattaatttgtcccctgttaattgtgttttggaagaagttttctagtctacttatacatgttaatgaaacacgtaaaagagacttaataaaattctaaaatctgaatgac

SEQ ID NO: 28421 - protein, 83 aa, Homo sapiens
MKDRHLDQLLLCAFYIMAKVTKEERTFQEIMKSYRNQPQANSHVYRSVLLKSIPREVVAYNKNINDDFEMIDCGKLSNLTYYM

SEQ ID NO: 28422 - DNA, 510 bp, Homo sapiens
caggtggttgtgggtagcgcgcctgggagggagaaagaagtcgggggccgtggcgcgcagcccgcggggcctgaagggatgttcgaggacaagccccacgctgagggggcggcggtggtcgccgcagccggggaggcgctacaggccctgtgccaggagctgaacctggacgaggggagcgcggccgaagccctggacgactttactgccatccgaggcaactacagcctagagggagaagttacacactggttggcatgttcattatatgttgcatgccgcaaaagcattattcccacggttggaaagggtatcatggaaggcaactgtgtttcacttaccagaatactacgttcagctaaattaaggggctgctgctgccctatgtctcctggccagttgacattttggcaaccatgaagtgacctgaagcgagcctccatttactgatattataattggagccttggtaccattcacccaatctcgctgagccagcaggggtctctg

SEQ ID NO: 28423 - protein, 113 aa, Homo sapiens
MFEDKPHAEGAAVVAAAGEALQALCQELNLDEGSAAEALDDFTAIRGNYSLEGEVTHWLACSLYVACRKSIIPTVGKGIMEGNCVSLTRILRSAKLRGCCCPMSPGQLTFWQP

SEQ ID NO: 28424 - DNA, 468 bp, Homo sapiens
atcgaagtacatggatcacaatgagctcaggaggatgggtactgactggatagaggacgatctcaggggcttttacctccaacctgtgtttgcctaccgctagatctgagagacctgctgtgtgaccctgagccctcgctgtgcatcatcgcttcccagactctgttactagtccagatggcgagggccgaaccaaaacctaagcagagagtgaactggttgcagaagctcatgggcaggtcctctgcctagaaacacaaggcaagcaacatcagagacagaatcttgctatgttgtgcggcaagctagtcttgaactcatggcctcaagtcatcctcctgtgtcagcctcccaaagtgctgggattacaagcatgcaccacggcacccagcagaattccagtcttgagaaacaggtcaaggacagcttcaaaagagattctaaataaatgttaatgttacaatgtta

SEQ ID NO: 28425 - protein, 30 aa, Homo sapiens
MDHNELRRMGTDWIEDDLRGFYLQPVFAYR

SEQ ID NO: 28426 - DNA, 3433 bp, Homo sapiens
aaccccgccaggtcgcgggcactcccaccagctcgcagccctccttcggaccctcgatccgagagcgccccagccagagcttgtgcccatgcccctgtcccgcaggggaaggggatcccgcctggccggctctcgagcggcgactagtaacctcccgcgggcgacagccctctccccaaagccacgcgcaactcctcacccggcggcgccattcctccgagcaggtcccgccggagtccgagccgcgggctgacttccgctcgggaaagtggctccaagagcccgccacaggggacgccagggactcgcggcaggctctgcgggccaggatgagttctaagcacaggatctgtagtcaggaagaagtagtgatcccctgtgcctatgacagtgattcagaaagtgtggatttggagctgagcaacttagagattattaaaaaaggctcaagtagcattgaactgacagacttggacatccctgacatccctggactccattgtgagcccctgtcacatagccccagacacctgacccaacaggacccgctcagtgaggccattgttgagaaactgatccagtccatccagaaggttttcaatggtgagctaaagggtgaacttgaaaagctgaaattcctaggagatctgtcttctctcagccaagctttaccttatgatgaaaccgcaaaatcattcattcacagccacatagcagacattgtgcataccttaaatgtactggtacaagaggaacgcccgcattctctgtccagttccatgcgccaggaggtctttgtcaccatcgctgatctcagttaccaagatgtccatttgctgttgggctctgaagatcgagctgagttgttcagtcttaccatcaagagtataatcactctgccctctgtaaggacccttacccagatacaggaaatcatgcccaatgggacctgcaacacagagtgtctttacaggcagacgtttcaggcattctctgagatgctccagagtttggtggtaaaagacccacatttggaaaatcttgacaccattattaagcacttggtcccctggttacagtcagtcaaagaccatgagcgggaacgggccacggccagcatggctcaagttctgaagtgcctatccaaacatctcaacttgaagcttccactgcgattccaaagacttggacacctagtggctctgatggcactgctctgtggggacccacaggaaaaggtggctgaggaggctgcagagggcattcactccctgctgcatatcaccctgaggctgaagtatatcactcatgacaagaaagatcagcaaaacttgaaaagagcattgacaaaatgtcgagaattcctggagctccacagctctgccgctaaatgcttctacaactgtcccttcagaattgcccaggtctttgaaggttttcttgattcaaatgagctctgccagtttataatgactacatttgataccctgaaaaccctgaaacatccctgcatccagcgatcagcaggagaattactgctaactttggcaaaaaatacagagtcccaatttgagaaggtgccagaaattatgggagttatctgtgcccagttatccataatcagccagcctagagtccgccaacaaatcataaataccgtgagtttatttatatccagacccaagtacacagatatagtgctcagcttccttctgtgtcatccagtgccgtataacaggcacctggctgaggtgtggagaatgctgtcggtggagcttcccagcacgacctggattctgtggaggctcctgaggaagctgcagaaatgccataatgagcctgcacaggagaagatggcatatgtggctgtggctgcaacagatgccctttatgaggtgtttttgggaaacaggcttcgagcagctacgttccgactctttcctcagcttctcatgacactgcttatccagattcatcacagcatcggcctcaccatgtctgatgtcgacatcccaagtggcctgtacacagaacaggaagtgccttcagaggtcacccctttgtgctttgccatgcaggctacaaagactctcctcctcagaacatgctgcttgcaggaattcaacatcatggaaaagaataaaggatgggctctcctgggaggaaaagatggccatcttcagggactatttctccttgccaacgcattgctggaaagaaatcagctccttgcacagaaggtcatgtacttattagtccctcttcttaaccgagggaatgataaacataaactcacatctgcaggcttttttgtggagcttctccggagtccagtggccaagagactgcccagcatatactctgttgcccgctttaaagactggctacaagatggaaatcatctctttagaattctcggcctgaggggactgtacaatcttgttggacaccaggagatgagagaagacatcaagagcctgttgccatacattgtagacagcttgcgtgaaaccgatgagaagatcgttctgtcagccatccagatactcctgcaacttgttagaacaatggatttcactaccctggctgccatgatgaggaccctgttctccttatttggtgatgtgagatctgatgttcatcgtttctccgtgactctctttggagccgccataaagtctgtaaaaaacccagataagaagagtatagagaaccaagtcctggacagcttggtcccactacttctgtattctcaggatgaaaatgatgcagtagctgaggagagcaggcaagtcctaactatatgtgcccagttcctgaagtggaagctgccccaagaagtgtactccaaagatccctggcacatcaaacctactgaagcaggaacaatctgcagattctttgaaaaaaagtgcaaggggaaaattaacatcctagaacaaacactgatgtactccaagaacccaaaacttcccatcagaagatcagcagtcttgtttgtaggccttttatcgaagtacatggatcacaatgagctcaggaggatgggtactgactggatagaggacgatctgagagacctgctgtgtgaccctgagccctcgctgtgcatcatcgcttcccagactctgttactagtccagatggcgagggccgaaccaaaacctaagcagagagtgaactggttgcagaagctcatgggcaggtcctctgcctagaaacacaaggcaagcaacatcagagacagaatcttgctatgttgtgcggcaagctagtcttgaactcatggcctcaagtcatcctcctgtgtcagcctcccaaagtgctgggattacaagcatgcaccacggcacccagcagaattccagtcttgagaaacaggtcaaggacagcttcaaaagagattctaaataaatgttaatgttacaatgtt

SEQ ID NO: 28427 - protein, 962 aa, Homo sapiens
MSSKHRICSQEEVVIPCAYDSDSESVDLELSNLEIIKKGSSSIELTDLDIPDIPGLHCEPLSHSPRHLTQQDPLSEAIVEKLIQSIQKVFNGELKGELEKLKFLGDLSSLSQALPYDETAKSFIHSHIADIVHTLNVLVQEERPHSLSSSMRQEVFVTIADLSYQDVHLLLGSEDRAELFSLTIKSIITLPSVRTLTQIQEIMPNGTCNTECLYRQTFQAFSEMLQSLVVKDPHLENLDTIIKHLVPWLQSVKDHERERATASMAQVLKCLSKHLNLKLPLRFQRLGHLVALMALLCGDPQEKVAEEAAEGIHSLLHITLRLKYITHDKKDQQNLKRALTKCREFLELHSSAAKCFYNCPFRIAQVFEGFLDSNELCQFIMTTFDTLKTLKHPCIQRSAGELLLTLAKNTESQFEKVPEIMGVICAQLSIISQPRVRQQIINTVSLFISRPKYTDIVLSFLLCHPVPYNRHLAEVWRMLSVELPSTTWILWRLLRKLQKCHNEPAQEKMAYVAVAATDALYEVFLGNRLRAATFRLFPQLLMTLLIQIHHSIGLTMSDVDIPSGLYTEQEVPSEVTPLCFAMQATKTLLLRTCCLQEFNIMEKNKGWALLGGKDGHLQGLFLLANALLERNQLLAQKVMYLLVPLLNRGNDKHKLTSAGFFVELLRSPVAKRLPSIYSVARFKDWLQDGNHLFRILGLRGLYNLVGHQEMREDIKSLLPYIVDSLRETDEKIVLSAIQILLQLVRTMDFTTLAAMMRTLFSLFGDVRSDVHRFSVTLFGAAIKSVKNPDKKSIENQVLDSLVPLLLYSQDENDAVAEESRQVLTICAQFLKWKLPQEVYSKDPWHIKPTEAGTICRFFEKKCKGKINILEQTLMYSKNPKLPIRRSAVLFVGLLSKYMDHNELRRMGTDWIEDDLRDLLCDPEPSLCIIASQTLLLVQMARAEPKPKQRVNWLQKLMGRSSA

SEQ ID NO: 28428 - DNA, 2088 bp, Homo sapiens
accaaccccgccaggtcgcgggcactcccaccagctcgcagccctccttcggaccctcgatccgagagcgccccagccagagcttgtgcccatgcccctgtcccgcaggggaaggggatcccgcctggccggctctcgagcggcgactagtaacctcccgcgggcgacagccctctccccaaagccacgcgcaactcctcacccggcggcgccattcctccgagcaggtcccgccggagtccgagccgcgggctgacttccgctcgggaaagtggctccaagagcccgccacaggggacgccagggactcgcggcaggctctgcgggccaggatgagttctaagcacaggatctgtagtcaggaagaagtagtgatcccctgtgcctatgacagtgattcagaaagtgtggatttggagctgagcaacttagagattattaaaaaaggctcaagtagcattgaactgacagacttggacatccctgacatccctggactccattgtgagcccctgtcacatagccccagacacctgacccaacaggacccgctcagtgaggccattgttgagaaactgatccagtccatccagaaggttttcaatggtgagctaaagggtgaacttgaaaagctgaaattcctaggagatctgtcttctctcagccaagctttaccttatgatgaaaccgcaaaatcattcattcacagccacatagcagacattgtgcataccttaaatgtactggtacaagaggaacgcccgcattctctgtccagttccatgcgccaggaggtctttgtcaccatcgctgatctcagttaccaagatgtccatttgctgttgggctctgaagatcgagctgagttgttcagtcttaccatcaagagtataatcactctgccctctgtaaggacccttacccagatacaggaaatcatgcccaatgggacctgcaacacagagtgtctttacaggcagacgtttcaggcattctctgagatgctccagagtttggtggtaaaagacccacatttggaaaatcttgacaccattattaagcacttggtcccctggttacagtcagtcaaagaccatgagcgggaacgggccacggccagcatggctcaagttctgaagtgcctatccaaacatctcaacttgaagcttccactgcgattccaaagacttggacacctagtggctctgatggcactgctctgtggggacccacaggaaaaggtggctgaggaggctgcagagggcattcactccctgctgcatatcaccctgaggctgaagtatatcactcatgacaagaaagatcagcaaaacttgaaaagagcattgacaaaatgtcgagaattcctggagctccacagctctgccgctaaatgcttctacaactgtcccttcagaattgcccaggtctttgaaggttttcttgattcaaatgagctctgccagtttataatgactacatttgataccctgaaaaccctgaaacatccctgcatccagcgatcagcaggagaattactgctaactttggcaaaaaatacagagtcccaatttgagaaggtgccagaaattatgggagttatctgtgcccagttatccataatcagccagcctagagtccgccaacaaatcataaataccgtgagtttatttatatccagacccaagtacacagatatagtgctcagcttccttctgtgtcatccagtgccgtataacaggcacctggctgaggtgtggagaatgctgtcggtggagcttcccagcacgacctggattctgtggaggctcctgaggaagctgcagaaatgccataatgagcctgcacaggagaagatggcatatgtggctgtggctgtaagcccttgagctttgcccctctaatgtcagcccctcccaggatgactgaccccacaccccagtggagagtgttccttttggtccctctcaaagcctgcatctgtcatccatttataagtctacagtgtttctgccaagggattgacatggagggagctggggagagtgaaggagtcagaatgccttaatacaaactcgtccaacctgc

SEQ ID NO: 28429 - protein, 518 aa, Homo sapiens
MSSKHRICSQEEVVIPCAYDSDSESVDLELSNLEIIKKGSSSIELTDLDIPDIPGLHCEPLSHSPRHLTQQDPLSEAIVEKLIQSIQKVFNGELKGELEKLKFLGDLSSLSQALPYDETAKSFIHSHIADIVHTLNVLVQEERPHSLSSSMRQEVFVTIADLSYQDVHLLLGSEDRAELFSLTIKSIITLPSVRTLTQIQEIMPNGTCNTECLYRQTFQAFSEMLQSLVVKDPHLENLDTIIKHLVPWLQSVKDHERERATASMAQVLKCLSKHLNLKLPLRFQRLGHLVALMALLCGDPQEKVAEEAAEGIHSLLHITLRLKYITHDKKDQQNLKRALTKCREFLELHSSAAKCFYNCPFRIAQVFEGFLDSNELCQFIMTTFDTLKTLKHPCIQRSAGELLLTLAKNTESQFEKVPEIMGVICAQLSIISQPRVRQQIINTVSLFISRPKYTDIVLSFLLCHPVPYNRHLAEVWRMLSVELPSTTWILWRLLRKLQKCHNEPAQEKMAYVAVAVSP

SEQ ID NO: 28430 - DNA, 2000 bp, Homo sapiens
gcacccctcccccaggcaccaaccccgccaggtcgcgggcactcccaccagctcgcagccctccttcggaccctcgatccgagagcgccccagccagagcttgtgcccatgcccctgtcccgcaggggaaggggatcccgcctggccggctctcgagcggcgactagtaacctcccgcgggcgacagccctctccccaaagccacgcgcaactcctcacccggcggcgccattcctccgagcaggtcccgccggagtccgagccgcgggctgacttccgctcgggaaagtggctccaagagcccgccacaggggacgccagggactcgcggcaggctctgcgggccaggatgagttctaagcacaggatctgtagtcaggaagaagtagtgatcccctgtgcctatgacagtgattcagaaagtgtggatttggagctgagcaacttagagattattaaaaaaggctcaagtagcattgaactgacagacttggacatccctgacatccctggactccattgtgagcccctgtcacatagccccagacacctgacccaacaggacccgctcagtgaggccattgttgagaaactgatccagtccatccagaaggttttcaatggtgagctaaagggtgaacttgaaaagctgaaattcctaggagatctgtcttctctcagccaagctttaccttatgatgaaaccgcaaaatcattcattcacagccacatagcagacattgtgcataccttaaatgtactggtacaagaggaacgcccgcattctctgtccagttccatgcgccaggaggtctttgtcaccatcgctgatctcagttaccaagatgtccatttgctgttgggctctgaagatcgagctgagttgttcagtcttaccatcaagagtataatcactctgccctctgtaaggacccttacccagatacaggaaatcatgcccaatgggacctgcaacacagagtgtctttacaggcagacgtttcaggcattctctgagatgctccagagtttggtggtaaaagacccacatttggaaaatcttgacaccattattaagcttccactgcgattccaaagacttggacacctagtggctctgatggcactgctctgtggggacccacaggaaaaggtggctgaggaggctgcagagggcattcactccctgctgcatatcaccctgaggctgaagtatatcactcatgacaagaaagatcagcaaaacttgaaaagagcattgacaaaatgtcgagaattcctggagctccacagctctgccgctaaatgcttctacaactgtcccttcagaattgcccaggtctttgaaggttttcttgattcaaatgagctctgccagtttataatgactacatttgataccctgaaaaccctgaaacatccctgcatccagcgatcagcaggagaattactgctaactttggcaaaaaatacagagtcccaatttgagaaggtgccagaaattatgggagttatctgtgcccagttatccataatcagccagcctagagtccgccaacaaatcataaataccgtgagtttatttatatccagacccaagtacacagatatagtgctcagcttccttctgtgtcatccagtgccgtataacaggcacctggctgaggtgtggagaatgctgtcggtggagcttcccagcacgacctggattctgtggaggctcctgaggaagctgcagaaatgccataatgagcctgcacaggagaagatggcatatgtggctgtggctgtaagcccttgagctttgcccctctaatgtcagcccctcccaggatgactgaccccacaccccagtggagagtgttccttttggtccctctcaaagcctgcatctgtcatccatttataagtctacagtgtttctgccaagggattgacatggagggagctggggagagtgaaggagtcagaatgccttaatacaaactcgtccaacctgc

SEQ ID NO: 28431 - protein, 483 aa, Homo sapiens
MSSKHRICSQEEVVIPCAYDSDSESVDLELSNLEIIKKGSSSIELTDLDIPDIPGLHCEPLSHSPRHLTQQDPLSEAIVEKLIQSIQKVFNGELKGELEKLKFLGDLSSLSQALPYDETAKSFIHSHIADIVHTLNVLVQEERPHSLSSSMRQEVFVTIADLSYQDVHLLLGSEDRAELFSLTIKSIITLPSVRTLTQIQEIMPNGTCNTECLYRQTFQAFSEMLQSLVVKDPHLENLDTIIKLPLRFQRLGHLVALMALLCGDPQEKVAEEAAEGIHSLLHITLRLKYITHDKKDQQNLKRALTKCREFLELHSSAAKCFYNCPFRIAQVFEGFLDSNELCQFIMTTFDTLKTLKHPCIQRSAGELLLTLAKNTESQFEKVPEIMGVICAQLSIISQPRVRQQIINTVSLFISRPKYTDIVLSFLLCHPVPYNRHLAEVWRMLSVELPSTTWILWRLLRKLQKCHNEPAQEKMAYVAVAVSP

SEQ ID NO: 28432 - DNA, 728 bp, Homo sapiens
ctcgtcgggaggggatagcttagaagggatttttttttcctctttagaaaattgtggcagtttctggccgggcgcagtggctcacgcctgtaatcccagaactttgggaggccgaggcgggcggattacctgaggtgaggagttcgagatcagcctgggcaacacggtgaaaccccgtctctactaaaaatacaaaattatagctgggactgctgccttgcgacaccacgcccagctaatctttaaaattatttttggtagataccgcgtctcgctttgttgcccaggctggtctggaactcgggctcaaaggatccttcggccttagcctcccaaagtgctgagattacaggctaatcccattttaaagagaaggaaacagatttgaacctaggcagctgactccagaatctgtgcttttaactacagttttatgaacatataaagtatgcacaatataactcttattaacgttattattgtcccaaatgttatcccgcatgggagagagtcagttctttctgtgtctgttatgatagccactagccttatgtggatatttaaatttgaatttaaatggattaaaattaagtaaaatttaaaattcagtctctcatttgtactagccacatttcaagtgctcagtagccacagataactagtggatatcagattggaccactcaaaattataggacatcttcattattgcagaaagttccattgggc

SEQ ID NO: 28433 - protein, 48 aa, Homo sapiens [sequence omitted]

SEQ ID NO: 28434 - DNA, 1057 bp, Homo sapiens
aaccgcgtcccggtagctcccggaataggagcgttgcgagacggtcggttccaagtgggcctgggcgcgggggagaggcgggtctgtcctcgggaactgcaaggccctgtgagcgggaggactgggatcccggccgcggctgctggaagcgtcgaagctcagcggggccgcggacactgacctgtgcttagaactcatcctggcccgcagagcctgccgcgagtccctggcgtcccctgtggcgggctcttggagccactttcccgagcggaagtcagcccgcggctcggactccggcgggacctgctcggaggaatggcgccgccgggttcaagcactgtcttcctgttggccctgacaatcatagccagcacctgggctctgacgcccactcactacctcaccaagcatgacgtggagagactaaaagcctcgctggatcgccctttcacaaatttggaatctgccttctactccatcgtgggactcagcagccttggtgctcaggtgccagatgcaaagaaagcatgtacctacatcagatctaaccttgatcccagcaatgtggattccctcttctacgctgcccaggccagccaggccctctcaggatgtgagatctctatttcaaatgagaccaaagatctgcttctggcagctgtcagtgaggactcatctgttacccagatctaccatgcagttgcagctctaagtggctttggccttcccttggcatcccaagaagcactcagtgcccttactgctcgtctcagcaaggaggagactgtgctggcgtgagttgtcatctcgagcatttctcaggcttcatttgtctcgggtcctatccgaagagggctcattcattggttcagcaaatactttctgggcaagtacttgcagtaaatacttccgtgtgccaggtgctctgcaaggcaccgcagacatgattgcatgaaggcaagtaaggtccgtgtcctcgtggagctcacatggacacagtcttctgcaagcctcgcagacagaaggcaagcgctgagccagagcatgagcacaccac

SEQ ID NO: 28435 - protein, 160 aa, Homo sapiens [sequence omitted]

SEQ ID NO: 28436 - DNA, 2314 bp, Homo sapiens
aaccgcgtcccggtagctcccggaataggagcgttgcgagacggtcggttccaagtgggcctgggcgcgggggagaggcgggtctgtcctcgggaactgcaaggccctgtgagcgggaggactgggatcccggccgcggctgctggaagcgtcgaagctcagcggggccgcggacactgacctgtgcttagaactcatcctggcccgcagagcctgccgcgagtccctggcgtcccctgtggcgggctcttggagccactttcccgagcggaagtcagcccgcggctcggactccggcgggacctgctcggaggaatggcgccgccgggttcaagcactgtcttcctgttggccctgacaatcatagccagcacctgggctctgacgcccactcactacctcaccaagcatgacgtggagagactaaaagcctcgctggatcgccctttcacaaatttggaatctgccttctactccatcgtgggactcagcagccttggtgctcaggtgccagatgcaaagaaagcatgtacctacatcagatctaaccttgatcccagcaatgtggattccctcttctacgctgcccaggccagccaggccctctcaggatgtgagatctctatttcaaatgagaccaaagatctgcttctggcagctgtcagtgaggactcatctgttacccagatctaccatgcagttgcagctctaagtggctttggccttcccttggcatcccaagaagcactcagtgcccttactgctcgtctcagcaaggaggagactgtgctggcaacagtccaggctctgcagacagcatcccacctgtcccagcaggctgacctgaggagcatcgtggaggagattgaggaccttgttgctcgcctggatgaactcgggggcgtgtatctccagtttgaagaaggactggaaacaacagcgttatttgtggctgccacctacaagctcatggatcatgtggggactgagccatccattaaggaggatcaggtcatccagctgatgaacgcgatcttcagcaagaagaactttgagtccctctccgaagccttcagcgtggcctctgcagctgctgtgctctcgcataatcgctaccacgtgccagttgtggttgtgcctgagggctctgcttccgacactcatgaacaggctatcttgcggttgcaagtcaccaatgttctgtctcagcctctgactcaggccactgttaaactagaacatgctaaatctgttgcttccagagccactgtcctccagaagacatccttcacccctgtaggggatgtttttgaactaaatttcatgaacgtcaaattttccagtggttattatgacttccttgtcgaagttgaaggtgacaaccggtatattgcaaataccgtagagctcagagtcaagatctccactgaagttggcatcacaaatgttgatctttccaccgtggataaggatcagagcattgcacccaaaactacccgggtgacatacccagccaaagccaagggcacattcatcgcagacagccaccagaacttcgccttgttcttccagctggtagatgtgaacactggtgctgaactcactcctcaccagacatttgtccgactccataaccagaagactggccaggaagtggtgtttgttgccgagccagacaacaagaacgtgtacaagtttgaactggatacctctgaaagaaagattgaatttgactctgcctctggcacctacactctctacttaatcattggagatgccactttgaagaacccaatcctctggaatgtggctgatgtggtcatcaagttccctgaggaagaagctccctcgactgtcttgtcccagaaccttttcactccaaaacaggaaattcagcacctgttccgcgagcctgagaagaggccccccaccgtggtgtccaatacattcactgccctgatcctctcgccgttgcttctgctcttcgctctgtggatccggattggtgccaatgtctccaacttcacttttgctcctagcacgattatatttcacctgggacatgctgctatgctgggactcatgtatgtctactggactcagctcaacatgttccagaccttgaagtacctggccatcctgggcagtgtgacgtttctggctggcaatcggatgctggcccagcaggcagtcaagagaacagcacattagttccagaagaaagatggaaattctgaaaactgaatgtcaagaaaaggagtcaagaacaattcacagtatgagaagaaaaatggaaaaaaaaaactttatttaa

SEQ ID NO: 28437 - protein, 631 aa, Homo sapiens; identical to SEQ ID NO: 3901

SEQ ID NO: 28438 - DNA, 2516 bp, Homo sapiens
aaccgcgtcccggtagctcccggaataggagcgttgcgagacggtcggttccaagtgggcctgggcgcgggggagaggcgggtctgtcctcgggaactgcaaggccctgtgagcgggaggactgggatcccggccgcggctgctggaagcgtcgaagctcagcggggccgcggacactgacctgtgcttagaactcatcctggcccgcagagcctgccgcgagtccctggcgtcccctgtggcgggctcttggagccactttcccgagcggaagtcagcccgcggctcggactccggcgggacctgctcggaggaatggcgccgccgggttcaagcactgtcttcctgttggccctgacaatcatagccagcacctgggctctgacgcccactcactacctcaccaagcatgacgtggagagactaaaagcctcgctggatcgccctttcacaaatttggaatctgccttctactccatcgtgggactcagcagccttggtgctcaggtgccagatgcaaagaaagcatgtacctacatcagatctaaccttgatcccagcaatgtggattccctcttctacgctgcccaggccagccaggccctctcaggatgtgagatctctatttcaaatgagaccaaagatctgcttctggcagctgtcagtgaggactcatctgttacccagatctaccatgcagttgcagctctaagtggctttggccttcccttggcatcccaagaagcactcagtgcccttactgctcgtctcagcaaggaggagactgtgctggcaacagtccaggctctgcagacagcatcccacctgtcccagcaggctgacctgaggagcatcgtggaggagattgaggaccttgttgctcgcctggatgaactcgggggcgtgtatctccagtttgaagaaggactggaaacaacagcgttatttgtggctgccacctacaagctcatggatcatgtggggactgagccatccattaaggaggatcaggtcatccagctgatgaacgcgatcttcagcaagaagaactttgagtccctctccgaagccttcagcgtggcctctgcagctgctgtgctctcgcataatcgctaccacgtgccagttgtggttgtgcctgagggctctgcttccgacactcatgaacaggctatcttgcggttgcaagtcaccaatgttctgtctcagcctctgactcaggccactgttaaactagaacatgctaaatctgttgcttccagagccactgtcctccagaagacatccttcacccctgtaggggatgtttttgaactaaatttcatgaacgtcaaattttccagtggttattatgacttccttgtcgaagttgaaggtgacaaccggtatattgcaaataccgtagagctcagagtcaagatctccactgaagttggcatcacaaatgttgatctttccaccgtggataaggatcagagcattgcacccaaaactacccgggtgacatacccagccaaagccaagggcacattcatcgcagacagccaccagaacttcgccttgttcttccagctggtagatgtgaacactggtgctgaactcactcctcaccagacatttgtccgactccataaccagaagactggccaggaagtggtgtttgttgccgagccagacaacaagaacgtgtacaagtttgaactggatacctctgaaagaaagattgaatttgactctgcctctggcacctacactctctacttaatcattggagatgccactttgaagaacccaatcctctggaatgtggctgatgtggtcatcaagttccctgaggaagaagctccctcgactgtcttgtcccagaaccttttcactccaaaacaggaaattcagcacctgttccgcgagcctgagaagaggccccccaccgtggtgtccaatacattcactgccctgatcctctcgccgttgcttctgctcttcgctctgtggatccggattggtgccaatgtctccaacttcacttttgctcctagcacgattatatttcacctgggacatgctgctatgctgggactcatgtatgtctactggactcagctcaacatgttccagaccttgaagtacctggccatcctgggcagtgtgacgtttctggctggcaatcggatgctggcccagcaggcagtcaagagaacagcacattagttccagaagaaagatggaaattctgaaaactgaatgtcaagaaaaggagtcaagaacaattcacagtatgagaagaaaaatggaaaaaaaaaactttatttaaaaaagaaaaaagtccagattgtagttatacttttgcttgtttttcagtttccccaacacacagcagatacctggtgagctcagatagtctctttctctgacactgtgtaagaagctgtgaatattcctaacttacccagatgttgcttttgaaaagttgaaatgtgtaattgttttggaataaagagggtaacaataggaac

SEQ ID NO: 28439 - protein, 631 aa, Homo sapiens; identical to SEQ ID NO: 3901

SEQ ID NO: 28440 - DNA, 2743 bp, Homo sapiens
aaccgcgtcccggtagctcccggaataggagcgttgcgagacggtcggttccaagtgggcctgggcgcgggggagaggcgggtctgtcctcgggaactgcaaggccctgtgagcgggaggactgggatcccggccgcggctgctggaagcgtcgaagctcagcggggccgcggacactgacctgtgcttagaactcatcctggcccgcagagcctgccgcgagtccctggcgtcccctgtggcgggctcttggagccactttcccgagcggaagtcagcccgcggctcggactccggcgggacctgctcggaggaatggcgccgccgggttcaagcactgtcttcctgttggccctgacaatcatagccagcacctgggctctgacgcccactcactacctcaccaagcatgacgtggagagactaaaagcctcgctggatcgccctttcacaaatttggaatctgccttctactccatcgtgggactcagcagccttggtgctcaggtgccagatgcaaagaaagcatgtacctacatcagatctaaccttgatcccagcaatgtggattccctcttctacgctgcccaggccagccaggccctctcaggatgtgagatctctatttcaaatgagaccaaagatctgcttctggcagctgtcagtgaggactcatctgttacccagatctaccatgcagttgcagctctaagtggctttggccttcccttggcatcccaagaagcactcagtgcccttactgctcgtctcagcaaggaggagactgtgctggcaacagtccaggctctgcagacagcatcccacctgtcccagcaggctgacctgaggagcatcgtggaggagattgaggaccttgttgctcgcctggatgaactcgggggcgtgtatctccagtttgaagaaggactggaaacaacagcgttatttgtggctgccacctacaagctcatggatcatgtggggactgagccatccattaaggaggatcaggtcatccagctgatgaacgcgatcttcagcaagaagaactttgagtccctctccgaagccttcagcgtggcctctgcagctgctgtgctctcgcataatcgctaccacgtgccagttgtggttgtgcctgagggctctgcttccgacactcatgaacaggctatcttgcggttgcaagtcaccaatgttctgtctcagcctctgactcaggccactgttaaactagaacatgctaaatctgttgcttccagagccactgtcctccagaagacatccttcacccctgtaggggatgtttttgaactaaatttcatgaacgtcaaattttccagtggttattatgacttccttgtcgaagttgaaggtgacaaccggtatattgcaaataccgtagagctcagagtcaagatctccactgaagttggcatcacaaatgttgatctttccaccgtggataaggatcagagcattgcacccaaaactacccgggtgacatacccagccaaagccaagggcacattcatcgcagacagccaccagaacttcgccttgttcttccagctggtagatgtgaacactggtgctgaactcactcctcaccagacatttgtccgactccataaccagaagactggccaggaagtggtgtttgttgccgagccagacaacaagaacgtgtacaagtttgaactggatacctctgaaagaaagattgaatttgactctgcctctggcacctacactctctacttaatcattggagatgccactttgaagaacccaatcctctggaatgtggctgatgtggtcatcaagttccctgaggaagaagctccctcgactgtcttgtcccagaaccttttcactccaaaacaggaaattcagcacctgttccgcgagcctgagaagaggccccccaccgtggtgtccaatacattcactgccctgatcctctcgccgttgcttctgctcttcgctctgtggatccggattggtgccaatgtctccaacttcacttttgctcctagcacgattatatttcacctgggacatgctgctatgctgggactcatgtatgtctactggactcagctcaacatgttccagaccttgaagtacctggccatcctgggcagtgtgacgtttctggctggcaatcggatgctggcccagcaggcagtcaagagaacagcacattagttccagaagaaagatggaaattctgaaaactgaatgtcaagaaaaggagtcaagaacaattcacagtatgagaagaaaaatggaaaaaaaaaactttatttaaaaaagaaaaaagtccagattgtagttatacttttgcttgtttttcagtttccccaacacacagcagatacctggtgagctcagatagtctctttctctgacactgtgtaagaagctgtgaatattcctaacttacccagatgttgcttttgaaaagttgaaatgtgtaattgttttggaataaagagggtaacaataggaacaaaggcctgattgagagcttattctcatacttttgggtggtggggtccttgggtatatgacatgaggacttagttggaaatgctgttgatgccagcatatttctccaggcctttcttggtccttcttgccccttgctcctaacagaactgagaactgcctggaaaggccagcttccttttttcttctccagcagtgagcaccagctgtctgcataggagccctgttg

SEQ ID NO: 28441 - protein, 631 aa, Homo sapiens; identical to SEQ ID NO: 3901

SEQ ID NO: 28442 - DNA, 2450 bp, Homo sapiens
cccggaataggagcgttgcgagacggtcggttccaagtgggcctgggcgcgggggagaggcgggtctgtcctcgggaactgcaaggccctgtgagcgggaggactgggatcccggccgcggctgctggaagcgtcgaagctcagcggggccgcggacactgacctgtgcttagaactcatcctggcccgcagagcctgccgcgagtccctggcgtcccctgtggcgggctcttggagccactttcccgagcggaagtcagcccgcggctcggactccggcgggacctgctcggaggaatggcgccgccgggttcaagcactgtcttcctgttggccctgacaatcatagccagcacctgggctctgacgcccactcactacctcaccaagcatgacgtggagagactaaaagcctcgctggatcgccctttcacaaatttggaatctgccttctactccatcgtgggactcagcagccttggtgctcaggtgccagatgcaaagatctctatttcaaatgagaccaaagatctgcttctggcagctgtcagtgaggactcatctgttacccagatctaccatgcagttgcagctctaagtggctttggccttcccttggcatcccaagaagcactcagtgcccttactgctcgtctcagcaaggaggagactgtgctggcaacagtccaggctctgcagacagcatcccacctgtcccagcaggctgacctgaggagcatcgtggaggagattgaggaccttgttgctcgcctggatgaactcgggggcgtgtatctccagtttgaagaaggactggaaacaacagcgttatttgtggctgccacctacaagctcatggatcatgtggggactgagccatccattaaggaggatcaggtcatccagctgatgaacgcgatcttcagcaagaagaactttgagtccctctccgaagccttcagcgtggcctctgcagctgctgtgctctcgcataatcgctaccacgtgccagttgtggttgtgcctgagggctctgcttccgacactcatgaacaggctatcttgcggttgcaagtcaccaatgttctgtctcagcctctgactcaggccactgttaaactagaacatgctaaatctgttgcttccagagccactgtcctccagaagacatccttcacccctgtaggggatgtttttgaactaaatttcatgaacgtcaaattttccagtggttattatgacttccttgtcgaagttgaaggtgacaaccggtatattgcaaataccgtagagctcagagtcaagatctccactgaagttggcatcacaaatgttgatctttccaccgtggataaggatcagagcattgcacccaaaactacccgggtgacatacccagccaaagccaagggcacattcatcgcagacagccaccagaacttcgccttgttcttccagctggtagatgtgaacactggtgctgaactcactcctcaccagacatttgtccgactccataaccagaagactggccaggaagtggtgtttgttgccgagccagacaacaagaacgtgtacaagtttgaactggatacctctgaaagaaagattgaatttgactctgcctctggcacctacactctctacttaatcattggagatgccactttgaagaacccaatcctctggaatgtggctgatgtggtcatcaagttccctgaggaagaagctccctcgactgtcttgtcccagaaccttttcactccaaaacaggaaattcagcacctgttccgcgagcctgagaagaggccccccaccgtggtgtccaatacattcactgccctgatcctctcgccgttgcttctgctcttcgctctgtggatccggattggtgccaatgtctccaacttcacttttgctcctagcacgattatatttcacctgggacatgctgctatgctgggactcatgtatgtctactggactcagctcaacatgttccagaccttgaagtacctggccatcctgggcagtgtgacgtttctggctggcaatcggatgctggcccagcaggcagtcaagaggatcgctgcagagcagagcagtagattggcaaaatataggacactacgaacagcacattagttccagaagaaagatggaaattctgaaaactgaatgtcaagaaaaggagtcaagaacaattcacagtatgagaagaaaaatggaaaaaaaaaactttatttaaaaaagaaaaaagtccagattgtagttatacttttgcttgtttttcagtttccccaacacacagcagatacctggtgagctcagatagtctctttctctgacactgtgtaagaagctgtgaatattcctaacttacccagatgttgcttttgaaaagttgaaatgtgtaattgttttggaataaagagggtaacaataggaac

SEQ ID NO: 28443 - protein, 615 aa, Homo sapiens
MAPPGSSTVFLLALTIIASTWALTPTHYLTKHDVERLKASLDRPFTNLESAFYSIVGLSSLGAQVPDAKISISNETKDLLLAAVSEDSSVTQIYHAVAALSGFGLPLASQEALSALTARLSKEETVLATVQALQTASHLSQQADLRSIVEEIEDLVARLDELGGVYLQFEEGLETTALFVAATYKLMDHVGTEPSIKEDQVIQLMNAIFSKKNFESLSEAFSVASAAAVLSHNRYHVPVVVVPEGSASDTHEQAILRLQVTNVLSQPLTQATVKLEHAKSVASRATVLQKTSFTPVGDVFELNFMNVKFSSGYYDFLVEVEGDNRYIANTVELRVKISTEVGITNVDLSTVDKDQSIAPKTTRVTYPAKAKGTFIADSHQNFALFFQLVDVNTGAELTPHQTFVRLHNQKTGQEVVFVAEPDNKNVYKFELDTSERKIEFDSASGTYTLYLIIGDATLKNPILWNVADVVIKFPEEEAPSTVLSQNLFTPKQEIQHLFREPEKRPPTVVSNTFTALILSPLLLLFALWIRIGANVSNFTFAPSTIIFHLGHAAMLGLMYVYWTQLNMFQTLKYLAILGSVTFLAGNRMLAQQAVKRIAAEQSSRLAKYRTLRTAH

SEQ ID NO: 28444 - DNA, 2677 bp, Homo sapiens
cccggaataggagcgttgcgagacggtcggttccaagtgggcctgggcgcgggggagaggcgggtctgtcctcgggaactgcaaggccctgtgagcgggaggactgggatcccggccgcggctgctggaagcgtcgaagctcagcggggccgcggacactgacctgtgcttagaactcatcctggcccgcagagcctgccgcgagtccctggcgtcccctgtggcgggctcttggagccactttcccgagcggaagtcagcccgcggctcggactccggcgggacctgctcggaggaatggcgccgccgggttcaagcactgtcttcctgttggccctgacaatcatagccagcacctgggctctgacgcccactcactacctcaccaagcatgacgtggagagactaaaagcctcgctggatcgccctttcacaaatttggaatctgccttctactccatcgtgggactcagcagccttggtgctcaggtgccagatgcaaagatctctatttcaaatgagaccaaagatctgcttctggcagctgtcagtgaggactcatctgttacccagatctaccatgcagttgcagctctaagtggctttggccttcccttggcatcccaagaagcactcagtgcccttactgctcgtctcagcaaggaggagactgtgctggcaacagtccaggctctgcagacagcatcccacctgtcccagcaggctgacctgaggagcatcgtggaggagattgaggaccttgttgctcgcctggatgaactcgggggcgtgtatctccagtttgaagaaggactggaaacaacagcgttatttgtggctgccacctacaagctcatggatcatgtggggactgagccatccattaaggaggatcaggtcatccagctgatgaacgcgatcttcagcaagaagaactttgagtccctctccgaagccttcagcgtggcctctgcagctgctgtgctctcgcataatcgctaccacgtgccagttgtggttgtgcctgagggctctgcttccgacactcatgaacaggctatcttgcggttgcaagtcaccaatgttctgtctcagcctctgactcaggccactgttaaactagaacatgctaaatctgttgcttccagagccactgtcctccagaagacatccttcacccctgtaggggatgtttttgaactaaatttcatgaacgtcaaattttccagtggttattatgacttccttgtcgaagttgaaggtgacaaccggtatattgcaaataccgtagagctcagagtcaagatctccactgaagttggcatcacaaatgttgatctttccaccgtggataaggatcagagcattgcacccaaaactacccgggtgacatacccagccaaagccaagggcacattcatcgcagacagccaccagaacttcgccttgttcttccagctggtagatgtgaacactggtgctgaactcactcctcaccagacatttgtccgactccataaccagaagactggccaggaagtggtgtttgttgccgagccagacaacaagaacgtgtacaagtttgaactggatacctctgaaagaaagattgaatttgactctgcctctggcacctacactctctacttaatcattggagatgccactttgaagaacccaatcctctggaatgtggctgatgtggtcatcaagttccctgaggaagaagctccctcgactgtcttgtcccagaaccttttcactccaaaacaggaaattcagcacctgttccgcgagcctgagaagaggccccccaccgtggtgtccaatacattcactgccctgatcctctcgccgttgcttctgctcttcgctctgtggatccggattggtgccaatgtctccaacttcacttttgctcctagcacgattatatttcacctgggacatgctgctatgctgggactcatgtatgtctactggactcagctcaacatgttccagaccttgaagtacctggccatcctgggcagtgtgacgtttctggctggcaatcggatgctggcccagcaggcagtcaagaggatcgctgcagagcagagcagtagattggcaaaatataggacactacgaacagcacattagttccagaagaaagatggaaattctgaaaactgaatgtcaagaaaaggagtcaagaacaattcacagtatgagaagaaaaatggaaaaaaaaaactttatttaaaaaagaaaaaagtccagattgtagttatacttttgcttgtttttcagtttccccaacacacagcagatacctggtgagctcagatagtctctttctctgacactgtgtaagaagctgtgaatattcctaacttacccagatgttgcttttgaaaagttgaaatgtgtaattgttttggaataaagagggtaacaataggaacaaaggcctgattgagagcttattctcatacttttgggtggtggggtccttgggtatatgacatgaggacttagttggaaatgctgttgatgccagcatatttctccaggcctttcttggtccttcttgccccttgctcctaacagaactgagaactgcctggaaaggccagcttccttttttcttctccagcagtgagcaccagctgtctgcataggagccctgttg

SEQ ID NO: 28445 - protein, 615 aa, Homo sapiens; identical to SEQ ID NO: 28443

SEQ ID NO: 28446 - DNA, 457 bp, Homo sapiens
agatctctatttcaaatgagaccaaagatctgcttctggcagctgtcagtgaggactcatctgttacccagatctaccatgcagttgcagctctaagtggctttggccttcccttggcatcccaagaagcactcatggatccggattggtgccaatgtctccaacttcacttttgctcctagcacgattatatttcacctgggacatgctgctatgctgggactcatgtatgtctactggactcagctcaacatgttccagaccttgaagtacctggccatcctgggcagtgtgacgtttctggctggcaatcggatgctggcccagcaggcagtcaagagaacagcacattagttccagaagaaagatggaaattctgaaaactgaatgtcaagaaaaggagtcaagaacaattcacagtatgagaagaaaaatggaaaaaaaaaactttatttaa

SEQ ID NO: 28447 - protein, 46 aa, Homo sapiens
MLGLMYVYWTQLNMFQTLKYLAILGSVTFLAGNRMLAQQAVKRTAH

SEQ ID NO: 28448 - DNA, 659 bp, Homo sapiens
agatctctatttcaaatgagaccaaagatctgcttctggcagctgtcagtgaggactcatctgttacccagatctaccatgcagttgcagctctaagtggctttggccttcccttggcatcccaagaagcactcatggatccggattggtgccaatgtctccaacttcacttttgctcctagcacgattatatttcacctgggacatgctgctatgctgggactcatgtatgtctactggactcagctcaacatgttccagaccttgaagtacctggccatcctgggcagtgtgacgtttctggctggcaatcggatgctggcccagcaggcagtcaagagaacagcacattagttccagaagaaagatggaaattctgaaaactgaatgtcaagaaaaggagtcaagaacaattcacagtatgagaagaaaaatggaaaaaaaaaactttatttaaaaaagaaaaaagtccagattgtagttatacttttgcttgtttttcagtttccccaacacacagcagatacctggtgagctcagatagtctctttctctgacactgtgtaagaagctgtgaatattcctaacttacccagatgttgcttttgaaaagttgaaatgtgtaattgttttggaataaagagggtaacaataggaac

SEQ ID NO: 28449 - protein, 46 aa, Homo sapiens; identical to SEQ ID NO: 28447

SEQ ID NO: 28450 - DNA, 886 bp, Homo sapiens
agatctctatttcaaatgagaccaaagatctgcttctggcagctgtcagtgaggactcatctgttacccagatctaccatgcagttgcagctctaagtggctttggccttcccttggcatcccaagaagcactcatggatccggattggtgccaatgtctccaacttcacttttgctcctagcacgattatatttcacctgggacatgctgctatgctgggactcatgtatgtctactggactcagctcaacatgttccagaccttgaagtacctggccatcctgggcagtgtgacgtttctggctggcaatcggatgctggcccagcaggcagtcaagagaacagcacattagttccagaagaaagatggaaattctgaaaactgaatgtcaagaaaaggagtcaagaacaattcacagtatgagaagaaaaatggaaaaaaaaaactttatttaaaaaagaaaaaagtccagattgtagttatacttttgcttgtttttcagtttccccaacacacagcagatacctggtgagctcagatagtctctttctctgacactgtgtaagaagctgtgaatattcctaacttacccagatgttgcttttgaaaagttgaaatgtgtaattgttttggaataaagagggtaacaataggaacaaaggcctgattgagagcttattctcatacttttgggtggtggggtccttgggtatatgacatgaggacttagttggaaatgctgttgatgccagcatatttctccaggcctttcttggtccttcttgccccttgctcctaacagaactgagaactgcctggaaaggccagcttccttttttcttctccagcagtgagcaccagctgtctgcataggagccctgttg

SEQ ID NO: 28451 - protein, 46 aa, Homo sapiens; identical to SEQ ID NO: 28447

SEQ ID NO: 28452 - DNA, 386 bp, Homo sapiens
gggtgacatacccagccaaagccaagggcacattcatcgcagacagccaccagaacttcgcctttggatccggattggtgccaatgtctccaacttcacttttgctcctagcacgattatatttcacctgggacatgctgctatgctgggactcatgtatgtctactggactcagctcaacatgttccagaccttgaagtacctggccatcctgggcagtgtgacgtttctggctggcaatcggatgctggcccagcaggcagtcaagagaacagcacattagttccagaagaaagatggaaattctgaaaactgaatgtcaagaaaaggagtcaagaacaattcacagtatgagaagaaaaatggaaaaaaaaaactttatttaa

SEQ ID NO: 28453 - protein, 46 aa, Homo sapiens; identical to SEQ ID NO: 28447

SEQ ID NO: 28454 - DNA, 588 bp, Homo sapiens
gggtgacatacccagccaaagccaagggcacattcatcgcagacagccaccagaacttcgcctttggatccggattggtgccaatgtctccaacttcacttttgctcctagcacgattatatttcacctgggacatgctgctatgctgggactcatgtatgtctactggactcagctcaacatgttccagaccttgaagtacctggccatcctgggcagtgtgacgtttctggctggcaatcggatgctggcccagcaggcagtcaagagaacagcacattagttccagaagaaagatggaaattctgaaaactgaatgtcaagaaaaggagtcaagaacaattcacagtatgagaagaaaaatggaaaaaaaaaactttatttaaaaaagaaaaaagtccagattgtagttatacttttgcttgtttttcagtttccccaacacacagcagatacctggtgagctcagatagtctctttctctgacactgtgtaagaagctgtgaatattcctaacttacccagatgttgcttttgaaaagttgaaatgtgtaattgttttggaataaagagggtaacaataggaac

SEQ ID NO: 28455 - protein, 46 aa, Homo sapiens; identical to SEQ ID NO: 28447

SEQ ID NO: 28456 - DNA, 815 bp, Homo sapiens
gggtgacatacccagccaaagccaagggcacattcatcgcagacagccaccagaacttcgcctttggatccggattggtgccaatgtctccaacttcacttttgctcctagcacgattatatttcacctgggacatgctgctatgctgggactcatgtatgtctactggactcagctcaacatgttccagaccttgaagtacctggccatcctgggcagtgtgacgtttctggctggcaatcggatgctggcccagcaggcagtcaagagaacagcacattagttccagaagaaagatggaaattctgaaaactgaatgtcaagaaaaggagtcaagaacaattcacagtatgagaagaaaaatggaaaaaaaaaactttatttaaaaaagaaaaaagtccagattgtagttatacttttgcttgtttttcagtttccccaacacacagcagatacctggtgagctcagatagtctctttctctgacactgtgtaagaagctgtgaatattcctaacttacccagatgttgcttttgaaaagttgaaatgtgtaattgttttggaataaagagggtaacaataggaacaaaggcctgattgagagcttattctcatacttttgggtggtggggtccttgggtatatgacatgaggacttagttggaaatgctgttgatgccagcatatttctccaggcctttcttggtccttcttgccccttgctcctaacagaactgagaactgcctggaaaggccagcttccttttttcttctccagcagtgagcaccagctgtctgcataggagccctgttg

SEQ ID NO: 28457 - protein, 46 aa, Homo sapiens; identical to SEQ ID NO: 28447

SEQ ID NO: 28458 - DNA, 401 bp, Homo sapiens
agacatttgtccgactccataaccagaagactggccaggaagtggtgtttgttgccgagccagacaacaagaacgtgtacaagtttgaactggatacctctgaaaaaagatggaaattctgaaaactgaatgtcaagaaaaggagtcaagaacaattcacagtatgagaagaaaaatggaaaaaaaaaactttatttaaaaaagaaaaaagtccagattgtagttatacttttgcttgtttttcagtttccccaacacacagcagatacctggtgagctcagatagtctctttctctgacactgtgtaagaagctgtgaatattcctaacttacccagatgttgcttttgaaaagttgaaatgtgtaattgttttggaataaagagggtaacaataggaac

SEQ ID NO: 28459 - protein, 48 aa, Homo sapiens [sequence omitted]

SEQ ID NO: 28460 - DNA, 628 bp, Homo sapiens
agacatttgtccgactccataaccagaagactggccaggaagtggtgtttgttgccgagccagacaacaagaacgtgtacaagtttgaactggatacctctgaaaaaagatggaaattctgaaaactgaatgtcaagaaaaggagtcaagaacaattcacagtatgagaagaaaaatggaaaaaaaaaactttatttaaaaaagaaaaaagtccagattgtagttatacttttgcttgtttttcagtttccccaacacacagcagatacctggtgagctcagatagtctctttctctgacactgtgtaagaagctgtgaatattcctaacttacccagatgttgcttttgaaaagttgaaatgtgtaattgttttggaataaagagggtaacaataggaacaaaggcctgattgagagcttattctcatacttttgggtggtggggtccttgggtatatgacatgaggacttagttggaaatgctgttgatgccagcatatttctccaggcctttcttggtccttcttgccccttgctcctaacagaactgagaactgcctggaaaggccagcttccttttttcttctccagcagtgagcaccagctgtctgcataggagccctgttg

SEQ ID NO: 28461 - protein, 48 aa, Homo sapiens [sequence omitted]

SEQ ID NO: 28462 - DNA, 512 bp, Homo sapiens
ttttttcagttatggtcttagatgtgagtcagagaatattatctattgagtttcacccacttctctgcccctgtgcttttacagactgtccttatttttctaggctgatgtggtcatcaagttccctgaggaagaagctccctcgactgtcttgtcccagaaccttttcactccaaaacaggaaattcagtggatccggattggtgccaatgtctccaacttcacttttgctcctagcacgattatatttcacctgggacatgctgctatgctgggactcatgtatgtctactggactcagctcaacatgttccagaccttgaagtacctggccatcctgggcagtgtgacgtttctggctggcaatcggatgctggcccagcaggcagtcaagagaacagcacattagttccagaagaaagatggaaattctgaaaactgaatgtcaagaaaaggagtcaagaacaattcacagtatgagaagaaaaatggaaaaaaaaaactttatttaa

SEQ ID NO: 28463 - protein, 103 aa, Homo sapiens
MVLDVSQRILSIEFHPLLCPCAFTDCPYFSRLMWSSSSLRKKLPRLSCPRTFSLQNRKFSGSGLVPMSPTSLLLLARLYFTWDMLLCWDSCMSTGLSSTCSRP

SEQ ID NO: 28464 - DNA, 714 bp, Homo sapiens
ttttttcagttatggtcttagatgtgagtcagagaatattatctattgagtttcacccacttctctgcccctgtgcttttacagactgtccttatttttctaggctgatgtggtcatcaagttccctgaggaagaagctccctcgactgtcttgtcccagaaccttttcactccaaaacaggaaattcagtggatccggattggtgccaatgtctccaacttcacttttgctcctagcacgattatatttcacctgggacatgctgctatgctgggactcatgtatgtctactggactcagctcaacatgttccagaccttgaagtacctggccatcctgggcagtgtgacgtttctggctggcaatcggatgctggcccagcaggcagtcaagagaacagcacattagttccagaagaaagatggaaattctgaaaactgaatgtcaagaaaaggagtcaagaacaattcacagtatgagaagaaaaatggaaaaaaaaaactttatttaaaaaagaaaaaagtccagattgtagttatacttttgcttgtttttcagtttccccaacacacagcagatacctggtgagctcagatagtctctttctctgacactgtgtaagaagctgtgaatattcctaacttacccagatgttgcttttgaaaagttgaaatgtgtaattgttttggaataaagagggtaacaataggaac

SEQ ID NO: 28465 - protein, 103 aa, Homo sapiens; identical to SEQ ID NO: 28463

SEQ ID NO: 28466 - DNA, 941 bp, Homo sapiens
ttttttcagttatggtcttagatgtgagtcagagaatattatctattgagtttcacccacttctctgcccctgtgcttttacagactgtccttatttttctaggctgatgtggtcatcaagttccctgaggaagaagctccctcgactgtcttgtcccagaaccttttcactccaaaacaggaaattcagtggatccggattggtgccaatgtctccaacttcacttttgctcctagcacgattatatttcacctgggacatgctgctatgctgggactcatgtatgtctactggactcagctcaacatgttccagaccttgaagtacctggccatcctgggcagtgtgacgtttctggctggcaatcggatgctggcccagcaggcagtcaagagaacagcacattagttccagaagaaagatggaaattctgaaaactgaatgtcaagaaaaggagtcaagaacaattcacagtatgagaagaaaaatggaaaaaaaaaactttatttaaaaaagaaaaaagtccagattgtagttatacttttgcttgtttttcagtttccccaacacacagcagatacctggtgagctcagatagtctctttctctgacactgtgtaagaagctgtgaatattcctaacttacccagatgttgcttttgaaaagttgaaatgtgtaattgttttggaataaagagggtaacaataggaacaaaggcctgattgagagcttattctcatacttttgggtggtggggtccttgggtatatgacatgaggacttagttggaaatgctgttgatgccagcatatttctccaggcctttcttggtccttcttgccccttgctcctaacagaactgagaactgcctggaaaggccagcttccttttttcttctccagcagtgagcaccagctgtctgcataggagccctgttg

SEQ ID NO: 28467 - protein, 103 aa, Homo sapiens; identical to SEQ ID NO: 28463

SEQ ID NO: 28468 - DNA, 476 bp, Homo sapiens
caggtgccaccccgggtgaaggatgccactctgggtgttcttctttgtgatcctcaccctcagcaacagctcccactgctccccacctccccctttgaccctcaggatgcggcggtatgcagatgccatcttcaccaacagctaccggaaggtgctgggccagctgtccgcccgcaagctgctccaggacatcatgagcaggcagcagggagagagcaaccaagagcgaggagcaagggcacggcttggtcgtcaggtagacagcatgtgggcagaacaaaagcaaatggaattggagagcatcctggtggccctgctgcagaagcacagcaggaactcccagggatgaagattcctcctgtgacccgggctacctgtagccaaaatgcaactggatccagttaatcctctcatttctgacccactttttcctttgaaaatacaataaaattcccccataccggtgtgcatttaaa

SEQ ID NO: 28469 - protein, 108 aa, Homo sapiens; identical to SEQ ID NO: 3903

SEQ ID NO: 28470 - DNA, 1198 bp, Homo sapiens
gggaactacttccgggggagcggcgcggcggcgcgggagttggttctaaagagtggtgagtcagaagagacgtcaggcagcaagcgacttgggccatggcctctgacctagacttctcacctccggaggtgcccgagcccactttcctggagaacctgctacggtacggactcttcctgggagccatcttccagctcatctgtgtgctggccatcatcgtacccattcccaagtcccacgaggcggaggctgaaccgtctgagcccagaagtgctgaggtgacgaggaagcccaaggctgctgttccttctgtgaacaagaggcccaagaaagagactaagaagaagcggtagaagaggaggcctgaggagctgggcgggcagggagagggtcttggggacagccctcctgggaatctacattgtgttcccccgcattccaggctcagggtctgaggaggctgtgacgccctatgaccgcagagatctagacagtcgtaacagtccccaggctccagctgggcaatccaccacttcctcttccttctgcttctgtgacggtttagagtcaagggggctgaaacacactgtgagcatagactgtattaggtttgttcagaagccgggtcagctcacagagtcacattttcttgcttagtcatgtgtccctccttgagttgccccctccttgtgggtttacactacatttgggagtcattgtctaatgctgacaagcacaccctctcccattatttgtgcactacagatctcctcctgatcagtcacctttgttgctgctgtgtagacagagccaggcctcacctgtttgtttaggccaagatgccatggacatgcagcgttagtgatcccactagctgtgacagccaggcccagaaaatgcctggcgtgagagccagcagacagccaggccagggtaggcagtgcctgcttctgctccatcaggtgcaggggatttggctgaaggcgtgcatatttcctgggcacaaacttcctgagcctctgaaatgggaggctcgtcaatttcagaccaacctcttttcaacccatcatagcacgttcaaggtgtgccttttacttctacctgtacatcccccatcccttcaattctttcattccctgaccagtgagagggttcctgggggaagtatggtgaataaactgacatgcatgcttcagaa

SEQ ID NO: 28471 - protein, 85 aa, Homo sapiens; identical to SEQ ID NO: 3905

SEQ ID NO: 28472 - DNA, 1241 bp, Homo sapiens
ggaactacttccgggggagcggcgcggcggcgcgggagttggttctaaagagtggtgagtcagaagagacgtcaggcagcaagcgacttgggccatggcctctgacctagacttctcacctccggaggtgcccgagcccactttcctggagaacctgctacggtacggactcttcctgggagccatcttccagctcatctgtgtgctggccatcatcgtacccattcccaagtcccacgaggcggagttccatgtagaggcctgattccattccagtcaggttattgggaggctgaaccgtctgagcccagaagtgctgaggtgacgaggaagcccaaggctgctgttccttctgtgaacaagaggcccaagaaagagactaagaagaagcggtagaagaggaggcctgaggagctgggcgggcagggagagggtcttggggacagccctcctgggaatctacattgtgttcccccgcattccaggctcagggtctgaggaggctgtgacgccctatgaccgcagagatctagacagtcgtaacagtccccaggctccagctgggcaatccaccacttcctcttccttctgcttctgtgacggtttagagtcaagggggctgaaacacactgtgagcatagactgtattaggtttgttcagaagccgggtcagctcacagagtcacattttcttgcttagtcatgtgtccctccttgagttgccccctccttgtgggtttacactacatttgggagtcattgtctaatgctgacaagcacaccctctcccattatttgtgcactacagatctcctcctgatcagtcacctttgttgctgctgtgtagacagagccaggcctcacctgtttgtttaggccaagatgccatggacatgcagcgttagtgatcccactagctgtgacagccaggcccagaaaatgcctggcgtgagagccagcagacagccaggccagggtaggcagtgcctgcttctgctccatcaggtgcaggggatttggctgaaggcgtgcatatttcctgggcacaaacttcctgagcctctgaaatgggaggctcgtcaatttcagaccaacctcttttcaacccatcatagcacgttcaaggtgtgccttttacttctacctgtacatcccccatcccttcaattctttcattccctgaccagtgagagggttcctgggggaagtatggtgaataaactgacatgcatgcttcagaa

SEQ ID NO: 28473 - protein, 56 aa, Homo sapiens
MASDLDFSPPEVPEPTFLENLLRYGLFLGAIFQLICVLAIIVPIPKSHEAEFHVEA

SEQ ID NO: 28474 - DNA, 1313 bp, Homo sapiens
gaactacttccgggggagcggcgcggcggcgcgggaggatctctcaccccgtcactcagggtggcgcaatcacgactcattggctcactgcagcctagacctcccagctggagcaattctcctgcctcagccttctgagtagctgggactacagttggttctaaagagtggtgagtcagaagagacgtcaggcagcaagcgacttgggccatggcctctgacctagacttctcacctccggaggtgcccgagcccactttcctggagaacctgctacggtacggactcttcctgggagccatcttccagctcatctgtgtgctggccatcatcgtacccattcccaagtcccacgaggcggaggctgaaccgtctgagcccagaagtgctgaggtgacgaggaagcccaaggctgctgttccttctgtgaacaagaggcccaagaaagagactaagaagaagcggtagaagaggaggcctgaggagctgggcgggcagggagagggtcttggggacagccctcctgggaatctacattgtgttcccccgcattccaggctcagggtctgaggaggctgtgacgccctatgaccgcagagatctagacagtcgtaacagtccccaggctccagctgggcaatccaccacttcctcttccttctgcttctgtgacggtttagagtcaagggggctgaaacacactgtgagcatagactgtattaggtttgttcagaagccgggtcagctcacagagtcacattttcttgcttagtcatgtgtccctccttgagttgccccctccttgtgggtttacactacatttgggagtcattgtctaatgctgacaagcacaccctctcccattatttgtgcactacagatctcctcctgatcagtcacctttgttgctgctgtgtagacagagccaggcctcacctgtttgtttaggccaagatgccatggacatgcagcgttagtgatcccactagctgtgacagccaggcccagaaaatgcctggcgtgagagccagcagacagccaggccagggtaggcagtgcctgcttctgctccatcaggtgcaggggatttggctgaaggcgtgcatatttcctgggcacaaacttcctgagcctctgaaatgggaggctcgtcaatttcagaccaacctcttttcaacccatcatagcacgttcaaggtgtgccttttacttctacctgtacatcccccatcccttcaattctttcattccctgaccagtgagagggttcctgggggaagtatggtgaataaactgacatgcatgcttcagaa

SEQ ID NO: 28475 - protein, 85 aa, Homo sapiens; identical to SEQ ID NO: 3905

SEQ ID NO: 28476 - DNA, 1496 bp, Homo sapiens
acttccgggggagcggcgcggcggcgcgggagaagtcaaatccttcctgggaggatgaagatctgccagctctgaggattctggctgggaagaaaaagagcctcaagctttgaaggccattcccatggtagacagagctgatgtgaaaagtggccatcctgttgccccaggcacatgaccttctgaagtgaccaggctgaaagggaagcaatactcgtgtgatctctcaccccgtcactcagggtggcgcaatcacgactcattggctcactgcagcctagacctcccagctggagcaattctcctgcctcagccttctgagtagctgggactacagttggttctaaagagtggtgagtcagaagagacgtcaggcagcaagcgacttgggccatggcctctgacctagacttctcacctccggaggtgcccgagcccactttcctggagaacctgctacggtacggactcttcctgggagccatcttccagctcatctgtgtgctggccatcatcgtacccattcccaagtcccacgaggcggaggctgaaccgtctgagcccagaagtgctgaggtgacgaggaagcccaaggctgctgttccttctgtgaacaagaggcccaagaaagagactaagaagaagcggtagaagaggaggcctgaggagctgggcgggcagggagagggtcttggggacagccctcctgggaatctacattgtgttcccccgcattccaggctcagggtctgaggaggctgtgacgccctatgaccgcagagatctagacagtcgtaacagtccccaggctccagctgggcaatccaccacttcctcttccttctgcttctgtgacggtttagagtcaagggggctgaaacacactgtgagcatagactgtattaggtttgttcagaagccgggtcagctcacagagtcacattttcttgcttagtcatgtgtccctccttgagttgccccctccttgtgggtttacactacatttgggagtcattgtctaatgctgacaagcacaccctctcccattatttgtgcactacagatctcctcctgatcagtcacctttgttgctgctgtgtagacagagccaggcctcacctgtttgtttaggccaagatgccatggacatgcagcgttagtgatcccactagctgtgacagccaggcccagaaaatgcctggcgtgagagccagcagacagccaggccagggtaggcagtgcctgcttctgctccatcaggtgcaggggatttggctgaaggcgtgcatatttcctgggcacaaacttcctgagcctctgaaatgggaggctcgtcaatttcagaccaacctcttttcaacccatcatagcacgttcaaggtgtgccttttacttctacctgtacatcccccatcccttcaattctttcattccctgaccagtgagagggttcctgggggaagtatggtgaataaactgacatgcatgcttcagaa

SEQ ID NO: 28477 - protein, 85 aa, Homo sapiens; identical to SEQ ID NO: 3905

SEQ ID NO: 28478 - DNA, 1986 bp, Homo sapiens
gaacatcccgtctccagaggtcaagagattattagcccaaagtgtagctacttgcagatagagcaggggcttttgtcctctgcttcccaactcttgccctatctttctattgtaccactccaaatatttcttatcacaatgttgctgttagtagtaacactagtaaatctgagtatttataagctcataaagcttgttacagccttaagcaaaaagcttggggccaagggcgttttaaaaaatgcacactttatgaggtgcaactgcggagaaatgaggacgcgttcttaagctttggtattcacatggtggtggtgctggtagaggctgttacatttcttccagtgaagctgttcttgcagccgccttggaattcacttcagggccagtttatgagccaccccaagtaatctgcttggagtctgagcatcataccttgtatttgaccaaaaatggtattcctgagctcagtgccacctgattcactgcacttggaaccagatgatgttgggctctttccagaagtcaaatccttcctgggaggatgaagatctgccagctctgaggattctggctgggaagaaaaagagcctcaagctttgaaggccattcccatggtagacagagctgatgtgaaaagtggccatcctgttgccccaggcacatgaccttctgaagtgaccaggctgaaagggaagcaatactcgtgtgatctctcaccccgtcactcagggtggcgcaatcacgactcattggctcactgcagcctagacctcccagctggagcaattctcctgcctcagccttctgagtagctgggactacagttggttctaaagagtggtgagtcagaagagacgtcaggcagcaagcgacttgggccatggcctctgacctagacttctcacctccggaggtgcccgagcccactttcctggagaacctgctacggtacggactcttcctgggagccatcttccagctcatctgtgtgctggccatcatcgtacccattcccaagtcccacgaggcggaggctgaaccgtctgagcccagaagtgctgaggtgacgaggaagcccaaggctgctgttccttctgtgaacaagaggcccaagaaagagactaagaagaagcggtagaagaggaggcctgaggagctgggcgggcagggagagggtcttggggacagccctcctgggaatctacattgtgttcccccgcattccaggctcagggtctgaggaggctgtgacgccctatgaccgcagagatctagacagtcgtaacagtccccaggctccagctgggcaatccaccacttcctcttccttctgcttctgtgacggtttagagtcaagggggctgaaacacactgtgagcatagactgtattaggtttgttcagaagccgggtcagctcacagagtcacattttcttgcttagtcatgtgtccctccttgagttgccccctccttgtgggtttacactacatttgggagtcattgtctaatgctgacaagcacaccctctcccattatttgtgcactacagatctcctcctgatcagtcacctttgttgctgctgtgtagacagagccaggcctcacctgtttgtttaggccaagatgccatggacatgcagcgttagtgatcccactagctgtgacagccaggcccagaaaatgcctggcgtgagagccagcagacagccaggccagggtaggcagtgcctgcttctgctccatcaggtgcaggggatttggctgaaggcgtgcatatttcctgggcacaaacttcctgagcctctgaaatgggaggctcgtcaatttcagaccaacctcttttcaacccatcatagcacgttcaaggtgtgccttttacttctacctgtacatcccccatcccttcaattctttcattccctgaccagtgagagggttcctgggggaagtatggtgaataaactgacatgcatgcttcagaa

SEQ ID NO: 28479 - protein, 85 aa, Homo sapiens; identical to SEQ ID NO: 3905

SEQ ID NO: 28480 - DNA, 1503 bp, Homo sapiens
agaagtcaaatccttcctgggaggatgaagatctgccagctctgaggattctggctgggaagaaaaagagcctcaagctttgaaggccattcccatggtagacagagctgatgtgaaaagtggccatcctgttgccccaggcacatgaccttctgaagtgaccaggctgaaagggaagcaatactcgtgtgatctctcaccccgtcactcagggtggcgcaatcacgactcattggctcactgcagcctagacctcccagctggagcaattctcctgcctcagccttctgagtagctgggactacagttacagaaatatgacactgaccctttgcatttacaagttggttctaaagagtggtgagtcagaagagacgtcaggcagcaagcgacttgggccatggcctctgacctagacttctcacctccggaggtgcccgagcccactttcctggagaacctgctacggtacggactcttcctgggagccatcttccagctcatctgtgtgctggccatcatcgtacccattcccaagtcccacgaggcggaggctgaaccgtctgagcccagaagtgctgaggtgacgaggaagcccaaggctgctgttccttctgtgaacaagaggcccaagaaagagactaagaagaagcggtagaagaggaggcctgaggagctgggcgggcagggagagggtcttggggacagccctcctgggaatctacattgtgttcccccgcattccaggctcagggtctgaggaggctgtgacgccctatgaccgcagagatctagacagtcgtaacagtccccaggctccagctgggcaatccaccacttcctcttccttctgcttctgtgacggtttagagtcaagggggctgaaacacactgtgagcatagactgtattaggtttgttcagaagccgggtcagctcacagagtcacattttcttgcttagtcatgtgtccctccttgagttgccccctccttgtgggtttacactacatttgggagtcattgtctaatgctgacaagcacaccctctcccattatttgtgcactacagatctcctcctgatcagtcacctttgttgctgctgtgtagacagagccaggcctcacctgtttgtttaggccaagatgccatggacatgcagcgttagtgatcccactagctgtgacagccaggcccagaaaatgcctggcgtgagagccagcagacagccaggccagggtaggcagtgcctgcttctgctccatcaggtgcaggggatttggctgaaggcgtgcatatttcctgggcacaaacttcctgagcctctgaaatgggaggctcgtcaatttcagaccaacctcttttcaacccatcatagcacgttcaaggtgtgccttttacttctacctgtacatcccccatcccttcaattctttcattccctgaccagtgagagggttcctgggggaagtatggtgaataaactgacatgcatgcttcagaa

SEQ ID NO: 28481 - protein, 85 aa, Homo sapiens; identical to SEQ ID NO: 3905

SEQ ID NO: 28482 - DNA, 1349 bp, Homo sapiens
agaagtcaaatccttcctgggaggatgaagatctgccagctctgaggattctggctgggaagaaaaagagcctcaagctttgaaggccattcccatggtagacagagctgatgtgaaaagtggccatcctgttgccccaggcacatgaccttctgaagtgaccaggctgaaagggaagcaatactcgtgtttggttctaaagagtggtgagtcagaagagacgtcaggcagcaagcgacttgggccatggcctctgacctagacttctcacctccggaggtgcccgagcccactttcctggagaacctgctacggtacggactcttcctgggagccatcttccagctcatctgtgtgctggccatcatcgtacccattcccaagtcccacgaggcggaggctgaaccgtctgagcccagaagtgctgaggtgacgaggaagcccaaggctgctgttccttctgtgaacaagaggcccaagaaagagactaagaagaagcggtagaagaggaggcctgaggagctgggcgggcagggagagggtcttggggacagccctcctgggaatctacattgtgttcccccgcattccaggctcagggtctgaggaggctgtgacgccctatgaccgcagagatctagacagtcgtaacagtccccaggctccagctgggcaatccaccacttcctcttccttctgcttctgtgacggtttagagtcaagggggctgaaacacactgtgagcatagactgtattaggtttgttcagaagccgggtcagctcacagagtcacattttcttgcttagtcatgtgtccctccttgagttgccccctccttgtgggtttacactacatttgggagtcattgtctaatgctgacaagcacaccctctcccattatttgtgcactacagatctcctcctgatcagtcacctttgttgctgctgtgtagacagagccaggcctcacctgtttgtttaggccaagatgccatggacatgcagcgttagtgatcccactagctgtgacagccaggcccagaaaatgcctggcgtgagagccagcagacagccaggccagggtaggcagtgcctgcttctgctccatcaggtgcaggggatttggctgaaggcgtgcatatttcctgggcacaaacttcctgagcctctgaaatgggaggctcgtcaatttcagaccaacctcttttcaacccatcatagcacgttcaaggtgtgccttttacttctacctgtacatcccccatcccttcaattctttcattccctgaccagtgagagggttcctgggggaagtatggtgaataaactgacatgcatgcttcagaa

SEQ ID NO: 28483 - protein, 85 aa, Homo sapiens; identical to SEQ ID NO: 3905

SEQ ID NO: 28484 - DNA, 2071 bp, Homo sapiens
agttcggttttgctttcactgtgacaaagcagcatcaaattcaatgcaatgtctcacaatagctgcgctctccctcttccaagcacagagattctctctctacgccacaaagccactgccatgggatggggacaggtggcatcagcaactcaagactgtcttccctaccctcttcattgcctctttcaacagtatgaagttaaaatcaggactacccaggcagggggagctgccttcactcaccctttcccactactgcttccagaaacatctccccatcactacactagggactttgtaagcacagatgtgggacccatgagtactacagaaggaagcagaagctgcaaagaccttgcgtcttgctctgttgcccaggctggagtgcaatggtgcaatctcagctcactgcaacctctgcctcccaggtttaagcaattataggtttctctggcccttccaacagcaagtatcgccaggagcagctccctaatctacatactacagatctatccacaagaagacagatggaaccactcttttcttctgaattctagaaccttaaggaagttaacctgagtggctcagcttggatcaagtgcccatcctggtccaaacaactgtagcagcacatctgtgtatttgtgtatcttgttcctccataatcttgcagtccggggaaagtgtgcagatggatgggtccctgaaaagcaagagttgtttagacaacgctagaggtgttcagttctgggagacaagagttgggccaggttgataactagcctaagagagtcggaatcagatgaataagaactagatcttgggtgacaacctagatcaagagtcttgaggttcagtcatttcaaaaagctcaagtctcattgcttcttggccttctggctaagatcatgtgcagtatctgttcttaccagtttaatatctgatacatcctctatctgaggataatataataaatagatttttggagcaaggagatggaataggagcttgctctgtccactctacacattggcctggattgcagtacctccaggaatggtgcaccctctctaccacccccaaaaagcccaagtctcaagaggtagtctggaaaaaagtgtttttggatttacctacatttttttttccaagatggagtctcgctctgtcacccaggctggagtgcagtggcgccatcttggctcactgtaacctctgcctccaggattcaagcagttctcctgcctcagtctcccaagtagctgggattacaggtgtgtgccaaccatgctcagctaatttttctatttttagtagagacagggtttcaccatgttggccaggcaggtctcaaagtcctgacctcaggtgatctgcctgccttggcctcccgaagtgctaagattacaggcgtgagccactgcgcccggcctaatttttgtaattttagtagagacgagttttcaccatgttgaccaggctggtctcgaactcctgacctcaggtgatccacccccgccctcggcctcccaaagtgctggcactacaggcatgagccaccgctcctggccgggtttgcctacattttggagatgctgcacaccatgtccctcttttcaagagtcacgtaagtatttacatatggaagaccctgagaaggcacctgggaaaaaacctgtttaactgtaaatataataatgtatgtatttgtatgtggagctcttcttttagtggattatctataaaccgtccactgttcccaatgcatactttggagacagacctacactaccagttttcacctgctagttatttttataagggttgggatggtccatgagtgaacagtcttgatttaaagcagtgtttcccaaacctcatttatttgcctatagccttcctggagtttgtcttatatgtccgctctgtgcactattcctatatgtttttatgtaaatcaatcacttttttaaaaagcctcatcccagttatatccttaaaacaatggttattttttctcatacacatcgaaatacatatctattagaattaaaatgcttgtccatgcact

SEQ ID NO: 28485 - protein, 131 aa, Homo sapiens
MSHNSCALPLPSTEILSLRHKATAMGWGQVASATQDCLPYPLHCLFQQYEVKIRTTQAGGAAFTHPFPLLLPETSPHHYTRDFVSTDVGPMSTTEGSRSCKDLASCSVAQAGVQWCNLSSLQPLPPRFKQL

SEQ ID NO: 28486 - DNA, 1838 bp, Homo sapiens
agttcggttttgctttcactgtgacaaagcagcatcaaattcaatgcaatgtctcacaatagctgcgctctccctcttccaagcacagagattctctctctacgccacaaagccactgccatgggatggggacaggtggcatcagcaactcaagactgtcttccctaccctcttcattgcctctttcaacagtatgaagttaaaatcaggggtttctctggcccttccaacagcaagtatcgccaggagcagctccctaatctacatactacagatctatccacaagaagacagatggaaccactcttttcttctgaattctagaaccttaaggaagttaacctgagtggctcagcttggatcaagtgcccatcctggtccaaacaactgtagcagcacatctgtgtatttgtgtatcttgttcctccataatcttgcagtccggggaaagtgtgcagatggatgggtccctgaaaagcaagagttgtttagacaacgctagaggtgttcagttctgggagacaagagttgggccaggttgataactagcctaagagagtcggaatcagatgaataagaactagatcttgggtgacaacctagatcaagagtcttgaggttcagtcatttcaaaaagctcaagtctcattgcttcttggccttctggctaagatcatgtgcagtatctgttcttaccagtttaatatctgatacatcctctatctgaggataatataataaatagatttttggagcaaggagatggaataggagcttgctctgtccactctacacattggcctggattgcagtacctccaggaatggtgcaccctctctaccacccccaaaaagcccaagtctcaagaggtagtctggaaaaaagtgtttttggatttacctacatttttttttccaagatggagtctcgctctgtcacccaggctggagtgcagtggcgccatcttggctcactgtaacctctgcctccaggattcaagcagttctcctgcctcagtctcccaagtagctgggattacaggtgtgtgccaaccatgctcagctaatttttctatttttagtagagacagggtttcaccatgttggccaggcaggtctcaaagtcctgacctcaggtgatctgcctgccttggcctcccgaagtgctaagattacaggcgtgagccactgcgcccggcctaatttttgtaattttagtagagacgagttttcaccatgttgaccaggctggtctcgaactcctgacctcaggtgatccacccccgccctcggcctcccaaagtgctggcactacaggcatgagccaccgctcctggccgggtttgcctacattttggagatgctgcacaccatgtccctcttttcaagagtcacgtaagtatttacatatggaagaccctgagaaggcacctgggaaaaaacctgtttaactgtaaatataataatgtatgtatttgtatgtggagctcttcttttagtggattatctataaaccgtccactgttcccaatgcatactttggagacagacctacactaccagttttcacctgctagttatttttataagggttgggatggtccatgagtgaacagtcttgatttaaagcagtgtttcccaaacctcatttatttgcctatagccttcctggagtttgtcttatatgtccgctctgtgcactattcctatatgtttttatgtaaatcaatcacttttttaaaaagcctcatcccagttatatccttaaaacaatggttattttttctcatacacatcgaaatacatatctattagaattaaaatgcttgtccatgcact

SEQ ID NO: 28487 - protein, 100 aa, Homo sapiens
MQCLTIAALSLFQAQRFSLYATKPLPWDGDRWHQQLKTVFPTLFIASFNSMKLKSGVSLALPTASIARSSSLIYILQIYPQEDRWNHSFLLNSRTLRKLT

SEQ ID NO: 28488 - DNA, 1613 bp, Homo sapiens
aaattcaatgcaatgtctcacaatagctgcgctctccctcttccaagcacagagattctctctctacgccacaaagccactgccatgggatggggacaggtggcatcagcaactcaagactgtcttccctaccctcttcattgcctctttcaacagtatgaagttaaaatcagtcacccccagctctgaagatgacaatgcattcaaattcaccagatcacccccagctctgaagatgacaatgcattcaaattcaccagatcacccccagctctgaagatgacaatgcattcaaattcaccagatcacccccagctctgaagatgacaatgcattcaaattcaccagatcatctaatgaagtttcacttctgtttcttagcacctccctgactcttctgttccctagagtggaaggagggtctgggaaaggacctttgcctgaaactaagaagtcaacatgatacccctcaatatcccacctgggaagggagctgccaatgagccgaagcagatggggaggagatgaaactgggctatcagctttgcaggctggagccccctcctgtatctgccttatcttctggtatccccagcacttggcccttggccttgtagaaagcaggaatgtgatacatgtttggtgaatgaatgagtgaattaattaattaatttaatatattaatttgtatctatttcaaatagagtctgaagctcaattaatactttaaaaatacagctgggcatggtggctcacacctgtaatcccagcactttgggaggccaaggcgggagcatcgtccaagagtttaaggctagcttgggcaacatggtgaaaccccatctctaccaaaaatttaaaaaaaaaagaattagctaggcatggtggtatgcgcctgtagtcccagctactcaggagactgaggtgggggaatcacttgatcctgggagggtgagactgcagtgagctgagatcacggcactgccctccagcctgggtgacaaggtgtggccctgtctcaaaaataaataaaaataaaaatactatataatcattcattctaaaacagaagttataatcatgcctatccctagggccattgggaagattaaatccatgaataaatgtaaaacacttagaccagcgcctggcacataccaatcccgcaataagctattcatgtaaactgagagtaggttgtcccactccatgtgggattaggggtcagtgtaggaccagggtcagagatcaaggggagaatcacgcaaaaatttagtatgaagttaggattagaggaccagtttgtgtccacccagcagtcagattttttagttaccatctatttgtttatttatgtcccacattgttccaggaggagtcaaggcagctttcaggaattctaactacagaaatcaagaaagagaaagatcaaagttactatggactgaatgtttgtgtcctccccaaaattaatatgttgaagcctaatccctaatgggatggtattaagaggtgagacctttgagaggtgattacgtcatgaaggtggggctctcatgaatgggattagttcccttttaagaagaaacataaaaggaaaaaaagaaagaaag

SEQ ID NO: 28489 - protein, 89 aa, Homo sapiens
MQCLTIAALSLFQAQRFSLYATKPLPWDGDRWHQQLKTVFPTLFIASFNSMKLKSVTPSSEDDNAFKFTRSPPALKMTMHSNSPDHPQL

SEQ ID NO: 28490 - DNA, 1918 bp, Homo sapiens
ctctccctcttccaagcacagagattctctctctacgccacaaagccactgccatgggatggggacaggtggcatcagcaactcaagactgtcttccctaccctcttcattgcctctttcaacagtatgaagttaaaatcaggactacccaggcagggggagctgccttcactcaccctttcccactactgcttccagaaacatctccccatcactacactagggactttgtaagcacagatgtgggacccatgagtactacagaaggaagcagaagctgcaaagaccttggtttctctggcccttccaacagcaagtatcgccaggagcagctccctaatctacatactacagatctatccacaagaagacagatggaaccactcttttcttctgaattctagaaccttaaggaagttaacctgagtggctcagcttggatcaagtgcccatcctggtccaaacaactgtagcagcacatctgtgtatttgtgtatcttgttcctccataatcttgcagtccggggaaagtgtgcagatggatgggtccctgaaaagcaagagttgtttagacaacgctagaggtgttcagttctgggagacaagagttgggccaggttgataactagcctaagagagtcggaatcagatgaataagaactagatcttgggtgacaacctagatcaagagtcttgaggttcagtcatttcaaaaagctcaagtctcattgcttcttggccttctggctaagatcatgtgcagtatctgttcttaccagtttaatatctgatacatcctctatctgaggataatataataaatagatttttggagcaaggagatggaataggagcttgctctgtccactctacacattggcctggattgcagtacctccaggaatggtgcaccctctctaccacccccaaaaagcccaagtctcaagaggtagtctggaaaaaagtgtttttggatttacctacatttttttttccaagatggagtctcgctctgtcacccaggctggagtgcagtggcgccatcttggctcactgtaacctctgcctccaggattcaagcagttctcctgcctcagtctcccaagtagctgggattacaggtgtgtgccaaccatgctcagctaatttttctatttttagtagagacagggtttcaccatgttggccaggcaggtctcaaagtcctgacctcaggtgatctgcctgccttggcctcccgaagtgctaagattacaggcgtgagccactgcgcccggcctaatttttgtaattttagtagagacgagttttcaccatgttgaccaggctggtctcgaactcctgacctcaggtgatccacccccgccctcggcctcccaaagtgctggcactacaggcatgagccaccgctcctggccgggtttgcctacattttggagatgctgcacaccatgtccctcttttcaagagtcacgtaagtatttacatatggaagaccctgagaaggcacctgggaaaaaacctgtttaactgtaaatataataatgtatgtatttgtatgtggagctcttcttttagtggattatctataaaccgtccactgttcccaatgcatactttggagacagacctacactaccagttttcacctgctagttatttttataagggttgggatggtccatgagtgaacagtcttgatttaaagcagtgtttcccaaacctcatttatttgcctatagccttcctggagtttgtcttatatgtccgctctgtgcactattcctatatgtttttatgtaaatcaatcacttttttaaaaagcctcatcccagttatatccttaaaacaatggttattttttctcatacacatcgaaatacatatctattagaattaaaatgcttgtccatgcact

SEQ ID NO: 28491 - protein, 116 aa, Homo sapiens
MGWGQVASATQDCLPYPLHCLFQQYEVKIRTTQAGGAAFTHPFPLLLPETSPHHYTRDFVSTDVGPMSTTEGSRSCKDLGFSGPSNSKYRQEQLPNLHTTDLSTRRQMEPLFSSEF

SEQ ID NO: 28492 - DNA, 1081 bp, Homo sapiens
ccagcctgggtgacaaggtgtggccctgtctcaaaaataaataaaaataaaaatactatataatcattcattctaaaacagaagttataatcatgcctatccctagggccattgggaagattaaatccatgaataaatgtaaaacacttagaccagcgcctggcacataccaatcccgcaataagctattcatgtaaactgagagtaggttgtcccactccatgtgggattaggggtcagtgtaggaccagggtcagagatcaaggggagaatcacgcaaaaatttagtatgaagttaggattagaggaccagtttgtgtccacccagcagtcagattttttagttaccatctatttgtttatttatgtcccacattgttccaggaggagtcaaggcagctttcaggaattctaactacagaaatcaagaaagagaaagatcaaagttactatggactgaatgtttgtgtcctccccaaaattaatatgttgaagcctaatccctaatgggatggtattaagaggtgagacctttgagaggtgattacgtcatgaaggtggggctctcatgaatgggattagttcccttttaagaagaaacataaaaggaaaaaaagaaagaaagaaaaaaagaaaaaataataaaaagagaagaaacggagagagaaatggtatttggacaggtaagaaaaaagccaggagaattaatggtcattggatccaaatgcaaaggacctcaaagaatgtgctcatccacctcattgagtgttgcaggaaggtggagaagaataggctactctacttggaaactaggaagtccctgattagaatagaagccagaccaacagtgttaaaggaatgaaaaataaagcagaaaaggcagcacatgtagactgtcctttctgaatctttcaaacacaggtgagggcaacagtgacctaaggacaacttgggaagcaggttaggggttctaagactgggctccatacacacactgcttaagttcaaatcatagccccaacactcaatagctgtgtgactttgggcaagttaacttacttaactttcctaagtctcagtt

SEQ ID NO: 28493 - protein, 97 aa, Homo sapiens
MNGISSLLRRNIKGKKERKKKRKNNKKRRNGERNGIWTGKKKARRINGHWIQMQRTSKNVLIHLIECCRKVEKNRLLYLETRKSLIRIEARPTVLKE

SEQ ID NO: 28494 - DNA, 3734 bp, Homo sapiens; identical to SEQ ID NO: 3908

SEQ ID NO: 28495 - protein, 765 aa, Homo sapiens; identical to SEQ ID NO: 3909

SEQ ID NO: 28496 - DNA, 504 bp, Homo sapiens
aaatgcgaacttaggctgttacacaactgctggggtctgttctcgccgcccgcccggcagtcaggcagcgtcgccgccgtggtagcagcctcagccgtttctggagtctcgggcccacagtcaccgccgcttacctgcgcctcctcgagcctccggagtccccgtccgcccgcacaggccggttcgccgtctgcgtctcccccacgccgcctcgcctgccgccgcgctcgtccctccgggccgacatgagtggggaccacctccacaacgattcccagatcgaagcggatttccgattgaatgattctcataaacacaaagataaacacaaagatcgagaacaccggcacaaagaacacaagaaggagaaggaccgggaaaagtccaagcatagcaacagtgaacataaagattctgaaaagaaacacaaagagaaggagaagaccaaacacaaagatggaagctcagaaaagcataaagacaaacataaagacagagacaagg

SEQ ID NO: 28497 - protein, 85 aa, Homo sapiens
MSGDHLHNDSQIEADFRLNDSHKHKDKHKDREHRHKEHKKEKDREKSKHSNSEHKDSEKKHKEKEKTKHKDGSSEKHKDKHKDRD

SEQ ID NO: 28498 - DNA, 3640 bp, Homo sapiens
aaatgcgaacttaggctgttacacaactgctggggtctgttctcgccgcccgcccggcagtcaggcagcgtcgccgccgtggtagcagcctcagccgtttctggagtctcgggcccacagtcaccgccgcttacctgcgcctcctcgagcctccggagtccccgtccgcccgcacaggccggttcgccgtctgcgtctcccccacgccgcctcgcctgccgccgcgctcgtccctccgggccgacatgagtggggaccacctccacaacgattcccagatcgaagcggatttccgattgaatgacagtgaacataaagattctgaaaagaaacacaaagagaaggagaagaccaaacacaaagatggaagctcagaaaagcataaagacaaacataaagacagagacaaggaaaaacgaaaagaggaaaaggttcgagcctctggggatgcaaaaataaagaaggagaaggaaaatggcttctctagtccaccacaaattaaagatgaacctgaagatgatggctattttgttcctcctaaagaggatataaagccattaaagagacctcgagatgaggatgatgctgattataaacctaagaaaattaaaacagaagataccaagaaggagaagaaaagaaaactagaagaagaagaggatggtaaattgaaaaaacccaagaataaagataaagataaaaaagttcctgagccagataacaagaaaaagaagccgaagaaagaagaggaacagaagtggaaatggtgggaagaagagcgctatcctgaaggcatcaagtggaaattcctagaacataaaggtccagtatttgccccaccatatgagcctcttccagagaatgtcaagttttattatgatggtaaagtcatgaagctgagccccaaagcagaggaagtagctacgttctttgcaaaaatgctcgaccatgaatatactaccaaggaaatatttaggaaaaatttctttaaagactggagaaaggaaatgactaatgaagagaagaatattatcaccaacctaagcaaatgtgattttacccagatgagccagtatttcaaagcccagacggaagctcggaaacagatgagcaaggaagagaaactgaaaatcaaagaggagaatgaaaaattactgaaagaatatggattctgtattatggataaccacaaagagaggattgctaacttcaagatagagcctcctggacttttccgtggccgcggcaaccaccccaagatgggcatgctgaagagacgaatcatgcccgaggatataatcatcaactgtagcaaagatgccaaggttccttctcctcctccaggacataagtggaaagaagtccggcatgataacaaggttacttggctggtttcctggacagagaacatccaaggttccattaaatacatcatgcttaaccctagttcacgaatcaagggtgagaaggactggcagaaatacgagactgctcggcggctgaaaaaatgtgtggacaagatccggaaccagtatcgagaagactggaagtccaaagagatgaaagtccggcagagagctgtagccctgtacttcatcgacaagcttgctctgagagcaggcaatgaaaaggaggaaggagaaacagcggacactgtgggctgctgctcacttcgtgtggagcacatcaatctacacccagagttggatggtcaggaatatgtggtagagtttgacttcctcgggaaggactccatcagatactataacaaggtccctgttgagaaacgagtttttaagaacctacaactatttatggagaacaagcagcccgaggatgatctttttgatagactcaatactggtattctgaataagcatcttcaggatctcatggagggcttgacagccaaggtattccgtacatacaatgcctccatcacgctacagcagcagctaaaagaactgacagccccggatgagaacatcccagcgaagatcctttcttataaccgtgccaatcgagctgttgcaattctttgtaaccatcagagggcaccaccaaaaacttttgagaagtctatgatgaacttgcaaactaagattgatgccaagaaggaacagctagcagatgcccggagagacctgaaaagtgctaaggctgatgccaaggtcatgaaggatgcaaagacgaagaaggtagtagagtcaaagaagaaggctgttcagagactggaggaacagttgatgaagctggaagttcaagccacagaccgagaggaaaataaacagattgccctgggaacctccaaactcaattatctggaccctaggatcacagtggcttggtgcaagaagtggggtgtcccaattgagaagatttacaacaaaacccagcgggagaagtttgcctgggccattgacatggctgatgaagactatgagttttagccagtctcaagaggcagagttctgtgaagaggaacagtgtggtttgggaaagatggataaactgagcctcacttgccctcgtgcctgggggagagaggcagcaagtcttaacaaaccaacatctttgcgaaaagataaacctggagatattataagggagagctgagccagttgtcctatggacaacttatttaaaaatatttcagatatcaaaattctagctgtatgatttgttttgaattttgtttttattttcaagagggcaagtggatgggaatttgtcagcgttctaccaggcaaattcactgtttcactgaaatgtttggattctcttagctactgtatgcaaagtccgattatattggtgcgtttttacagttagggttttgcaataacttctatattttaatagaaataaattcctaaactcccttccctctctcccatttcaggaatttaaaattaagtagaacaaaaaacccagcgcacctgttagagtcgtcactctctattgtcatggggatcaattttcattaaacttgaagcagtcgtggctttggcagtgttttggttcagacacctgttcacagaaaaagcatgatgggaaaatatttcctgacttgagtgttcctttttaaatgtgaatttttatttctttttaattattttaaaatatttaaacctttttcttgatcttaaagatcgtgtagattggggttggggagggatgaagggcgagtgaatctaaggataatgaaataatcagtgactgaaaccattttcccatcatcctttgttctgagcattcgctgtaccctttaagatatccatctttttctttttaaccctaatctttcacttgaaagattttattgtataaaaagtttcacaggtcaataaacttagaggaaaatgagtatttggtccaaaaaaaggaaaaataatcaagattttagggcttttattttttcttttgtaattgtgtaaaaaatggaaaaaaacataaaaagcagaattttaatgtgaagacattttttgctataatcattagttttagaggcattgttagtttagtgtgtgtgcagagtccatttcccacatctttcctcaagtatcttctatttttatcatgaattcccttttaatcaactgtaggttatttaaaataaattcctacaacttaatggaaa

SEQ ID NO: 28499 - protein, 734 aa, Homo sapiens
MSGDHLHNDSQIEADFRLNDSEHKDSEKKHKEKEKTKHKDGSSEKHKDKHKDRDKEKRKEEKVRASGDAKIKKEKENGFSSPPQIKDEPEDDGYFVPPKEDIKPLKRPRDEDDADYKPKKIKTEDTKKEKKRKLEEEEDGKLKKPKNKDKDKKVPEPDNKKKKPKKEEEQKWKWWEEERYPEGIKWKFLEHKGPVFAPPYEPLPENVKFYYDGKVMKLSPKAEEVATFFAKMLDHEYTTKEIFRKNFFKDWRKEMTNEEKNIITNLSKCDFTQMSQYFKAQTEARKQMSKEEKLKIKEENEKLLKEYGFCIMDNHKERIANFKIEPPGLFRGRGNHPKMGMLKRRIMPEDIIINCSKDAKVPSPPPGHKWKEVRHDNKVTWLVSWTENIQGSIKYIMLNPSSRIKGEKDWQKYETARRLKKCVDKIRNQYREDWKSKEMKVRQRAVALYFIDKLALRAGNEKEEGETADTVGCCSLRVEHINLHPELDGQEYVVEFDFLGKDSIRYYNKVPVEKRVFKNLQLFMENKQPEDDLFDRLNTGILNKHLQDLMEGLTAKVFRTYNASITLQQQLKELTAPDENIPAKILSYNRANRAVAILCNHQRAPPKTFEKSMMNLQTKIDAKKEQLADARRDLKSAKADAKVMKDAKTKKVVESKKKAVQRLEEQLMKLEVQATDREENKQIALGTSKLNYLDPRITVAWCKKWGVPIEKIYNKTQREKFAWAIDMADEDYEF

SEQ ID NO: 28500 - DNA, 985 bp, Homo sapiens
caccatgcccagctaatttttgtatttttagtagagacggagtttcaccacattgcccaggctcctgacctggatcacgacctcctgacctcgtgatctgcccgcctcggcctcccaaagtgctgggattacaggcgtatatggtgtttattgtattactcatttttttcttatgttcgaccattttaaaaatacattttcaaaaagttgttcccactgagctttagattcacttatcagtgtttgctagatagttccaggtaatgcgtaagtaccttaaactcaacatgccccagttaagctatcatttcctagtcgtcttcctttatgtcctttctcatagggttgttttctcctctaccttccatctgacgtcaccactctgaggaggccttttccttacaaacaatgtaaacaatccctctgtcatgtatgccattgtggtaaaacaactgtttacattttcaagtccctcacttgttactgagctccttcattgttgatctcttctgtccagtattcttaaactgagctgttgaaatgtattttcctttattcaccacagtatttcatcttacttgtgagcgttggctttttcaaaatgagagacactggttcttttgatccaggccttgaatgtgaggcccagaagtcattccagagcactaatcagtgggaagaagagcgctatcctgaaggcatcaagtggaaattcctagaacataaaggtccagtatttgccccaccatatgagcctcttccagagaatgtcaagttttattatgatggtaaagtcatgaagctgagccccaaagcagaggaagtagctacgttctttgcaaaaatgctcgaccatgaatatactaccaaggaaatatttaggaaaaatttctttaaagactggagaaaggtactgtagcccatgtgttaatatcctagtaccttgcaaaacaatcaagtactaagtaataaattatcattttgc

SEQ ID NO: 28501 - protein, 105 aa, Homo sapiens
MRDTGSFDPGLECEAQKSFQSTNQWEEERYPEGIKWKFLEHKGPVFAPPYEPLPENVKFYYDGKVMKLSPKAEEVATFFAKMLDHEYTTKEIFRKNFFKDWRKVL

SEQ ID NO: 28502 - DNA, 1459 bp, Homo sapiens
gggggcggggcccggagggagtctgggagggcccgaaagtttgcccaagtcgctggggcggccggccggggtgcaagcagtcgggccgggctcccacgacccccgcgcggggcgggcccaggcaggaagtgggcgcacttactggccccctcgatcttgtcggcgccccggctccacgtgatctggcgcgtctccagcttgacctggaaggtcttccgctcgggtcgctgcgacttcttggagtagaacaaagtcatgacggtgcccacctcgaggctgcggcagagcaccgccaaaattgaggacacccacggtcgcggtggagcctgtctgacatgttgagccaggcagtgggtcggctgccaggcacagcaggacaacttactgcatttcagaggaatgatggtccacaatttactgatgaggaaacagagattcagagaagttctacaatttgccccaaagccacataacatgactaggtgggaactagaacccaagtcggcctgactccatgagttttctgcctcacaggagatccactggcttagagtttctctctcgtcgcccaggctggcgtgcaatggcacaatcttggctcactgcaatctccgcctcccgagttcaagcagtcctgcctcagcctcctgagtctcttttgatttggtgctgtcacaggttgggttctttggatgtggactctgtgacaggaaaccagccaagtaaccttgttatcatgccggacttctttccacttatgtcctggaggaggagaaggaaccttggcatctctggaaataacagagcacgaggatagtgaaataagatgccccaaagtgtgaaagtggtgatgttggcaatttggatatgccatacagaagctgcacagagtgctttaaatgaaaaggtggaaattatcgacttaataaaaaaaactgtatggtgaagttgctaagatctaaggcagcctgtagaagaaaaatgacatcccagctggataccagaaagatccttcagtaatgaggatggccaaggctggaagatggagatggatgagcatcacaagattccagagtaaaatagatcaaagagcagggaggtacatggccaatatgatttcatctgtcttaaatccttaatatccagtagccactgtgggacaggtctgcccatccttaattactatattattggctggagttactgactggtttttaggtcactgaagcaccaagattcctgtacagagctactgagcaaagtacttgttcacaattttcagtctaactaaaacctttaagaaaatttagactttgagaactctaagtctttagcatagaatgatgtgaaattactgatgttaatgttgtgtcataagaaccaagaagaaagttaaatgaaccaatcacaattccagaattctccagaggtttaataaattctgtagtaccagtttctc

SEQ ID NO: 28503 - protein, 100 aa, Homo sapiens
MSFLPHRRSTGLEFLSRRPGWRAMAQSWLTAISASRVQAVLPQPPESLLIWCCHRLGSLDVDSVTGNQPSNLVIMPDFFPLMSWRRRRNLGISGNNRARG

SEQ ID NO: 28504 - DNA, 648 bp, Homo sapiens
tcacccatggtggagtgcagtggcgtgatcttggctcactgcaacctctgcctcctgcgttcaagcaattcttgtgtcttagcctccctattagctagctgggattataggcttgcgccaccttgcctggctatattcaaagtctgtctttactacactgtcccaaagtaatctacatttgggtttgggtctttacagggtgagaaggactggcagaaatacgagactgctcggcggctgaaaaaatgtgtggacaagatccggaaccagtatcgagaagactggaagtccaaagagatgaaagtccggcagagagctgtagccctgtacttcatcgacaagcttgctctgagagcaggcaatgaaaaggaggaaggagaaacagcggacactgtgggctgctgctcacttcgtgtggagcacatcaatctacacccagagttggatggtcaggaatatgtggtagagtttgacttcctcgggaaggactccatcagatactataacaaggtccctgttgagaaacgagtaagttaatgtacctgtactgtctgacttgttttccattattcaacaagcatgggttgactgcttttttgtgtgctttgcactttgctgggcaccagcaaaagtgacttgagacaggca

SEQ ID NO: 28505 - protein, 79 aa, Homo sapiens
MKVRQRAVALYFIDKLALRAGNEKEEGETADTVGCCSLRVEHINLHPELDGQEYVVEFDFLGKDSIRYYNKVPVEKRVS

SEQ ID NO: 28506 - DNA, 834 bp, Homo sapiens
gaaatactaaatttcagctagaagctgggtgcagtggctcacacctgtaatctcagcattttgggaggttgaggtgggagaatcacttgagctgagatggtcttgatctcctgaccttgtgatccgccctcctcagcctccccaaagtgctgggattacaggcgtgagacaccgcgcctggtgaccgctctccttttaaaaacagaatgccaaagctaagccctgccatgtcctggtttgggacagactggctgagctgtttggcttcctgggtgtcttttaattgccagtttgtagccccttgagtactctcttcagtgcatccattttccttgagaagctggcaccgccttcccagagtactggtgggatctgaggaacgagctggggttgcccagtagatgcaagtatcctgcttcagtttcctaaagaggagctcctacagtgttcttagaatgaaagctaagaactggcacaggatctatttgataaacagctgtcatttgtagccatcctcccagatgtatgacagcagagtgttctctgatggaaagatcagcacccagattcccagccccagcgggttcctttccctgagcccctaggttactgccctgtaaaacccttgtttctttccagatcactgaagaacaaatagttgaattcactagtccttgtgcatcttctccctgccttcatgaagccacccttgtttttttttatctgacaaaccactgacagagacagcctggtccagataacatcttggtttcaccttctcaggtggagccatttttcctctacagctcataaccttaccactattatttcccc

SEQ ID NO: 28507 - protein, 35 aa, Homo sapiens
MQVSCFSFLKRSSYSVLRMKAKNWHRIYLINSCHL

SEQ ID NO: 28508 - DNA, 1117 bp, Homo sapiens
ggtgcaagaagtggggtgtcccaattgagaagatttacaacaaaacccagcgggagaagtttgcctgggccattgacatggctgatgaagactatgagttttagccagtctcaagaggcagagttctgtgaagaggaacagtgtggtttgggaaagatggataaactgagcctcacttgccctcgtgcctgggggagagaggcagcaagtcttaacaaaccaacatctttgcgaaaagataaacctggagatattataagggagagctgagccagttgtcctatggacaacttatttaaaaatatttcagatatcaaaattctagctgtatgatttgttttgaattttgtttttattttcaagagggcaagtggatgggaatttgtcagcgttctaccaggcaaattcactgtttcactgaaatgtttggattctcttagctactgtatgcaaagtccgattatattggtgcgtttttacagttagggttttgcaataacttctatattttaatagaaataaattcctaaactcccttccctctctcccatttcaggaatttaaaattaagtagaacaaaaaacccagcgcacctgttagagtcgtcactctctattgtcatggggatcaattttcattaaacttgaagcagtcgtggctttggcagtgttttggttcagacacctgttcacagaaaaagcatgatgggaaaatatttcctgacttgagtgttcctttttaaatgtgaatttttatttctttttaattattttaaaatatttaaacttgaaagattttattgtataaaaagtttcacaggtcaataaacttagaggaaaatgagtatttggtccaaaaaaaggaaaaataatcaagattttagggcttttattttttcttttgtaattgtgtaaaaaatggaaaaaaacataaaaagcagaattttaatgtgaagacattttttgctataatcattagttttagaggcattgttagtttagtgtgtgtgcagagtccatttcccacatctttcctcaagtatcttctatttttatcatgaattcccttttaatcaactgtaggttatttaaaataaattcctacaacttaatggaaa

SEQ ID NO: 28509 - protein, 61 aa, Homo sapiens
MKTMSFSQSQEAEFCEEEQCGLGKMDKLSLTCPRAWGREAASLNKPTSLRKDKPGDIIRES

SEQ ID NO: 28510 - DNA, 5246 bp, Homo sapiens
cggcccgtcctggctcccttgtccgggaagcccgcccaggagccgccgccgggtcccgctcgtctgccgcctcagcctcagccccaacctcagccgccgccgttgcgcttgctcccgggcggtcctggcctgtgccgccgccgcccccagcgtcggagccatggcgggcgccgcgtccccttgcgccaacggctgcgggcccggcgcgccctcggacgccgaggtgctgcacctctgccgcagcctcgaggtgggcaccgtcatgactttgttctactccaagaagtcgcagcgacccgagcggaagaccttccaggtcaagctggagacgcgccagatcacgtggagccggggcgccgacaagatcgagggggccattgacattcgtgaaattaaggagatccgcccagggaagacctcacgggactttgatcgctatcaagaggacccagctttccggccggaccagtcacattgctttgtcattctctatggaatggaatttcgcctgaaaacgctgagcctgcaagccacatctgaggatgaagtgaacatgtggatcaagggcttaacttggctgatggaggatacattgcaggcacccacacccctgcagattgagaggtggctccggaagcagttttactcagtggatcggaatcgtgaggatcgtatatcagccaaggacctgaagaacatgctgtcccaggtcaactaccgggtccccaacatgcgcttcctccgagagcggctgacggacctggagcagcgcagcggggacatcacctacgggcagtttgctcagctgtaccgcagcctcatgtacagcgcccagaagacgatggacctccccttcttggaagccagtactctgagggctggggagcggccggagctttgccgagtgtcccttcctgagttccagcagttccttcttgactaccagggggagctgtgggctgttgatcgcctccaggtgcaggagttcatgctcagcttcctccgagaccccttacgagagatcgaggagccatacttcttcctggatgagtttgtcaccttcctgttctccaaagagaacagtgtgtggaactcgcagctggatgcagtatgcccggacaccatgaacaaccctctttcccactactggatctcctcctcgcacaacacgtacctgaccggggaccagttctccagtgagtcctccttggaagcctatgctcgctgcctgcggatgggctgtcgctgcattgagttggactgctgggacggcccggatgggatgccagttatttaccatgggcacacccttaccaccaagatcaagttctcagatgtcctgcacaccatcaaggagcatgcctttgtggcctcagagtacccagtcatcctgtccattgaggaccactgcagcattgcccagcagagaaacatggcccaatacttcaagaaggtgctgggggacacactcctcaccaagcccgtggagatctctgccgacgggctcccctcacccaaccagcttaagaggaagatcctcatcaagcacaagaagctggctgagggcagtgcctacgaggaggtgcctacatccatgatgtactctgagaacgacatcagcaactctatcaagaatggcatcctctacctggaggaccctgtgaaccacgaatggtatccccactactttgttctgaccagcagcaagatctactactctgaggagaccagcagtgaccagggcaacgaggatgaggaggagcccaaggaggtcagcagcagcacagagctgcactccaatgagaagtggttccatgggaagctaggggcagggcgtgacgggcgtcacatcgctgagcgcctgcttactgagtactgcatcgagaccggagcccctgacggctccttcctcgtgcgagagagtgagaccttcgtgggcgactacacgctctctttctggcggaacgggaaagtccagcactgccgtatccactcccggcaagatgctgggacccccaagttcttcttgacagacaacctcgtctttgactccctctatgacctcatcacgcactaccagcaggtgcccctgcgctgtaatgagtttgagatgcgactttcagagcctgtcccacagaccaacgcccacgagagcaaagagtggtaccacgcgagcctgaccagagcacaggctgagcacatgctaatgcgcgtccctcgtgatggggccttcctggtgcggaagcggaatgaacccaactcatatgccatctctttccgggctgagggcaagatcaagcattgccgtgtccagcaagagggccagacagtgatgctagggaactcggagttcgacagccttgttgacctcatcagctactatgagaaacacccgctataccgcaagatgaagctgcgctatcccatcaacgaggaggcactggagaagattggcacagctgagcctgactacggggccctgtatgagggacgcaaccctggcttctatgtagaggcaaaccctatgccaactttcaagtgtgcagtcaaagccctctttgactacaaggcccagagggaggacgagctgaccttcatcaagagcgccatcatccagaatgtggagaagcaagagggaggctggtggcgaggggactacggagggaagaagcagctgtggttcccatcaaactacgtggaagagatggtcaaccccgtggccctggagccggagagggagcacttggacgagaacagccccctaggggacttgctgcggggggtcttggatgtgccggcttgtcagattgccatccgtcctgagggcaagaacaaccggctcttcgtcttctccatcagcatggcgtcggtggcccactggtccctggatgttgctgccgactcacaggaggagctgcaggactgggtgaaaaagatccgtgaagtggcccagacagcagacgccaggctcactgaagggaagataatggaacggaggaagaagattgccctggagctctctgaacttgtcgtctactgccggcctgttccctttgatgaagagaagattggcacagaacgtgcttgctaccgggacatgtcatccttcccggaaaccaaggctgagaaatacgtgaacaaggccaaaggcaagaagttccttcagtacaatcgactgcagctctcccgcatctaccccaagggccagcgactggattcctccaactacgatcctttgcccatgtggatctgtggcagtcagcttgtggccctcaacttccagacccctgacaagcctatgcagatgaaccaggccctcttcatgacgggcaggcactgtggctacgtgctgcagccaagcaccatgcgggatgaggccttcgacccctttgacaagagcagcctccgcgggctggagccatgtgccatctctattgaggtgctgggggcccgacatctgccaaagaatggccgaggcattgtgtgtccttttgtggagattgaggtggctggagctgagtatgacagcaccaagcagaagacagagtttgtggtggacaatggactcaaccctgtatggccagccaagcccttccacttccagatcagtaaccctgaatttgcctttctgcgcttcgtggtgtatgaggaagacatgtttagtgaccagaatttcctggctcaggctactttcccagtaaaaggcctgaagacaggatacagagcagtgcctttgaagaacaactacagtgaggacctggagttggcctccctgctgatcaagattgacattttccctgccaagcaggagaatggtgacctcagtcccttcagtggtacgtccctgcgggagcggggctcagatgcctcaggccagctgtttcatggccgagcccgggaaggctcctttgaatcccgctaccagcagccgtttgaggacttccgcatctcccaggagcatctcgcagaccattttgacagtcgagaacgaagggccccaagaaggactcgggtcaatggagacaaccgcctctagttgtaccccagcctcgttggagagcagcaggtgctgtgcgccttgtagaatgccgcgaactgggttctttggaagcagccccctgtggcggccttccgggtctcgcagcctgaagcctggattccagcagtgaatgctagacagaaaccaagccattaatgagatgttattactgttttgggcctccatgccccagctctggatgaaggcaaaaactgtactgtgtttcgcattaagcacacacatctggccctgacttctggagatggatccttccatcttgtggggccaggaccatggccgaagccccttggagagagaggctgcctcagccagtggcacaggagactccaaggagctactgacattcctaagagtggaggaggaggaggagccttgctgggccagggaaacaaagtttacattgtcctgtagctttaaaaccacagctgggcagggtgagaagctagatgcccctgcagtttggccctggagccagggcagaggaatgtagggcctgcatggagaagggttctgccctgcctgaggaggaggacacagcacaagggcacattgcccatggctgggaacatgacccagcctgaaagatacaggggatcatgttaaaaatagcagtattatttttcgtctcaatggtattgtaactaagttatttactcctcctgctcctcacccctgtagggaaaccttggagaggagagtggcaggtgggctgcctgctgtgttaagaggacttagtttgtgatgtaaggcactgtcaggaatggggggcgggccagggtgggaagagaagaaatagcagagcctattttggtgaggttttttgtttttaagtcaaagaagactcagtatgctttccctgaggaatgaaaaagggattgaggagttgcctgactcctgggtgggtggggtacaggcagttaggtgctgaatgaagctgccatccttgctgcagcttctaactggtaaaaagatccagggatggagatgggaaggttagaaaggcagccctcacctctgaggacagaggccggggtccaggcccgtgggcgcaaaggtgcctcatagcatagccagcattcagcacacacaaacctactgcccacatttgggctcagggttggccatttgctagttctgctgccctcttaagatctgactgccaaataaatcatcctcatgtcctttt

SEQ ID NO: 28511 - protein, 1291 aa, Homo sapiens; identical to SEQ ID NO: 3911

SEQ ID NO: 28512 - DNA, 5805 bp, Homo sapiens
cggcccgtcctggctcccttgtccgggaagcccgcccaggagccgccgccgggtcccgctcgtctgccgcctcagcctcagccccaacctcagccgccgccgttgcgcttgctcccgggcggtcctggcctgtgccgccgccgcccccagcgtcggagccatggcgggcgccgcgtccccttgcgccaacggctgcgggcccggcgcgccctcggacgccgaggtgctgcacctctgccgcagcctcgaggtgggcaccgtcatgactttgttctactccaagaagtcgcagcgacccgagcggaagaccttccaggtcaagctggagacgcgccagatcacgtggagccggggcgccgacaagatcgagggggccattgacattcgtgaaattaaggagatccgcccagggaagacctcacgggactttgatcgctatcaagaggacccagctttccggccggaccagtcacattgctttgtcattctctatggaatggaatttcgcctgaaaacgctgagcctgcaagccacatctgaggatgaagtgaacatgtggatcaagggcttaacttggctgatggaggatacattgcaggcacccacacccctgcagattgagaggtggctccggaagcagttttactcagtggatcggaatcgtgaggatcgtatatcagccaaggacctgaagaacatgctgtcccaggtcaactaccgggtccccaacatgcgcttcctccgagagcggctgacggacctggagcagcgcagcggggacatcacctacgggcagtttgctcagctgtaccgcagcctcatgtacagcgcccagaagacgatggacctccccttcttggaagccagtactctgagggctggggagcggccggagctttgccgagtgtcccttcctgagttccagcagttccttcttgactaccagggggagctgtgggctgttgatcgcctccaggtgcaggagttcatgctcagcttcctccgagaccccttacgagagatcgaggagccatacttcttcctggatgagtttgtcaccttcctgttctccaaagagaacagtgtgtggaactcgcagctggatgcagtatgcccggacaccatgaacaaccctctttcccactactggatctcctcctcgcacaacacgtacctgaccggggaccagttctccagtgagtcctccttggaagcctatgctcgctgcctgcggatgggctgtcgctgcattgagttggactgctgggacggcccggatgggatgccagttatttaccatgggcacacccttaccaccaagatcaagttctcagatgtcctgcacaccatcaaggagcatgcctttgtggcctcagagtacccagtcatcctgtccattgaggaccactgcagcattgcccagcagagaaacatggcccaatacttcaagaaggtgctgggggacacactcctcaccaagcccgtggagatctctgccgacgggctcccctcacccaaccagcttaagaggaagatcctcatcaagcacaagaagctggctgagggcagtgcctacgaggaggtgcctacatccatgatgtactctgagaacgacatcagcaactctatcaagaatggcatcctctacctggaggaccctgtgaaccacgaatggtatccccactactttgttctgaccagcagcaagatctactactctgaggagaccagcagtgaccagggcaacgaggatgaggaggagcccaaggaggtcagcagcagcacagagctgcactccaatgagaagtggttccatgggaagctaggggcagggcgtgacgggcgtcacatcgctgagcgcctgcttactgagtactgcatcgagaccggagcccctgacggctccttcctcgtgcgagagagtgagaccttcgtgggcgactacacgctctctttctggcggaacgggaaagtccagcactgccgtatccactcccggcaagatgctgggacccccaagttcttcttgacagacaacctcgtctttgactccctctatgacctcatcacgcactaccagcaggtgcccctgcgctgtaatgagtttgagatgcgactttcagagcctgtcccacagaccaacgcccacgagagcaaagagtggtaccacgcgagcctgaccagagcacaggctgagcacatgctaatgcgcgtccctcgtgatggggccttcctggtgcggaagcggaatgaacccaactcatatgccatctctttccgggctgagggcaagatcaagcattgccgtgtccagcaagagggccagacagtgatgctagggaactcggagttcgacagccttgttgacctcatcagctactatgagaaacacccgctataccgcaagatgaagctgcgctatcccatcaacgaggaggcactggagaagattggcacagctgagcctgactacggggccctgtatgagggacgcaaccctggcttctatgtagaggcaaaccctatgccaactttcaagtgtgcagtcaaagccctctttgactacaaggcccagagggaggacgagctgaccttcatcaagagcgccatcatccagaatgtggagaagcaagagggaggctggtggcgaggggactacggagggaagaagcagctgtggttcccatcaaactacgtggaagagatggtcaaccccgtggccctggagccggagagggagcacttggacgagaacagccccctaggggacttgctgcggggggtcttggatgtgccggcttgtcagattgccatccgtcctgagggcaagaacaaccggctcttcgtcttctccatcagcatggcgtcggtggcccactggtccctggatgttgctgccgactcacaggaggagctgcaggactgggtgaaaaagatccgtgaagtggcccagacagcagacgccaggctcactgaagggaagataatggaacggaggaagaagattgccctggagctctctgaacttgtcgtctactgccggcctgttccctttgatgaagagaagattggcacagaacgtgcttgctaccgggacatgtcatccttcccggaaaccaaggctgagaaatacgtgaacaaggccaaaggcaagaagttccttcagtacaatcgactgcagctctcccgcatctaccccaagggccagcgactggattcctccaactacgatcctttgcccatgtggatctgtggcagtcagcttgtggccctcaacttccagacccctgacaagcctatgcagatgaaccaggccctcttcatgacgggcaggcactgtggctacgtgctgcagccaagcaccatgcgggatgaggccttcgacccctttgacaagagcagcctccgcgggctggagccatgtgccatctctattgaggtgctgggggcccgacatctgccaaagaatggccgaggcattgtgtgtccttttgtggagattgaggtggctggagctgagtatgacagcaccaagcagaagacagagtttgtggtggacaatggactcaaccctgtatggccagccaagcccttccacttccagatcagtaaccctgaatttgcctttctgcgcttcgtggtgtatgaggaagacatgtttagtgaccagaatttcctggctcaggctactttcccagtaaaaggcctgaagacaggatacagagcagtgcctttgaagaacaactacagtgaggacctggagttggcctccctgctgatcaagattgacattttccctgccaagcaggagaatggtgacctcagtcccttcagtggtacgtccctgcgggagcggggctcagatgcctcaggccagctgtttcatggccgagcccgggaaggctcctttgaatcccgctaccagcagccgtttgaggacttccgcatctcccaggagcatctcgcagaccattttgacagtcgagaacgaagggccccaagaaggactcgggtcaatggagacaaccgcctctagttgtaccccagcctcgttggagagcagcaggtgctgtgcgccttgtagaatgccgcgaactgggttctttggaagcagccccctgtggcggccttccgggtctcgcagcctgaagcctggattccagcagtgaatgctagacagaaaccaagccattaatgagatgttattactgttttgggcctccatgccccagctctggatgaaggcaaaaactgtactgtgtttcgcattaagcacacacatctggccctgacttctggagatggatccttccatcttgtggggccaggaccatggccgaagccccttggagagagaggctgcctcagccagtggcacaggagactccaaggagctactgacattcctaagagtggaggaggaggaggagccttgctgggccagggaaacaaagtttacattgtcctgtagctttaaaaccacagctgggcagggtgagaagctagatgcccctgcagtttggccctggagccagggcagaggaatgtagggcctgcatggagaagggttctgccctgcctgaggaggaggacacagcacaagggcacattgcccatggctgggaacatgacccagcctgaaagatacaggggatcatgttaaaaatagcagtattatttttcgtctcaatggtattgtaactaagttatttactcctcctgctcctcacccctgtagggaaaccttggagaggagagtggcaggtgggctgcctgctgtgttaagaggacttagtttgtgatgtaaggcactgtcaggaatggggggcgggccagggtgggaagagaagaaatagcagagcctattttggtgaggttttttgtttttaagtcaaagaagactcagtatgctttccctgaggaatgaaaaagggattgaggagttgcctgactcctgggtgggtggggtacaggcagttaggtgctgaatgaagctgccatccttgctgcagcttctaactggtaaaaagatccagggatggagatgggaaggttagaaaggcagccctcacctctgaggacagaggccggggtccaggcccgtgggcgcaaaggtgcctcatagcatagccagcattcagcacacacaaacctactgcccacatttgggctcagggttggccatttgctagttctgctgccctcttaagatctgactgccaaataaatcatcctcatgtcctttttcctttgacttgtatgctctttcgggggctcaggaaagcctgttgcatgggacatgctcactagaaacagtcgccagatgattattctgcagtagaagcaggtaggaaatttctggaaatttctcaggttaagcagcaagagctgtaacccctcctctgggctaacaggagttgtgggtccactctctcctgcccaccctctgagggtgtgtctgagcagagtacatcctgcctgggttctttgtggccagccagttttggtggtgagctggaaacaaccagagcccctttccagttccacagaaacctctcctttcaaaaatgttgcattcagttcgttaacactgccaggtgccattctgattgcctctaggacttggcagctgaaatctctgggccctttcaacacagttgaaaggcccttctcttcctgaagctctgtttccatagttggctgtgctgggatggaacaaaaatgacgccacacaaaaaatttaagatagatccggttccgtggatgacatgaactgatgatagccagtatcaaacagcgatagtg

SEQ ID NO: 28513 - protein, 1291 aa, Homo sapiens; identical to SEQ ID NO: 3911

SEQ ID NO: 28514 - DNA, 1052 bp, Homo sapiens
tagttgtaccccagcctcgttggagagcagcaggtgctgtgcgccttgtagaatgccgcgaactgggttctttggaagcagccccctgtggcggccttccgggtctcgcagcctgaagcctggattccagcagtgaatgctagacagaaaccaagccattaatgagatgttattactgttttgggcctccatgccccagctctggatgaaggcaaaaactgtactgtgtttcgcattaagcacacacatctggccctgacttctggagatggatccttccatcttgtggggccaggaccatggccgaagcagccctcacctctgaggacagaggccggggtccaggcccgtgggcgcaaaggtgcctcatagcatagccagcattcagcacacacaaacctactgcccacatttgggctcagggttggccatttgctagttctgctgccctcttaagatctgactgccaaataaatcatcctcatgtcctttttcctttgacttgtatgctctttcgggggctcaggaaagcctgttgcatgggacatgctcactagaaacagtcgccagatgattattctgcagtagaagcaggtaggaaatttctggaaatttctcaggttaagcagcaagagctgtaacccctcctctgggctaacaggagttgtgggtccactctctcctgcccaccctctgagggtgtgtctgagcagagtacatcctgcctgggttctttgtggccagccagttttggtggtgagctggaaacaaccagagcccctttccagttccacagaaacctctcctttcaaaaatgttgcattcagttcgttaacactgccaggtgccattctgattgcctctaggacttggcagctgaaatctctgggccctttcaacacagttgaaaggcccttctcttcctgaagctctgtttccatagttggctgtgctgggatggaacaaaaatgacgccacacaaaaaatttaagatagatccggttccgtggatgacatgaactgatgatagccagtatcaaacagcgatagtg

SEQ ID NO: 28515 - protein, 40 aa, Homo sapiens
MLDRNQAINEMLLLFWASMPQLWMKAKTVLCFALSTHIWP

SEQ ID NO: 28516 - DNA, 8192 bp, Homo sapiens
atggccagcaagaggaaatccaccacaccatgcatgatcccagtgaagactgtggtgttgcaagatgccagcatggaggcccagcccgctgagaccttgcctgaaggaccccagcaggatctgcccccagaagcatctgctgccagcagtgaggcagcacagaaccccagcagtactgatggctctacactggccaatgggcatcggagcactttagatggctatttatattcctgtaaatactgcgatttcagatcccatgacatgacccaatttgtgggacatatgaactcagagcacacagactttaataaagacccaacctttgtatgcagtgggtgcagttttctggcaaaaacccctgaggggctttccttgcacaatgccacatgtcactccggggaagccagctttgtgtggaacgtggccaagccagacaatcatgtggttgtggagcagagcatccctgagagcaccagcactcctgacctagcgggtgagcccagtgctgaaggggctgatggacaggcagaaatcatcattaccaaaactccaatcatgaagataatgaaaggcaaagctgaagccaaaaaaattcatacactcaaggagaatgtccctagccagcctgtgggtgaggccttaccaaagctgtcgactggagaaatggaggtgagagagggggaccattccttcatcaatggggcagttccagtcagccaggcatctgccagctctgcaaaaaacccccatgccgccaacgggcccctgataggaacagtgccagttttgccagctggcatagcacagttcctctccctccagcagcagcccccagtgcatgcccaacaccatgtccaccagccactgcccacggccaaggcccttcccaaagtgatgatccccctgagcagcattccaacgtacaatgcagccatggactctaacagcttcctgaagaactccttccacaagttcccctaccccaccaaagccgagctctgctatttgactgtggtgaccaagtatccagaagaacagctcaagatctggttcacagcccaaaggctgaagcaggggatcagctggtcccctgaggagattgaggatgcccggaaaaagatgttcaatacagtcatccagtctgtgcctcagcccacaattacggttctaaataccccactcgtcgccagtgctggcaatgtccagcatctcatccaggccgctcttccaggtcacgttgtggggcagccagagggtacaggagggggacttctggtcactcagccattgatggccaatgggttgcaagcaacaagttcccctctccccctcacggtgacatccgtccccaagcagccaggtgtggcacccattaacactgtgtgttcaaatacaacgtcagctgtgaaggtggtcaatgcggcccagtcgctcctcacggcctgccccagcataacctcccaagccttccttgatgctagcatctacaaaaataagaaatctcatgaacagctgtcagctctgaaagggagcttctgtcggaaccagttcccagggcagagcgaagttgaacatctcacaaaagtgacgggcctcagtaccagagaggtgcggaaatggttcagtgatcgtagataccactgccggaacttgaagggctccagagcgatgatacctggagatcacagttccatcatcattgactctgtgccagaggtgtccttctccccatcgtccaaggtccctgaggtaacctgcattccgacaacagccacactagcaacccacccttctgccaaacgacaatcttggcaccagactcctgacttcacaccaaccaaatacaaggagagagcccctgagcagctcagagccctggagagcagttttgcacaaaaccctcttcctcttgatgaggaactggaccgcctgagaagtgaaaccaaaatgacccgacgagaaattgatagctggttttcagagagacggaaaaaagtgaatgctgaggagaccaagaaggctgaggagaatgcctctcaggaggaagaggaggctgctgaggatgagggtggagaagaggatttggccagtgagctaagggtctctggtgaaaatggctctctggaaatgcccagcagccatatcttggcagagcgcaaagtcagccccattaaaatcaacctgaagaacctgagggtcactgaagccaatggcaggaacgagattccagggctgggtgcctgtgaccctgaggatgatgagtcaaacaaactggcagagcagctcccaggcaaagtgagctgcaaaaagactgcccagcagcggcacttgctgcggcagctctttgtccagacacagtggccaagcaaccaggactatgactccatcatggcccagacgggtctgccacggccagaggtggtgcgctggtttggagatagcaggtacgcactgaagaacggccaactcaaatggtacgaagactataagcgaggcaacttcccaccagggctactggtcattgcccctggcaaccgggagctcctgcaggactattacatgacacacaagatgctgtatgaagaggacctgcagaacctctgtgacaagacccagatgagctcccagcaggtcaagcagtggtttgctgagaaaatgggggaggagaccagagccgtggcagacacaggcagtgaggaccagggccctggtactggtgagctcacagcagttcacaaagggatgggtgacacctattcagaggtgtctgagaacagtgagtcgtgggagccccgtgtccctgaggccagctcagagccctttgacacatcgagtccccaggctggacgtcagctcgaaacagactgaatttgatctgattaatgtgaaggactggccagtctgggaaaccgcctgccacgtggaagagccaaacccgactctctgctgccacatgccgttcccatgcccggctgctgggcacctgggagagcttccagaatcctcgcagacagcccagagcctgccgctaccctcggcctgcccaccaccaagcaagcagcaagcaagatggggttctcatcagttcttcctcccacaatgtaggacctttcctttaccttccaatggataaaatagttcagagttcatagtcatattcatagacacagaatcaagcttttaacatatacatccacctctatatgttaaataaaacatcagattatcaacactgtcattacgtagaaactttggttagccaagcagtgcattgtcagttacgtcatctctaaaaatgacctgtgtctgttctctggggattgctgggtcacaggtgcccctcaccttccacagtcaggcagggaagttataggcacaaagctacgtctggaacccctttgtgccccctttgtgttcctcaaggaagcagtacctttgaagagatctctgctgcattaagtgatgaccggctacgtttcatgtcaggcttgctttgccttgtgggctactcagtgcagaacctgctgtaaccctcagttcaaaaaatggactggcaatgtgattagcgttggatgctttaccattctctttagttgttaccgtaattctgctttttcatgggagtttgaatcatggaccataacttttcagttatcagatcaactaaagaaacatttgttgttaagcctaatgtgctgacctatgtgcctgcattttttttttaatctagacatgtttggagtgagagaaagatggaaaaaagacatggggtagggacgtaagtggaaatctatagccacagcctgaagctttgaccactgcggttttcagagccctttctccacactcatttcagagcctcctatggtttgggaaggaataacacactggcccattagtaagggtgaaggctggagggatttgttgacttcttggaattatcagaggtagggtggtctttagcacaaagacttgcatgcagagatccctggcagaacacccagagtgcccgtggctcccaccccagggtctggccggtgtgctggatgcatgcccaagggtgctgggcatcactggtccttgtgaggatgcttttaaagttttatatttatgtccccaaacttggaaacaagaactctactttagcctaaccctcatgtccttttttgaattgagaaaattacaggaaatggtgcctttgaaaattagaaaacttgcttacagagctgttctaaatggtaaatcctcaatttccccaagaccggttgctctgagagtagctggtaaagaggggcgaactaaagacctgtccacctgtagctccgctcatttcttagaaaccacctgcttcccagagtgccaagccacaagtaccaggcttcgtgggcacagacacctcctgggctgggcagagtgacagtgctagaagaccccagagagagggcaagggctttgggcaagaagcactggtggtgttttagggaccgtccttctcccctacccagggaactggacctggcagggcaccgtgctcatgtggctccaaggacaagcatggcggtggccccttctgccttccaggagaggtcttgcttttgaaaccaaaatcatgttcttctaaagtgtcatcttctgccctccctgtcccaatagggaccacatcttatttgtctcaaacagggacttgtgagtacttggcaagttttgcagcctatttttgtattcttaatttggggagtaaagatgtttggtctcaaaaacctttgaggaattgccaagaatggcgagtgattgctttccttcagagaacagacacttggaatttctccttttagtgtttatatacgtgcagattaatttatatatatatatatacacacacacatatacagtataaatactcatttgattctcgtaaaacgcgcatctggcgtgtgcagttgagaaacttggtggcacatgggtgttgggggagtagcctgtgttggagggacaccagtgcactaggcagctggggcggcccaggctgaagccatctccgggtgtctgagaaaccacccagtgcctcacctccagatcctgctggcatcacctccagagccctgcatgcactggctgaagagttggtctgtggagaggattttcttggttacttgtattcacggttaatttacaacccaaacagcaaaacacagttggtggacaagttcatgcaggacctacagtgacccagccatgggcactagctcatctttcaggtggaaaagtacagtgctgcctgccctggtatgtttttcttatagatgttagccctgcccaacagccagggctacactacaaaaggcaagaatgcccatgtaaggagcccagcagtctggacagatccttcttcctctgctgttggatgagagtgagtgagtatgctctggaccttatccttgaaagatgatcaaaagcgatgatgagggaggcagtcatcacgcaggtgcttaaagggacattgtaggaggtactcaagggtttgggggcaaaaccctgaatccagccagtcgtgcacagagacacacccacactagcccagtggcagtgggggatgtgggatggcagcagccaggtatgtagccctgtcacaggacagctcactgtggttttgcacactgcctaagggttaaattgtgttgttgccttcagtagaaggcatttgtgggctgcagagttgagagttgggtgaggttagtctctcctgaagaaaaagcctataaaaagtggctaatcttatcccttttctctgtatgcagttggactcgtcagagatagtaaaatcatcttttagtgtttttttgttgctgatgtcttgtacccatttgttttttacatggggttgtagatcgagttctcaaaggtgaaaccagatgatcattctgataaaggaaatttaaatttgatacatatgctttgtatattttgattacttgttttcgtttttgactataaaggagcttttttattttgggaggggaggagtgtcatttttgagaatcttgggttcctgaaaaagaacgccctagttggatggcttgccagggccttggggtttggtagtgattgtacaacttaaagctcctttctcttggctgagtgacaggtggctgttcaggtggaccaaagcaccttgacacaaggactccacactgtgctctctagtagcacaaggaggaagttggacagaacattgggtagtgccttgcgggctcacacatgtactagtggtctcatctccagctagccttgggaggccgtcccaccaggaaatctctctattccgtagcctgagatgtgcccttgtgggttttatcctgctcagtcagtggcctaggggcaggtcctgtgttctctccctctctctcctggctctgggacatctgtccctggctgcctttcatggaggaaggacactggcctttctggttggatgctgtgtggatgctctctgcttgagcctcgtggtctcttgtctctttttggaccaatatcctcagattggtgcagctttttcagttcagatatcacaccccaagtggataaaggcaacttgcaggagaggagagccagccaagaagaaaattttaaaaccaaacctcgtttaggattttcctaaagtcatcttctcttttttcttgctcagagtttacctgggagatttcaccagtttgactcaccatttgcagatgtgcttttgtattaaatttaaattttcacatatcacatccattctcaaggtagttatatgctggagaagaaaaatcctctagacacatgaaggcccacatagtcaagtcttccagggcaaagccagcagcccacccaggtcaggtagccagcagggctcagttcccctcactccagacacggaccctcctcttcagggtctcttgacccagcttccttctctccttttacctgagagcacagacctctctcagccagcctgcccagaccacggggggctactcccatgtagtttggggagcacttgatctcagaaaagctccattgtctgagcaaatgggcagttgtggagctcaagcctttctcctgtgctcaagtcccttccccaagcaaggcttcaacctcatctacccaccatgtagttttctctggccatttaagtggggcggcagggacatggttgggccatgccacaccagggctggtgaggcaaccagttttgattttgacagagtggctggaggaaaagtggcaatcaaggtgctgcttggtttgctctgagtgcaaatggaaccaacaggtttctgctgcaatctgtgtgttcccagtgccaggtcacaccaggaggggtggggcagggctaaccaagtggtctctgaactcaccgagcgtctgcacttggttgtgaagttaatgggagtacagagagcgtctggccttggagaggggttgagagcctcctttttggttcttcattcctgagctcttgcctgcccacaaatctgacctctttgaatggggacgcagtccttcaacagagaagtttctatggcaaagaagtttctatttagctctagatccagcagagtcatccattctaactgccctgaagtctagagcaggggagggaacccagaggctggggatgagactaggcagaccctggttaccatatggacaaggacaggggaaagcacccccttcctcaatttctgaaagttctatctttgggttcgcaggactttgaggatgataaagaacatataggtactagcttgttgttgctggtccaaagcttccacagccctgagaatttggctttcgtggctgctctggcagctgagcgaagggaggaaggcagccgctctggtggggactctaggcaccttccctgctgtccacttggataggcggtgagccccagggtactgagaggagcctgagcatttacctgccattagtgcctcttccttcaggagactggcttgaaacgtgtgttcatgtgcgcgtgcacacacacacatgagcacctgtatgtgttaatgaatagtttttcttggttaatgctttttaacttctgttcctttccgtaagtggatgattcaaaattaacgtgacttggctgggcgcagtggctcacacctgtaatcccagcactttgggaggccaagggaggcgga

SEQ ID NO: 28517 - protein, 956 aa, Homo sapiens; identical to SEQ ID NO: 3915

SEQ ID NO: 28518 - DNA, 7685 bp, Homo sapiens
gtgaaaagacctagatggtagaaggcaagcagtggaatgtgtctgggtatccgagaaatatacagaaagcacttaagagaacttaatcatttttttctccctttccttagattgaatagggaaaacctgctttctgcaaacaactgaaaaagctgcatttagaaactgtttctttggccctcatcgagaagctggaacttgtattgttaggccccttatgggacaagctctcaactgctgatcacccagtgattgtcaccatggccagcaagaggaaatccaccacaccatgcatgatcccagtgaagactgtggtgttgcaagatgccagcatggaggcccagcccgctgagaccttgcctgaaggaccccagcaggatctgcccccagaagcatctgctgccagcagtgaggcagcacagaaccccagcagtactgatggctctacactggccaatgggcatcggagcactttagatggctatttatattcctgtaaatactgcgatttcagatcccatgacatgacccaatttgtgggacatatgaactcagagcacacagactttaataaagacccaacctttgtatgcagtgggtgcagttttctggcaaaaacccctgaggggctttccttgcacaatgccacatgtcactccggggaagccagctttgtgtggaacgtggccaagccagacaatcatgtggttgtggagcagagcatccctgagagcaccagcactcctgacctagcgggtgagcccagtgctgaaggggctgatggacaggcagaaatcatcattaccaaaactccaatcatgaagataatgaaaggcaaagctgaagccaaaaaaattcatacactcaaggagaatgtccctagccagcctgtgggtgaggccttaccaaagctgtcgactggagaaatggagaaacagactgaatttgatctgattaatgtgaaggactggccagtctgggaaaccgcctgccacgtggaagagccaaacccgactctctgctgccacatgccgttcccatgcccggctgctgggcacctgggagagcttccagaatcctcgcagacagcccagagcctgccgctaccctcggcctgcccaccaccaagcaagcagcaagcaagatggggttctcatcagttcttcctcccacaatgtaggacctttcctttaccttccaatggataaaatagttcagagttcatagtcatattcatagacacagaatcaagcttttaacatatacatccacctctatatgttaaataaaacatcagattatcaacactgtcattacgtagaaactttggttagccaagcagtgcattgtcagttacgtcatctctaaaaatgacctgtgtctgttctctggggattgctgggtcacaggtgcccctcaccttccacagtcaggcagggaagttataggcacaaagctacgtctggaacccctttgtgccccctttgtgttcctcaaggaagcagtacctttgaagagatctctgctgcattaagtgatgaccggctacgtttcatgtcaggcttgctttgccttgtgggctactcagtgcagaacctgctgtaaccctcagttcaaaaaatggactggcaatgtgattagcgttggatgctttaccattctctttagttgttaccgtaattctgctttttcatgggagtttgaatcatggaccataacttttcagttatcagatcaactaaagaaacatttgttgttaagcctaatgtgctgacctatgtgcctgcattttttttttaatctagacatgtttggagtgagagaaagatggaaaaaagacatggggtagggacgtaagtggaaatctatagccacagcctgaagctttgaccactgcggttttcagagccctttctccacactcatttcagagcctcctatggtttgggaaggaataacacactggcccattagtaagggtgaaggctggagggatttgttgacttcttggaattatcagaggtagggtggtctttagcacaaagacttgcatgcagagatccctggcagaacacccagagtgcccgtggctcccaccccagggtctggccggtgtgctggatgcatgcccaagggtgctgggcatcactggtccttgtgaggatgcttttaaagttttatatttatgtccccaaacttggaaacaagaactctactttagcctaaccctcatgtccttttttgaattgagaaaattacaggaaatggtgcctttgaaaattagaaaacttgcttacagagctgttctaaatggtaaatcctcaatttccccaagaccggttgctctgagagtagctggtaaagaggggcgaactaaagacctgtccacctgtagctccgctcatttcttagaaaccacctgcttcccagagtgccaagccacaagtaccaggcttcgtgggcacagacacctcctgggctgggcagagtgacagtgctagaagaccccagagagagggcaagggctttgggcaagaagcactggtggtgttttagggaccgtccttctcccctacccagggaactggacctggcagggcaccgtgctcatgtggctccaaggacaagcatggcggtggccccttctgccttccaggagaggtcttgcttttgaaaccaaaatcatgttcttctaaagtgtcatcttctgccctccctgtcccaatagggaccacatcttatttgtctcaaacagggacttgtgagtacttggcaagttttgcagcctatttttgtattcttaatttggggagtaaagatgtttggtctcaaaaacctttgaggaattgccaagaatggcgagtgattgctttccttcagagaacagacacttggaatttctccttttagtgtttatatacgtgcagattaatttatatatatatatatacacacacacatatacagtataaatactcatttgattctcgtaaaacgcgcatctggcgtgtgcagttgagaaacttggtggcacatgggtgttgggggagtagcctgtgttggagggacaccagtgcactaggcagctggggcggcccaggctgaagccatctccgggtgtctgagaaaccacccagtgcctcacctccagatcctgctggcatcacctccagagccctgcatgcactggctgaagagttggtctgtggagaggattttcttggttacttgtattcacggttaatttacaacccaaacagcaaaacacagttggtggacaagttcatgcaggacctacagtgacccagccatgggcactagctcatctttcaggtggaaaagtacagtgctgcctgccctggtatgtttttcttatagatgttagccctgcccaacagccagggctacactacaaaaggcaagaatgcccatgtaaggagcccagcagtctggacagatccttcttcctctgctgttggatgagagtgagtgagtatgctctggaccttatccttgaaagatgatcaaaagcgatgatgagggaggcagtcatcacgcaggtgcttaaagggacattgtaggaggtactcaagggtttgggggcaaaaccctgaatccagccagtcgtgcacagagacacacccacactagcccagtggcagtgggggatgtgggatggcagcagccaggtatgtagccctgtcacaggacagctcactgtggttttgcacactgcctaagggttaaattgtgttgttgccttcagtagaaggcatttgtgggctgcagagttgagagttgggtgaggttagtctctcctgaagaaaaagcctataaaaagtggctaatcttatcccttttctctgtatgcagttggactcgtcagagatagtaaaatcatcttttagtgtttttttgttgctgatgtcttgtacccatttgttttttacatggggttgtagatcgagttctcaaaggtgaaaccagatgatcattctgataaaggaaatttaaatttgatacatatgctttgtatattttgattacttgttttcgtttttgactataaaggagcttttttattttgggaggggaggagtgtcatttttgagaatcttgggttcctgaaaaagaacgccctagttggatggcttgccagggccttggggtttggtagtgattgtacaacttaaagctcctttctcttggctgagtgacaggtggctgttcaggtggaccaaagcaccttgacacaaggactccacactgtgctctctagtagcacaaggaggaagttggacagaacattgggtagtgccttgcgggctcacacatgtactagtggtctcatctccagctagccttgggaggccgtcccaccaggaaatctctctattccgtagcctgagatgtgcccttgtgggttttatcctgctcagtcagtggcctaggggcaggtcctgtgttctctccctctctctcctggctctgggacatctgtccctggctgcctttcatggaggaaggacactggcctttctggttggatgctgtgtggatgctctctgcttgagcctcgtggtctcttgtctctttttggaccaatatcctcagattggtgcagctttttcagttcagatatcacaccccaagtggataaaggcaacttgcaggagaggagagccagccaagaagaaaattttaaaaccaaacctcgtttaggattttcctaaagtcatcttctcttttttcttgctcagagtttacctgggagatttcaccagtttgactcaccatttgcagatgtgcttttgtattaaatttaaattttcacatatcacatccattctcaaggtagttatatgctggagaagaaaaatcctctagacacatgaaggcccacatagtcaagtcttccagggcaaagccagcagcccacccaggtcaggtagccagcagggctcagttcccctcactccagacacggaccctcctcttcagggtctcttgacccagcttccttctctccttttacctgagagcacagacctctctcagccagcctgcccagaccacggggggctactcccatgtagtttggggagcacttgatctcagaaaagctccattgtctgagcaaatgggcagttgtggagctcaagcctttctcctgtgctcaagtcccttccccaagcaaggcttcaacctcatctacccaccatgtagttttctctggccatttaagtggggcggcagggacatggttgggccatgccacaccagggctggtgaggcaaccagttttgattttgacagagtggctggaggaaaagtggcaatcaaggtgctgcttggtttgctctgagtgcaaatggaaccaacaggtttctgctgcaatctgtgtgttcccagtgccaggtcacaccaggaggggtggggcagggctaaccaagtggtctctgaactcaccgagcgtctgcacttggttgtgaagttaatgggagtacagagagcgtctggccttggagaggggttgagagcctcctttttggttcttcattcctgagctcttgcctgcccacaaatctgacctctttgaatggggacgcagtccttcaacagagaagtttctatggcaaagaagtttctatttagctctagatccagcagagtcatccattctaactgccctgaagtctagagcaggggagggaacccagaggctggggatgagactaggcagaccctggttaccatatggacaaggacaggggaaagcacccccttcctcaatttctgaaagttctatctttgggttcgcaggactttgaggatgataaagaacatataggtactagcttgttgttgctggtccaaagcttccacagccctgagaatttggctttcgtggctgctctggcagctgagcgaagggaggaaggcagccgctctggtggggactctaggcaccttccctgctgtccacttggataggcggtgagccccagggtactgagaggagcctgagcatttacctgccattagtgcctcttccttcaggagactggcttgaaacgtgtgttcatgtgcgcgtgcacacacacacatgagcacctgtatgtgttaatgaatagtttttcttggttaatgctttttaacttctgttcctttccgtaagtggatgattcaaaattaacgtgacttggctgggcgcagtggctcacacctgtaatcccagcactttgggaggccaagggaggcggatcacctgaggtcaggagttcgagaccagcctgatcggcatggtgaaaccccgtttctactaaaaatacaaaaattagccgggcgtggtggtgcgcgcctgtaatcccagctactcaggaggctgaggaaggagaatcacttgaacccgggaggtggaggttgcagtgagctgagatcgtgccactgcactccagcctgggcgacagagcgaaactccgtctcaaaaaaaaaaaaaaaacttaatgtgactggagttaaaagtgaaatgtcaggttgtttagtcactgaatagagagctacaagtgcttggtctttcccaagaatcaaacctgagtagaaatacatttaaaagaaaaatctacatggtacctatgaatcctgtaatttgtttagggagatcttgtcactcatccctggttcctgcccatactgtttggtctcgttcttgcagtttgcttggaacagggccagagccccacatgagattgtcagcaggagtgaggagcgccagtccctactcctcagcagggacccagcacagcaatccggttgttctcggttagactgggtcggggccaggggagaagcagtcacccctgtgtagagggttcccgctgtgcttctgagcagttgctttgttcagaagtgttaggagggtcagattgtgccataattgttattaaagagaaaacacgcccaccttcctttctcccctgctggccattgttcattgagttttactgagggcagcctttgtggaagtcagggaggttgccaaaggcctgtagatgcctcctgacaaggtcttgattcctggttttctagcacccatttgcattttggtcttcagcacaaagccttgttccctgtggccggacttctgggcaataagactggggagtgactgttgagcagtctgctgtcaggagagatggctgaaaaggtgatcatcttggtgctaaacaagtaagaggcaactgccctgtttttgtttgttttgaggcacaatgaaactttagccaaactctgcaagagggtcccatctcctgccatggccaggtgtgagagaccaaaccgagaaaacagcatactctatcacttaagccttgggtagaatgggaattctttaccctgggtaaacgttttaacaaaaaaatggaacttaacttcggtttggactgtggtcgtgctgaggcaggagtggggttgccctcttggggctgaatctccaggcctcacgaggtcccctgtggggatgctgctatttctaagatgcaaattgcacatttcctagattttgtatctgtggatttggataagggaggggaacacggacaaattgcttgtacaatttgaaatgggcctcaatggtacttcaaaccttttgattattcctaaataaaaacataaatatatttcac

SEQ ID NO: 28519 - protein, 315 aa, Homo sapiens
MASKRKSTTPCMIPVKTVVLQDASMEAQPAETLPEGPQQDLPPEASAASSEAAQNPSSTDGSTLANGHRSTLDGYLYSCKYCDFRSHDMTQFVGHMNSEHTDFNKDPTFVCSGCSFLAKTPEGLSLHNATCHSGEASFVWNVAKPDNHVVVEQSIPESTSTPDLAGEPSAEGADGQAEIIITKTPIMKIMKGKAEAKKIHTLKENVPSQPVGEALPKLSTGEMEKQTEFDLINVKDWPVWETACHVEEPNPTLCCHMPFPCPAAGHLGELPESSQTAQSLPLPSACPPPSKQQARWGSHQFFLPQCRTFPLPSNG

SEQ ID NO: 28520 - DNA, 7234 bp, Homo sapiens
gtgaaaagacctagatggtagaaggcaagcagtggaatgtgtctgggtatccgagaaatatacagaaagcacttaagagaacttaatcatttttttctccctttccttagattgaatagggaaaacctgctttctgcaaacaactgaaaaagctgcatttagaaactgtttctttggccctcatcgagaagctggaacttgtattgttaggccccttatgggacaagctctcaactgctgatcacccagtgattgtcaccatggccagcaagaggaaatccaccacaccatgcatgatcccagtgaagactgtggtgttgcaagatgccagcatggaggcccagcccgctgagaccttgcctgaaggaccccagcaggatctgcccccagaagcatctgctgccagcagtgaggcagcacagaaccccagcagtatcagagccctttgacacatcgagtccccaggctggacgtcagctcgaaacagactgaatttgatctgattaatgtgaaggactggccagtctgggaaaccgcctgccacgtggaagagccaaacccgactctctgctgccacatgccgttcccatgcccggctgctgggcacctgggagagcttccagaatcctcgcagacagcccagagcctgccgctaccctcggcctgcccaccaccaagcaagcagcaagcaagatggggttctcatcagttcttcctcccacaatgtaggacctttcctttaccttccaatggataaaatagttcagagttcatagtcatattcatagacacagaatcaagcttttaacatatacatccacctctatatgttaaataaaacatcagattatcaacactgtcattacgtagaaactttggttagccaagcagtgcattgtcagttacgtcatctctaaaaatgacctgtgtctgttctctggggattgctgggtcacaggtgcccctcaccttccacagtcaggcagggaagttataggcacaaagctacgtctggaacccctttgtgccccctttgtgttcctcaaggaagcagtacctttgaagagatctctgctgcattaagtgatgaccggctacgtttcatgtcaggcttgctttgccttgtgggctactcagtgcagaacctgctgtaaccctcagttcaaaaaatggactggcaatgtgattagcgttggatgctttaccattctctttagttgttaccgtaattctgctttttcatgggagtttgaatcatggaccataacttttcagttatcagatcaactaaagaaacatttgttgttaagcctaatgtgctgacctatgtgcctgcattttttttttaatctagacatgtttggagtgagagaaagatggaaaaaagacatggggtagggacgtaagtggaaatctatagccacagcctgaagctttgaccactgcggttttcagagccctttctccacactcatttcagagcctcctatggtttgggaaggaataacacactggcccattagtaagggtgaaggctggagggatttgttgacttcttggaattatcagaggtagggtggtctttagcacaaagacttgcatgcagagatccctggcagaacacccagagtgcccgtggctcccaccccagggtctggccggtgtgctggatgcatgcccaagggtgctgggcatcactggtccttgtgaggatgcttttaaagttttatatttatgtccccaaacttggaaacaagaactctactttagcctaaccctcatgtccttttttgaattgagaaaattacaggaaatggtgcctttgaaaattagaaaacttgcttacagagctgttctaaatggtaaatcctcaatttccccaagaccggttgctctgagagtagctggtaaagaggggcgaactaaagacctgtccacctgtagctccgctcatttcttagaaaccacctgcttcccagagtgccaagccacaagtaccaggcttcgtgggcacagacacctcctgggctgggcagagtgacagtgctagaagaccccagagagagggcaagggctttgggcaagaagcactggtggtgttttagggaccgtccttctcccctacccagggaactggacctggcagggcaccgtgctcatgtggctccaaggacaagcatggcggtggccccttctgccttccaggagaggtcttgcttttgaaaccaaaatcatgttcttctaaagtgtcatcttctgccctccctgtcccaatagggaccacatcttatttgtctcaaacagggacttgtgagtacttggcaagttttgcagcctatttttgtattcttaatttggggagtaaagatgtttggtctcaaaaacctttgaggaattgccaagaatggcgagtgattgctttccttcagagaacagacacttggaatttctccttttagtgtttatatacgtgcagattaatttatatatatatatatacacacacacatatacagtataaatactcatttgattctcgtaaaacgcgcatctggcgtgtgcagttgagaaacttggtggcacatgggtgttgggggagtagcctgtgttggagggacaccagtgcactaggcagctggggcggcccaggctgaagccatctccgggtgtctgagaaaccacccagtgcctcacctccagatcctgctggcatcacctccagagccctgcatgcactggctgaagagttggtctgtggagaggattttcttggttacttgtattcacggttaatttacaacccaaacagcaaaacacagttggtggacaagttcatgcaggacctacagtgacccagccatgggcactagctcatctttcaggtggaaaagtacagtgctgcctgccctggtatgtttttcttatagatgttagccctgcccaacagccagggctacactacaaaaggcaagaatgcccatgtaaggagcccagcagtctggacagatccttcttcctctgctgttggatgagagtgagtgagtatgctctggaccttatccttgaaagatgatcaaaagcgatgatgagggaggcagtcatcacgcaggtgcttaaagggacattgtaggaggtactcaagggtttgggggcaaaaccctgaatccagccagtcgtgcacagagacacacccacactagcccagtggcagtgggggatgtgggatggcagcagccaggtatgtagccctgtcacaggacagctcactgtggttttgcacactgcctaagggttaaattgtgttgttgccttcagtagaaggcatttgtgggctgcagagttgagagttgggtgaggttagtctctcctgaagaaaaagcctataaaaagtggctaatcttatcccttttctctgtatgcagttggactcgtcagagatagtaaaatcatcttttagtgtttttttgttgctgatgtcttgtacccatttgttttttacatggggttgtagatcgagttctcaaaggtgaaaccagatgatcattctgataaaggaaatttaaatttgatacatatgctttgtatattttgattacttgttttcgtttttgactataaaggagcttttttattttgggaggggaggagtgtcatttttgagaatcttgggttcctgaaaaagaacgccctagttggatggcttgccagggccttggggtttggtagtgattgtacaacttaaagctcctttctcttggctgagtgacaggtggctgttcaggtggaccaaagcaccttgacacaaggactccacactgtgctctctagtagcacaaggaggaagttggacagaacattgggtagtgccttgcgggctcacacatgtactagtggtctcatctccagctagccttgggaggccgtcccaccaggaaatctctctattccgtagcctgagatgtgcccttgtgggttttatcctgctcagtcagtggcctaggggcaggtcctgtgttctctccctctctctcctggctctgggacatctgtccctggctgcctttcatggaggaaggacactggcctttctggttggatgctgtgtggatgctctctgcttgagcctcgtggtctcttgtctctttttggaccaatatcctcagattggtgcagctttttcagttcagatatcacaccccaagtggataaaggcaacttgcaggagaggagagccagccaagaagaaaattttaaaaccaaacctcgtttaggattttcctaaagtcatcttctcttttttcttgctcagagtttacctgggagatttcaccagtttgactcaccatttgcagatgtgcttttgtattaaatttaaattttcacatatcacatccattctcaaggtagttatatgctggagaagaaaaatcctctagacacatgaaggcccacatagtcaagtcttccagggcaaagccagcagcccacccaggtcaggtagccagcagggctcagttcccctcactccagacacggaccctcctcttcagggtctcttgacccagcttccttctctccttttacctgagagcacagacctctctcagccagcctgcccagaccacggggggctactcccatgtagtttggggagcacttgatctcagaaaagctccattgtctgagcaaatgggcagttgtggagctcaagcctttctcctgtgctcaagtcccttccccaagcaaggcttcaacctcatctacccaccatgtagttttctctggccatttaagtggggcggcagggacatggttgggccatgccacaccagggctggtgaggcaaccagttttgattttgacagagtggctggaggaaaagtggcaatcaaggtgctgcttggtttgctctgagtgcaaatggaaccaacaggtttctgctgcaatctgtgtgttcccagtgccaggtcacaccaggaggggtggggcagggctaaccaagtggtctctgaactcaccgagcgtctgcacttggttgtgaagttaatgggagtacagagagcgtctggccttggagaggggttgagagcctcctttttggttcttcattcctgagctcttgcctgcccacaaatctgacctctttgaatggggacgcagtccttcaacagagaagtttctatggcaaagaagtttctatttagctctagatccagcagagtcatccattctaactgccctgaagtctagagcaggggagggaacccagaggctggggatgagactaggcagaccctggttaccatatggacaaggacaggggaaagcacccccttcctcaatttctgaaagttctatctttgggttcgcaggactttgaggatgataaagaacatataggtactagcttgttgttgctggtccaaagcttccacagccctgagaatttggctttcgtggctgctctggcagctgagcgaagggaggaaggcagccgctctggtggggactctaggcaccttccctgctgtccacttggataggcggtgagccccagggtactgagaggagcctgagcatttacctgccattagtgcctcttccttcaggagactggcttgaaacgtgtgttcatgtgcgcgtgcacacacacacatgagcacctgtatgtgttaatgaatagtttttcttggttaatgctttttaacttctgttcctttccgtaagtggatgattcaaaattaacgtgacttggctgggcgcagtggctcacacctgtaatcccagcactttgggaggccaagggaggcggatcacctgaggtcaggagttcgagaccagcctgatcggcatggtgaaaccccgtttctactaaaaatacaaaaattagccgggcgtggtggtgcgcgcctgtaatcccagctactcaggaggctgaggaaggagaatcacttgaacccgggaggtggaggttgcagtgagctgagatcgtgccactgcactccagcctgggcgacagagcgaaactccgtctcaaaaaaaaaaaaaaaacttaatgtgactggagttaaaagtgaaatgtcaggttgtttagtcactgaatagagagctacaagtgcttggtctttcccaagaatcaaacctgagtagaaatacatttaaaagaaaaatctacatggtacctatgaatcctgtaatttgtttagggagatcttgtcactcatccctggttcctgcccatactgtttggtctcgttcttgcagtttgcttggaacagggccagagccccacatgagattgtcagcaggagtgaggagcgccagtccctactcctcagcagggacccagcacagcaatccggttgttctcggttagactgggtcggggccaggggagaagcagtcacccctgtgtagagggttcccgctgtgcttctgagcagttgctttgttcagaagtgttaggagggtcagattgtgccataattgttattaaagagaaaacacgcccaccttcctttctcccctgctggccattgttcattgagttttactgagggcagcctttgtggaagtcagggaggttgccaaaggcctgtagatgcctcctgacaaggtcttgattcctggttttctagcacccatttgcattttggtcttcagcacaaagccttgttccctgtggccggacttctgggcaataagactggggagtgactgttgagcagtctgctgtcaggagagatggctgaaaaggtgatcatcttggtgctaaacaagtaagaggcaactgccctgtttttgtttgttttgaggcacaatgaaactttagccaaactctgcaagagggtcccatctcctgccatggccaggtgtgagagaccaaaccgagaaaacagcatactctatcacttaagccttgggtagaatgggaattctttaccctgggtaaacgttttaacaaaaaaatggaacttaacttcggtttggactgtggtcgtgctgaggcaggagtggggttgccctcttggggctgaatctccaggcctcacgaggtcccctgtggggatgctgctatttctaagatgcaaattgcacatttcctagattttgtatctgtggatttggataagggaggggaacacggacaaattgcttgtacaatttgaaatgggcctcaatggtacttcaaaccttttgattattcctaaataaaaacataaatatatttcac

SEQ ID NO: 28521 - protein, 62 aa, Homo sapiens
MASKRKSTTPCMIPVKTVVLQDASMEAQPAETLPEGPQQDLPPEASAASSEAAQNPSSIRAL

SEQ ID NO: 28522 - DNA, 8192 bp, Homo sapiens
agcaaatagactgaatgaaagatgagcttctgcctttatatccttctctcctgctacccaactcattgtggtgaaggaaaaagaaaacgcgggtggagactgcactatatgcttaggactgaaatgcaactgcagaagcaacatgtgaccttttagagatgcttgtgggactgcataaagtgaagagggaaactggaaaaaaacaatgaaattgaatagggaaaacctgctttctgcaaacaactgaaaaagctgcatttagaaactgtttctttggccctcatcgagaagctggaacttgtattgttaggccccttatgggacaagctctcaactgctgatcacccagtgattgtcaccatggccagcaagaggaaatccaccacaccatgcatgatcccagtgaagactgtggtgttgcaagatgccagcatggaggcccagcccgctgagaccttgcctgaaggaccccagcaggatctgcccccagaagcatctgctgccagcagtgaggcagcacagaaccccagcagtactgatggctctacactggccaatgggcatcggagcactttagatggctatttatattcctgtaaatactgcgatttcagatcccatgacatgacccaatttgtgggacatatgaactcagagcacacagactttaataaagacccaacctttgtatgcagtgggtgcagttttctggcaaaaacccctgaggggctttccttgcacaatgccacatgtcactccggggaagccagctttgtgtggaacgtggccaagccagacaatcatgtggttgtggagcagagcatccctgagagcaccagcactcctgacctagcgggtgagcccagtgctgaaggggctgatggacaggcagaaatcatcattaccaaaactccaatcatgaagataatgaaaggcaaagctgaagccaaaaaaattcatacactcaaggagaatgtccctagccagcctgtgggtgaggccttaccaaagctgtcgactggagaaatggaggtgagagagggggaccattccttcatcaatggggcagttccagtcagccaggcatctgccagctctgcaaaaaacccccatgccgccaacgggcccctgataggaacagtgccagttttgccagctggcatagcacagttcctctccctccagcagcagcccccagtgcatgcccaacaccatgtccaccagccactgcccacggccaaggcccttcccaaagtgatgatccccctgagcagcattccaacgtacaatgcagccatggactctaacagcttcctgaagaactccttccacaagttcccctaccccaccaaagccgagctctgctatttgactgtggtgaccaagtatccagaagaacagctcaagatctggttcacagcccaaaggctgaagcaggggatcagctggtcccctgaggagattgaggatgcccggaaaaagatgttcaatacagtcatccagtctgtgcctcagcccacaattacggttctaaataccccactcgtcgccagtgctggcaatgtccagcatctcatccaggccgctcttccaggtcacgttgtggggcagccagagggtacaggagggggacttctggtcactcagccattgatggccaatgggttgcaagcaacaagttcccctctccccctcacggtgacatccgtccccaagcagccaggtgtggcacccattaacactgtgtgttcaaatacaacgtcagctgtgaaggtggtcaatgcggcccagtcgctcctcacggcctgccccagcataacctcccaagccttccttgatgctagcatctacaaaaataagaaatctcatgaacagctgtcagctctgaaagggagcttctgtcggaaccagttcccagggcagagcgaagttgaacatctcacaaaagtgacgggcctcagtaccagagaggtgcggaaatggttcagtgatcgtagataccactgccggaacttgaagggctccagagcgatgatacctggagatcacagttccatcatcattgactctgtgccagaggtgtccttctccccatcgtccaaggtccctgaggtaacctgcattccgacaacagccacactagcaacccacccttctgccaaacgacaatcttggcaccagactcctgacttcacaccaaccaaatacaaggagagagcccctgagcagctcagagccctggagagcagttttgcacaaaaccctcttcctcttgatgaggaactggaccgcctgagaagtgaaaccaaaatgacccgacgagaaattgatagctggttttcagagagacggaaaaaagtgaatgctgaggagaccaagaaggctgaggagaatgcctctcaggaggaagaggaggctgctgaggatgagggtggagaagaggatttggccagtgagctaagggtctctggtgaaaatggctctctggaaatgcccagcagccatatcttggcagagcgcaaagtcagccccattaaaatcaacctgaagaacctgagggtcactgaagccaatggcaggaacgagattccagggctgggtgcctgtgaccctgaggatgatgagtcaaacaaactggcagagcagctcccaggcaaagtgagctgcaaaaagactgcccagcagcggcacttgctgcggcagctctttgtccagacacagtggccaagcaaccaggactatgactccatcatggcccagacgggtctgccacggccagaggtggtgcgctggtttggagatagcaggtacgcactgaagaacggccaactcaaatggtacgaagactataagcgaggcaacttcccaccagggctactggtcattgcccctggcaaccgggagctcctgcaggactattacatgacacacaagatgctgtatgaagaggacctgcagaacctctgtgacaagacccagatgagctcccagcaggtcaagcagtggtttgctgagaaaatgggggaggagaccagagccgtggcagacacaggcagtgaggaccagggccctggtactggtgagctcacagcagttcacaaagggatgggtgacacctattcagaggtgtctgagaacagtgagtcgtgggagccccgtgtccctgaggccagctcagagccctttgacacatcgagtccccaggctggacgtcagctcgaaacagactgaatttgatctgattaatgtgaaggactggccagtctgggaaaccgcctgccacgtggaagagccaaacccgactctctgctgccacatgccgttcccatgcccggctgctgggcacctgggagagcttccagaatcctcgcagacagcccagagcctgccgctaccctcggcctgcccaccaccaagcaagcagcaagcaagatggggttctcatcagttcttcctcccacaatgtaggacctttcctttaccttccaatggataaaatagttcagagttcatagtcatattcatagacacagaatcaagcttttaacatatacatccacctctatatgttaaataaaacatcagattatcaacactgtcattacgtagaaactttggttagccaagcagtgcattgtcagttacgtcatctctaaaaatgacctgtgtctgttctctggggattgctgggtcacaggtgcccctcaccttccacagtcaggcagggaagttataggcacaaagctacgtctggaacccctttgtgccccctttgtgttcctcaaggaagcagtacctttgaagagatctctgctgcattaagtgatgaccggctacgtttcatgtcaggcttgctttgccttgtgggctactcagtgcagaacctgctgtaaccctcagttcaaaaaatggactggcaatgtgattagcgttggatgctttaccattctctttagttgttaccgtaattctgctttttcatgggagtttgaatcatggaccataacttttcagttatcagatcaactaaagaaacatttgttgttaagcctaatgtgctgacctatgtgcctgcattttttttttaatctagacatgtttggagtgagagaaagatggaaaaaagacatggggtagggacgtaagtggaaatctatagccacagcctgaagctttgaccactgcggttttcagagccctttctccacactcatttcagagcctcctatggtttgggaaggaataacacactggcccattagtaagggtgaaggctggagggatttgttgacttcttggaattatcagaggtagggtggtctttagcacaaagacttgcatgcagagatccctggcagaacacccagagtgcccgtggctcccaccccagggtctggccggtgtgctggatgcatgcccaagggtgctgggcatcactggtccttgtgaggatgcttttaaagttttatatttatgtccccaaacttggaaacaagaactctactttagcctaaccctcatgtccttttttgaattgagaaaattacaggaaatggtgcctttgaaaattagaaaacttgcttacagagctgttctaaatggtaaatcctcaatttccccaagaccggttgctctgagagtagctggtaaagaggggcgaactaaagacctgtccacctgtagctccgctcatttcttagaaaccacctgcttcccagagtgccaagccacaagtaccaggcttcgtgggcacagacacctcctgggctgggcagagtgacagtgctagaagaccccagagagagggcaagggctttgggcaagaagcactggtggtgttttagggaccgtccttctcccctacccagggaactggacctggcagggcaccgtgctcatgtggctccaaggacaagcatggcggtggccccttctgccttccaggagaggtcttgcttttgaaaccaaaatcatgttcttctaaagtgtcatcttctgccctccctgtcccaatagggaccacatcttatttgtctcaaacagggacttgtgagtacttggcaagttttgcagcctatttttgtattcttaatttggggagtaaagatgtttggtctcaaaaacctttgaggaattgccaagaatggcgagtgattgctttccttcagagaacagacacttggaatttctccttttagtgtttatatacgtgcagattaatttatatatatatatatacacacacacatatacagtataaatactcatttgattctcgtaaaacgcgcatctggcgtgtgcagttgagaaacttggtggcacatgggtgttgggggagtagcctgtgttggagggacaccagtgcactaggcagctggggcggcccaggctgaagccatctccgggtgtctgagaaaccacccagtgcctcacctccagatcctgctggcatcacctccagagccctgcatgcactggctgaagagttggtctgtggagaggattttcttggttacttgtattcacggttaatttacaacccaaacagcaaaacacagttggtggacaagttcatgcaggacctacagtgacccagccatgggcactagctcatctttcaggtggaaaagtacagtgctgcctgccctggtatgtttttcttatagatgttagccctgcccaacagccagggctacactacaaaaggcaagaatgcccatgtaaggagcccagcagtctggacagatccttcttcctctgctgttggatgagagtgagtgagtatgctctggaccttatccttgaaagatgatcaaaagcgatgatgagggaggcagtcatcacgcaggtgcttaaagggacattgtaggaggtactcaagggtttgggggcaaaaccctgaatccagccagtcgtgcacagagacacacccacactagcccagtggcagtgggggatgtgggatggcagcagccaggtatgtagccctgtcacaggacagctcactgtggttttgcacactgcctaagggttaaattgtgttgttgccttcagtagaaggcatttgtgggctgcagagttgagagttgggtgaggttagtctctcctgaagaaaaagcctataaaaagtggctaatcttatcccttttctctgtatgcagttggactcgtcagagatagtaaaatcatcttttagtgtttttttgttgctgatgtcttgtacccatttgttttttacatggggttgtagatcgagttctcaaaggtgaaaccagatgatcattctgataaaggaaatttaaatttgatacatatgctttgtatattttgattacttgttttcgtttttgactataaaggagctttttttcttgctcagagtttacctgggagatttcaccagtttgactcaccatttgcagatgtgcttttgtattaaatttaaattttcacatatcacatccattctcaaggtagttatatgctggagaagaaaaatcctctagacacatgaaggcccacatagtcaagtcttccagggcaaagccagcagcccacccaggtcaggtagccagcagggctcagttcccctcactccagacacggaccctcctcttcagggtctcttgacccagcttccttctctccttttacctgagagcacagacctctctcagccagcctgcccagaccacggggggctactcccatgtagtttggggagcacttgatctcagaaaagctccattgtctgagcaaatgggcagttgtggagctcaagcctttctcctgtgctcaagtcccttccccaagcaaggcttcaacctcatctacccaccatgtagttttctctggccatttaagtggggcggcagggacatggttgggccatgccacaccagggctggtgaggcaaccagttttgattttgacagagtggctggaggaaaagtggcaatcaaggtgctgcttggtttgctctgagtgcaaatggaaccaacaggtttctgctgcaatctgtgtgttcccagtgccaggtcacaccaggaggggtggggcagggctaaccaagtggtctctgaactcaccgagcgtctgcacttggttgtgaagttaatgggagtacagagagcgtctggccttggagaggggttgagagcctcctttttggttcttcattcctgagctcttgcctgcccacaaatctgacctctttgaatggggacgcagtccttcaacagagaagtttctatggcaaagaagtttctatttagctctagatccagcagagtcatccattctaactgccctgaagtctagagcaggggagggaacccagaggctggggatgagactaggcagaccctggttaccatatggacaaggacaggggaaagcacccccttcctcaatttctgaaagttctatctttgggttcgcaggactttgaggatgataaagaacatataggtactagcttgttgttgctggtccaaagcttccacagccctgagaatttggctttcgtggctgctctggcagctgagcgaagggaggaaggcagccgctctggtggggactctaggcaccttccctgctgtccacttggataggcggtgagccccagggtactgagaggagcctgagcatttacctgccattagtgcctcttccttcaggagactggcttgaaacgtgtgttcatgtgcgcgtgcacacacacacatgagcacctgtatgtgttaatgaatagtttttcttggttaatgctttttaacttctgttcctttccgtaagtggatgattcaaaattaacgtgacttggctgggcgcagtggctcacacctgtaatcccagcactttgggaggccaagggaggcggatcacctgaggtcaggagttcgagaccagcctgatcggcatggtgaaaccccgtttctactaaaaatacaaaaattagccgggcgtggtggtgcgcgcctgtaatcccagctactcaggaggctgaggaaggagaatcacttgaacccgggaggtggaggttgcagtgagctgagatcgtgccactgcactccagcctgggcgacagagcgaaactccgtctcaaaaaaaaaaaaaaaacttaatgtgactggagttaaaagtgaaatgtcaggttgtttagtcactgaatagagagctacaagtgcttg

SEQ ID NO: 28523 - protein, 956 aa, Homo sapiens; identical to SEQ ID NO: 3915

SEQ ID NO: 28524 - DNA, 8192 bp, Homo sapiens; identical to SEQ ID NO: 3914

SEQ ID NO: 28525 - protein, 956 aa, Homo sapiens; identical to SEQ ID NO: 3915

SEQ ID NO: 28526 - DNA, 498 bp, Homo sapiens
ggatgactctgctggatctagagctaaatagaaacttctttgccatagaaacttctctgttgaaggactgcgtccccattcaaagaggtcagatttgtgggcaggcaagagctcaggaatgaagaaccaaaaaggaggctctcaacccctctccaaggccagacgctctctgtactcccattaacttcacaaccaagtgcagacgctcgaccaactcttcagccagtgcatgcagggctctggaggtgatgccagcaggatctggaggatctcgctctgtaacccaggctctggaatgcagtggcacaaccacggctcactgcagtctcaacctcctgggctcaactgatccccccacttcagcctcctgagtagctgggactacagaggacactggaggtgaagaaggaagctcttgactctcctaaagctgatcccaaagtgaaggctttgaaggccaagaaggcagtgctgaaaggcatccacacagccaccaag

SEQ ID NO: 28527 - protein, 40 aa, Homo sapiens
MPAGSGGSRSVTQALECSGTTTAHCSLNLLGSTDPPTSAS

SEQ ID NO: 28528 - DNA, 3288 bp, Homo sapiens
gtggtgttgcaagatgccagcatggaggcccagcccgctgagaccttgcctgaaggaccccagcaggatctgcccccagaagcatctgctgccagcagtgaggcagcacagaaccccagcagtactgatggctctacactggccaatgggcatcggagcactttagatggctatttatattcctgtaaatactgcgatttcagatcccatgacatgacccaatttgtgggacatatgaactcagagcacacagactttaataaagacccaacctttgtatgcagtgggtgcagttttctggcaaaaacccctgaggggctttccttgcacaatgccacatgtcactccggggaagccagctttgtgtggaacgtggccaagccagacaatcatgtggttgtggagcagagcatccctgagagcaccagcactcctgacctagcgggtgagcccagtgctgaaggggctgatggacaggcagaaatcatcattaccaaaactccaatcatgaagataatgaaaggcaaagctgaagccaaaaaaattcatacactcaaggagaatgtccctagccagcctgtgggtgaggccttaccaaagctgtcgactggagaaatggaggtgagagagggggaccattccttcatcaatggggcagttccagtcagccaggcatctgccagctctgcaaaaaacccccatgccgccaacgggcccctgataggaacagtgccagttttgccagctggcatagcacagttcctctccctccagcagcagcccccagtgcatgcccaacaccatgtccaccagccactgcccacggccaaggcccttcccaaagtgatgatccccctgagcagcattccaacgtacaatgcagccatggactctaacagcttcctgaagaactccttccacaagttcccctaccccaccaaagccgagctctgctatttgactgtggtgaccaagtatccagaagaacagctcaagatctggttcacagcccaaaggctgaagcaggggatcagctggtcccctgaggagattgaggatgcccggaaaaagatgttcaatacagtcatccagtctgtgcctcagcccacaattacggttctaaataccccactcgtcgccagtgctggcaatgtccagcatctcatccaggccgctcttccaggtcacgttgtggggcagccagagggtacaggagggggacttctggtcactcagccattgatggccaatgggttgcaagcaacaagttcccctctccccctcacggtgacatccgtccccaagcagccaggtgtggcacccattaacactgtgtgttcaaatacaacgtcagctgtgaaggtggtcaatgcggcccagtcgctcctcacggcctgccccagcataacctcccaagccttccttgatgctagcatctacaaaaataagaaatctcatgaacagctgtcagctctgaaagggagcttctgtcggaaccagttcccagggcagagcgaagttgaacatctcacaaaagtgacgggcctcagtaccagagaggtgcggaaatggttcagtgatcgtagataccactgccggaacttgaagggctccagagcgatgatacctggagatcacagttccatcatcattgactctgtgccagaggtgtccttctccccatcgtccaaggtccctgaggtaacctgcattccgacaacagccacactagcaacccacccttctgccaaacgacaatcttggcaccagactcctgacttcacaccaaccaaatacaaggagagagcccctgagcagctcagagccctggagagcagttttgcacaaaaccctcttcctcttgatgaggaactggaccgcctgagaagtgaaaccaaaatgacccgacgagaaattgatagctggttttcagagagacggaaaaaagtgaatgctgaggagaccaagaaggctgaggagaatgcctctcaggaggaagaggaggctgctgaggatgagggtggagaagaggatttggccagtgagctaagggtctctggtgaaaatggctctctggaaatgcccagcagccatatcttggcagagcgcaaagtcagccccattaaaatcaacctgaagaacctgagggtcactgaagccaatggcaggaacgagattccagggctgggtgcctgtgaccctgaggatgatgagtcaaacaaactggcagagcagctcccaggcaaagtgagctgcaaaaagactgcccagcagcggcacttgctgcggcagctctttgtccagacacagtggccaagcaaccaggactatgactccatcatggcccagacgggtctgccacggccagaggtggtgcgctggtttggagatagcaggtacgcactgaagaacggccaactcaaatggtacgaagactataagcgaggcaacttcccaccagggctactggtcattgcccctggcaaccgggagctcctgcaggactattacatgacacacaagatgctgtatgaagaggacctgcagaacctctgtgacaagacccagatgagctcccagcaggtcaagcagtggtttgctgagaaaatgggggaggagaccagagccgtggcagacacaggcagtgaggaccagggccctggtactggtgagctcacagcagttcacaaagggatgggtgacacctattcagaggtgtctgagaacagtgagtcgtgggagccccgtgtccctgaggccagctcagagccctttgacacatcgagtccccaggctggacgtcagctcggttcctggtcactgagttcccagcctctcccttccctccttaccctttgacatttgtgttctcattagagaccccatcagagggcagccagaagctcagaaacagactgaatttgatctgattaatgtgaaggactggccagtctgggaaaccgcctgccacgtggaagagccaaacccgactctctgctgccacatgccgttcccatgcccggctgctgggcacctgggagagcttccagaatcctcgcagacagcccagagcctgccgctaccctcggcctgcccaccaccaagcaagcagcaagcaagatggggttctcatcagttcttcctcccacaatgtaggacctttcctttaccttccaatggataaaatagttcagagttcatagtcatattcatagacacagaatcaagcttttaacatatacatccacctctatatgttaaataaaacatcagattatcaacactgtc

SEQ ID NO: 28529 - protein, 945 aa, Homo sapiens
MEAQPAETLPEGPQQDLPPEASAASSEAAQNPSSTDGSTLANGHRSTLDGYLYSCKYCDFRSHDMTQFVGHMNSEHTDFNKDPTFVCSGCSFLAKTPEGLSLHNATCHSGEASFVWNVAKPDNHVVVEQSIPESTSTPDLAGEPSAEGADGQAEIIITKTPIMKIMKGKAEAKKIHTLKENVPSQPVGEALPKLSTGEMEVREGDHSFINGAVPVSQASASSAKNPHAANGPLIGTVPVLPAGIAQFLSLQQQPPVHAQHHVHQPLPTAKALPKVMIPLSSIPTYNAAMDSNSFLKNSFHKFPYPTKAELCYLTVVTKYPEEQLKIWFTAQRLKQGISWSPEEIEDARKKMFNTVIQSVPQPTITVLNTPLVASAGNVQHLIQAALPGHVVGQPEGTGGGLLVTQPLMANGLQATSSPLPLTVTSVPKQPGVAPINTVCSNTTSAVKVVNAAQSLLTACPSITSQAFLDASIYKNKKSHEQLSALKGSFCRNQFPGQSEVEHLTKVTGLSTREVRKWFSDRRYHCRNLKGSRAMIPGDHSSIIIDSVPEVSFSPSSKVPEVTCIPTTATLATHPSAKRQSWHQTPDFTPTKYKERAPEQLRALESSFAQNPLPLDEELDRLRSETKMTRREIDSWFSERRKKVNAEETKKAEENASQEEEEAAEDEGGEEDLASELRVSGENGSLEMPSSHILAERKVSPIKINLKNLRVTEANGRNEIPGLGACDPEDDESNKLAEQLPGKVSCKKTAQQRHLLRQLFVQTQWPSNQDYDSIMAQTGLPRPEVVRWFGDSRYALKNGQLKWYEDYKRGNFPPGLLVIAPGNRELLQDYYMTHKMLYEEDLQNLCDKTQMSSQQVKQWFAEKMGEETRAVADTGSEDQGPGTGELTAVHKGMGDTYSEVSENSESWEPRVPEASSEPFDTSSPQAGRQLGSWSLSSQPLPSLLTL

SEQ ID NO: 28530 - DNA, 1312 bp, Homo sapiens
gtgaaaagacctagatggtagaaggcaagcagtggaatgtgtctgggtatccgagaaatatacagaaagcacttaagagaacttaatcatttttttctccctttccttagattgaatagggaaaacctgctttctgcaaacaactgaaaaagctgcatttagaaactgtttctttggccctcatcgagaagctggaacttgtattgttaggccccttatgggacaagctctcaactgctgatcacccagtgattgtcaccatggccagcaagaggaaatccaccacaccatgcatgatcccagtgaagactgtggtgttgcaagatgccagcatggaggcccagcccgctgagaccttgcctgaaggaccccagcaggatctgcccccagaagcatctgctgccagcagtgaggcagcacagaaccccagcagtactgatggctctacactggccaatgggcatcggagcactttagatggctatttatattcctgtaaatactgcgatttcagatcccatgacatgacccaatttgtgggacatatgaactcagagcacacagactttaataaagacccaacctttgtatgcagtgggtgcagttttctggcaaaaacccctgaggggctttccttgcacaatgccacatgtcactccggggaagccagctttgtgtggaacgtggccaagccagacaatcatgtggttgtggagcagagcatccctgagagcaccagcactcctgacctagcgggtgagcccagtgctgaaggggctgatggacaggcagaaatcatcattaccaaaactccaatcatgaagataatgaaaggcaaagctgaagccaaaaaaattcatacactcaaggagaatgtccctagccagcctgtgggtgaggccttaccaaagctgtcgactggagaaatggagaaacagactgaatttgatctgattaatgtgaaggactggccagtctgggaaaccgcctgccacgtggaagagccaaacccgactctctgctgccacatgccgttcccatgcccggctgctgggcacctgggagagcttccagaatcctcgcagacagcccagagcctgccgctaccctcggcctgcccaccaccaagcaagcagcaagcaagatggggttctcatcagttcttcctcccacaatgtaggacctttcctttaccttccaatggataaaatagttcagagttcatagtcatattcatagacacagaatcaagcttttaacatatacatccacctctatatgttaaataaaacatcagattatcaacactgtc

SEQ ID NO: 28531 - protein, 315 aa, Homo sapiens; identical to SEQ ID NO: 28519

SEQ ID NO: 28532 - DNA, 861 bp, Homo sapiens
gtgaaaagacctagatggtagaaggcaagcagtggaatgtgtctgggtatccgagaaatatacagaaagcacttaagagaacttaatcatttttttctccctttccttagattgaatagggaaaacctgctttctgcaaacaactgaaaaagctgcatttagaaactgtttctttggccctcatcgagaagctggaacttgtattgttaggccccttatgggacaagctctcaactgctgatcacccagtgattgtcaccatggccagcaagaggaaatccaccacaccatgcatgatcccagtgaagactgtggtgttgcaagatgccagcatggaggcccagcccgctgagaccttgcctgaaggaccccagcaggatctgcccccagaagcatctgctgccagcagtgaggcagcacagaaccccagcagtatcagagccctttgacacatcgagtccccaggctggacgtcagctcgaaacagactgaatttgatctgattaatgtgaaggactggccagtctgggaaaccgcctgccacgtggaagagccaaacccgactctctgctgccacatgccgttcccatgcccggctgctgggcacctgggagagcttccagaatcctcgcagacagcccagagcctgccgctaccctcggcctgcccaccaccaagcaagcagcaagcaagatggggttctcatcagttcttcctcccacaatgtaggacctttcctttaccttccaatggataaaatagttcagagttcatagtcatattcatagacacagaatcaagcttttaacatatacatccacctctatatgttaaataaaacatcagattatcaacactgtc

SEQ ID NO: 28533 - protein, 62 aa, Homo sapiens; identical to SEQ ID NO: 28521

SEQ ID NO: 28534 - DNA, 3479 bp, Homo sapiens
ggaagttctttccagctctggacaggaaaacatgaaaacagatgatcccaaggaggactgaaatgcaactgcagaagcaacatgtgaccttttagagatgcttgtgggactgcataaagtgaagagggaaactggaaaaaaacaatgaagctaatcccgaactcctggcctcaaatgatcttcctaccttggcttcccaaagtgctgggattacagacgtgagctgctgtgcctggccaagacttaattttgaatgacattgggactattgccaaaaatcaaatccatcttcatgttgtccacttctcagccttaattgaatagggaaaacctgctttctgcaaacaactgaaaaagctgcatttagaaactgtttctttggccctcatcgagaagctggaacttgtattgttaggccccttatgggacaagctctcaactgctgatcacccagtgattgtcaccatggccagcaagaggaaatccaccacaccatgcatgatcccagtgaagactgtggtgttgcaagatgccagcatggaggcccagcccgctgagaccttgcctgaaggaccccagcaggatctgcccccagaagcatctgctgccagcagtgaggcagcacagaaccccagcagtactgatggctctacactggccaatgggcatcggagcactttagatggctatttatattcctgtaaatactgcgatttcagatcccatgacatgacccaatttgtgggacatatgaactcagagcacacagactttaataaagacccaacctttgtatgcagtgggtgcagttttctggcaaaaacccctgaggggctttccttgcacaatgccacatgtcactccggggaagccagctttgtgtggaacgtggccaagccagacaatcatgtggttgtggagcagagcatccctgagagcaccagcactcctgacctagcgggtgagcccagtgctgaaggggctgatggacaggcagaaatcatcattaccaaaactccaatcatgaagataatgaaaggcaaagctgaagccaaaaaaattcatacactcaaggagaatgtccctagccagcctgtgggtgaggccttaccaaagctgtcgactggagaaatggaggtgagagagggggaccattccttcatcaatggggcagttccagtcagccaggcatctgccagctctgcaaaaaacccccatgccgccaacgggcccctgataggaacagtgccagttttgccagctggcatagcacagttcctctccctccagcagcagcccccagtgcatgcccaacaccatgtccaccagccactgcccacggccaaggcccttcccaaagtgatgatccccctgagcagcattccaacgtacaatgcagccatggactctaacagcttcctgaagaactccttccacaagttcccctaccccaccaaagccgagctctgctatttgactgtggtgaccaagtatccagaagaacagctcaagatctggttcacagcccaaaggctgaagcaggggatcagctggtcccctgaggagattgaggatgcccggaaaaagatgttcaatacagtcatccagtctgtgcctcagcccacaattacggttctaaataccccactcgtcgccagtgctggcaatgtccagcatctcatccaggccgctcttccaggtcacgttgtggggcagccagagggtacaggagggggacttctggtcactcagccattgatggccaatgggttgcaagcaacaagttcccctctccccctcacggtgacatccgtccccaagcagccaggtgtggcacccattaacactgtgtgttcaaatacaacgtcagctgtgaaggtggtcaatgcggcccagtcgctcctcacggcctgccccagcataacctcccaagccttccttgatgctagcatctacaaaaataagaaatctcatgaacagctgtcagctctgaaagggagcttctgtcggaaccagttcccagggcagagcgaagttgaacatctcacaaaagtgacgggcctcagtaccagagaggtgcggaaatggttcagtgatcgtagataccactgccggaacttgaagggctccagagcgatgatacctggagatcacagttccatcatcattgactctgtgccagaggtgtccttctccccatcgtccaaggtccctgaggtaacctgcattccgacaacagccacactagcaacccacccttctgccaaacgacaatcttggcaccagactcctgacttcacaccaaccaaatacaaggagagagcccctgagcagctcagagccctggagagcagttttgcacaaaaccctcttcctcttgatgaggaactggaccgcctgagaagtgaaaccaaaatgacccgacgagaaattgatagctggttttcagagagacggaaaaaagtgaatgctgaggagaccaagaaggctgaggagaatgcctctcaggaggaagaggaggctgctgaggatgagggtggagaagaggatttggccagtgagctaagggtctctggtgaaaatggctctctggaaatgcccagcagccatatcttggcagagcgcaaagtcagccccattaaaatcaacctgaagaacctgagggtcactgaagccaatggcaggaacgagattccagggctgggtgcctgtgaccctgaggatgatgagtcaaacaaactggcagagcagctcccaggcaaagtgagctgcaaaaagactgcccagcagcggcacttgctgcggcagctctttgtccagacacagtggccaagcaaccaggactatgactccatcatggcccagacgggtctgccacggccagaggtggtgcgctggtttggagatagcaggtacgcactgaagaacggccaactcaaatggtacgaagactataagcgaggcaacttcccaccagggctactggtcattgcccctggcaaccgggagctcctgcaggactattacatgacacacaagatgctgtatgaagaggacctgcagaacctctgtgacaagacccagatgagctcccagcagaaacagactgaatttgatctgattaatgtgaaggactggccagtctgggaaaccgcctgccacgtggaagagccaaacccgactctctgctgccacatgccgttcccatgcccggctgctgggcacctgggagagcttccagaatcctcgcagacagcccagagcctgccgctaccctcggcctgcccaccaccaagcaagcagcaagcaagatggggttctcatcagttcttcctcccacaatgtaggacctttcctttaccttccaatggataaaatagttcagagttcatagtcatattcatagacacagaatcaagcttttaacatatacatccacctctatatgttaaataaaacatcagattatcaacactgtc

SEQ ID NO: 28535 - protein, 969 aa, Homo sapiens
MASKRKSTTPCMIPVKTVVLQDASMEAQPAETLPEGPQQDLPPEASAASSEAAQNPSSTDGSTLANGHRSTLDGYLYSCKYCDFRSHDMTQFVGHMNSEHTDFNKDPTFVCSGCSFLAKTPEGLSLHNATCHSGEASFVWNVAKPDNHVVVEQSIPESTSTPDLAGEPSAEGADGQAEIIITKTPIMKIMKGKAEAKKIHTLKENVPSQPVGEALPKLSTGEMEVREGDHSFINGAVPVSQASASSAKNPHAANGPLIGTVPVLPAGIAQFLSLQQQPPVHAQHHVHQPLPTAKALPKVMIPLSSIPTYNAAMDSNSFLKNSFHKFPYPTKAELCYLTVVTKYPEEQLKIWFTAQRLKQGISWSPEEIEDARKKMFNTVIQSVPQPTITVLNTPLVASAGNVQHLIQAALPGHVVGQPEGTGGGLLVTQPLMANGLQATSSPLPLTVTSVPKQPGVAPINTVCSNTTSAVKVVNAAQSLLTACPSITSQAFLDASIYKNKKSHEQLSALKGSFCRNQFPGQSEVEHLTKVTGLSTREVRKWFSDRRYHCRNLKGSRAMIPGDHSSIIIDSVPEVSFSPSSKVPEVTCIPTTATLATHPSAKRQSWHQTPDFTPTKYKERAPEQLRALESSFAQNPLPLDEELDRLRSETKMTRREIDSWFSERRKKVNAEETKKAEENASQEEEEAAEDEGGEEDLASELRVSGENGSLEMPSSHILAERKVSPIKINLKNLRVTEANGRNEIPGLGACDPEDDESNKLAEQLPGKVSCKKTAQQRHLLRQLFVQTQWPSNQDYDSIMAQTGLPRPEVVRWFGDSRYALKNGQLKWYEDYKRGNFPPGLLVIAPGNRELLQDYYMTHKMLYEEDLQNLCDKTQMSSQQKQTEFDLINVKDWPVWETACHVEEPNPTLCCHMPFPCPAAGHLGELPESSQTAQSLPLPSACPPPSKQQARWGSHQFFLPQCRTFPLPSNG

SEQ ID NO: 28536 - DNA, 4145 bp, Homo sapiens
agccgtcaaaggcagcaaatagactgaatgaaagatgagcttctgcctttatatccttctctcctgctacccaactcattgtggtgaaggaaaaagaaaacgcgggtggagactgcactatatgcttaggactgaaatgcaactgcagaagcaacatgtgaccttttagagatgcttgtgggactgcataaagtgaagagggaaactggaaaaaaacaatgaacatttatcaccatccagccactgtagataaatttgattggctgtctccctgccttcccttcacacccagtaccttccctgcctgaaatcctcattgagggcaagaactttatccccaggatctaaaccagtgctggacaatagatgctcatcccttccataggaaacagggaatgtttgtttctgtcttctggtaggagaaggattggtcccacccccagctccagggatggatcttgattgtttaagcccagtcagtgattctaacccatggaccaagaccctgccttggagattggggaacaggtgttggaagggctctattttggcaaagaatggattatttatgtgagcatatttccgcaaagctaatcccgaactcctggcctcaaatgatcttcctaccttggcttcccaaagtgctgggattacagacgtgagctgctgtgcctggccaagacttaattttgaatgacattgggactattgccaaaaatcaaatccatcttcatgttgtccacttctcagccttaattgaatagggaaaacctgctttctgcaaacaactgaaaaagctgcatttagaaactgtttctttggccctcatcgagaagctggaacttgtattgttaggccccttatgggacaagctctcaactgctgatcacccagtgattgtcaccatggccagcaagaggaaatccaccacaccatgcatgatcccagtgaagactgtggtgttgcaagatgccagcatggaggcccagcccgctgagaccttgcctgaaggaccccagcaggatctgcccccagaagcatctgctgccagcagtgaggcagcacagaaccccagcagtactgatggctctacactggccaatgggcatcggagcactttagatggctatttatattcctgtaaatactgcgatttcagatcccatgacatgacccaatttgtgggacatatgaactcagagcacacagactttaataaagacccaacctttgtatgcagtgggtgcagttttctggcaaaaacccctgaggggctttccttgcacaatgccacatgtcactccggggaagccagctttgtgtggaacgtggccaagccagacaatcatgtggttgtggagcagagcatccctgagagcaccagcactcctgacctagcgggtgagcccagtgctgaaggggctgatggacaggcagaaatcatcattaccaaaactccaatcatgaagataatgaaaggcaaagctgaagccaaaaaaattcatacactcaaggagaatgtccctagccagcctgtgggtgaggccttaccaaagctgtcgactggagaaatggaggtgagagagggggaccattccttcatcaatggggcagttccagtcagccaggcatctgccagctctgcaaaaaacccccatgccgccaacgggcccctgataggaacagtgccagttttgccagctggcatagcacagttcctctccctccagcagcagcccccagtgcatgcccaacaccatgtccaccagccactgcccacggccaaggcccttcccaaagtgatgatccccctgagcagcattccaacgtacaatgcagccatggactctaacagcttcctgaagaactccttccacaagttcccctaccccaccaaagccgagctctgctatttgactgtggtgaccaagtatccagaagaacagctcaagatctggttcacagcccaaaggctgaagcaggggatcagctggtcccctgaggagattgaggatgcccggaaaaagatgttcaatacagtcatccagtctgtgcctcagcccacaattacggttctaaataccccactcgtcgccagtgctggcaatgtccagcatctcatccaggccgctcttccaggtcacgttgtggggcagccagagggtacaggagggggacttctggtcactcagccattgatggccaatgggttgcaagcaacaagttcccctctccccctcacggtgacatccgtccccaagcagccaggtgtggcacccattaacactgtgtgttcaaatacaacgtcagctgtgaaggtggtcaatgcggcccagtcgctcctcacggcctgccccagcataacctcccaagccttccttgatgctagcatctacaaaaataagaaatctcatgaacagctgtcagctctgaaagggagcttctgtcggaaccagttcccagggcagagcgaagttgaacatctcacaaaagtgacgggcctcagtaccagagaggtgcggaaatggttcagtgatcgtagataccactgccggaacttgaagggctccagagcgatgatacctggagatcacagttccatcatcattgactctgtgccagaggtgtccttctccccatcgtccaaggtccctgaggtaacctgcattccgacaacagccacactagcaacccacccttctgccaaacgacaatcttggcaccagactcctgacttcacaccaaccaaatacaaggagagagcccctgagcagctcagagccctggagagcagttttgcacaaaaccctcttcctcttgatgaggaactggaccgcctgagaagtgaaaccaaaatgacccgacgagaaattgatagctggttttcagagagacggaaaaaagtgaatgctgaggagaccaagaaggctgaggagaatgcctctcaggaggaagaggaggctgctgaggatgagggtggagaagaggatttggccagtgagctaagggtctctggtgaaaatggctctctggaaatgcccagcagccatatcttggcagagcgcaaagtcagccccattaaaatcaacctgaagaacctgagggtcactgaagccaatggcaggaacgagattccagggctgggtgcctgtgaccctgaggatgatgagtcaaacaaactggcagagcagctcccaggcaaagtgagctgcaaaaagactgcccagcagcggcacttgctgcggcagctctttgtccagacacagtggccaagcaaccaggactatgactccatcatggcccagacgggtctgccacggccagaggtggtgcgctggtttggagatagcaggtacgcactgaagaacggccaactcaaatggtacgaagactataagcgaggcaacttcccaccagggctactggtcattgcccctggcaaccgggagctcctgcaggactattacatgacacacaagatgctgtatgaagaggacctgcagaacctctgtgacaagacccagatgagctcccagcaggtcaagcagtggtttgctgagaaaatgggggaggagaccagagccgtggcagacacaggcagtgaggaccagggccctggtactggtgagctcacagcagttcacaaagggatgggtgacacctattcagaggtgtctgagaacagtgagtcgtgggagccccgtgtccctgaggccagctcagagccctttgacacatcgagtccccaggctggacgtcagctcgaaacagactgaatttgatctgattaatgtgaaggactggccagtctgggaaaccgcctgccacgtggaagagccaaacccgactctctgctgccacatgccgttcccatgcccggctgctgggcacctgggagagcttccagaatcctcgcagacagcccagagcctgccgctaccctcggcctgcccaccaccaagcaagcagcaagcaagatggggttctcatcagttcttcctcccacaatgtaggacctttcctttaccttccaatggataaaatagttcagagttcatagtcatattcatagacacagaatcaagcttttaacatatacatccacctctatatgttaaataaaacatcagattatcaacactgtc

SEQ ID NO: 28537 - protein, 956 aa, Homo sapiens; identical to SEQ ID NO: 3915

SEQ ID NO: 28538 - DNA, 3758 bp, Homo sapiens
agactgaatgaaagatgagcttctgcctttatatccttctctcctgctacccaactcattgtggtgaaggaaaaagaaaacgcgggtggagactgcactatatgcttaggactgaaatgcaactgcagaagcaacatgtgaccttttagagatgcttgtgggactgcataaagtgaagagggaaactggaaaaaaacaatgaatcccttccataggaaacagggaatgtttgtttctgtcttctggtaggagaaggattggtcccacccccagctccagggatggatcttgattgtttaagcccagtcagtgattctaacccatggaccaagaccctgccttggagattggggaacaggtgttggaagggctctattttggcaaagaatggattatttatgtgagcatatttccgcaaaattgaatagggaaaacctgctttctgcaaacaactgaaaaagctgcatttagaaactgtttctttggccctcatcgagaagctggaacttgtattgttaggccccttatgggacaagctctcaactgctgatcacccagtgattgtcaccatggccagcaagaggaaatccaccacaccatgcatgatcccagtgaagactgtggtgttgcaagatgccagcatggaggcccagcccgctgagaccttgcctgaaggaccccagcaggatctgcccccagaagcatctgctgccagcagtgaggcagcacagaaccccagcagtactgatggctctacactggccaatgggcatcggagcactttagatggctatttatattcctgtaaatactgcgatttcagatcccatgacatgacccaatttgtgggacatatgaactcagagcacacagactttaataaagacccaacctttgtatgcagtgggtgcagttttctggcaaaaacccctgaggggctttccttgcacaatgccacatgtcactccggggaagccagctttgtgtggaacgtggccaagccagacaatcatgtggttgtggagcagagcatccctgagagcaccagcactcctgacctagcgggtgagcccagtgctgaaggggctgatggacaggcagaaatcatcattaccaaaactccaatcatgaagataatgaaaggcaaagctgaagccaaaaaaattcatacactcaaggagaatgtccctagccagcctgtgggtgaggccttaccaaagctgtcgactggagaaatggaggtgagagagggggaccattccttcatcaatggggcagttccagtcagccaggcatctgccagctctgcaaaaaacccccatgccgccaacgggcccctgataggaacagtgccagttttgccagctggcatagcacagttcctctccctccagcagcagcccccagtgcatgcccaacaccatgtccaccagccactgcccacggccaaggcccttcccaaagtgatgatccccctgagcagcattccaacgtacaatgcagccatggactctaacagcttcctgaagaactccttccacaagttcccctaccccaccaaagccgagctctgctatttgactgtggtgaccaagtatccagaagaacagctcaagatctggttcacagcccaaaggctgaagcaggggatcagctggtcccctgaggagattgaggatgcccggaaaaagatgttcaatacagtcatccagtctgtgcctcagcccacaattacggttctaaataccccactcgtcgccagtgctggcaatgtccagcatctcatccaggccgctcttccaggtcacgttgtggggcagccagagggtacaggagggggacttctggtcactcagccattgatggccaatgggttgcaagcaacaagttcccctctccccctcacggtgacatccgtccccaagcagccaggtgtggcacccattaacactgtgtgttcaaatacaacgtcagctgtgaaggtggtcaatgcggcccagtcgctcctcacggcctgccccagcataacctcccaagccttccttgatgctagcatctacaaaaataagaaatctcatgaacagctgtcagctctgaaagggagcttctgtcggaaccagttcccagggcagagcgaagttgaacatctcacaaaagtgacgggcctcagtaccagagaggtgcggaaatggttcagtgatcgtagataccactgccggaacttgaagggctccagagcgatgatacctggagatcacagttccatcatcattgactctgtgccagaggtgtccttctccccatcgtccaaggtccctgaggtaacctgcattccgacaacagccacactagcaacccacccttctgccaaacgacaatcttggcaccagactcctgacttcacaccaaccaaatacaaggagagagcccctgagcagctcagagccctggagagcagttttgcacaaaaccctcttcctcttgatgaggaactggaccgcctgagaagtgaaaccaaaatgacccgacgagaaattgatagctggttttcagagagacggaaaaaagtgaatgctgaggagaccaagaaggctgaggagaatgcctctcaggaggaagaggaggctgctgaggatgagggtggagaagaggatttggccagtgagctaagggtctctggtgaaaatggctctctggaaatgcccagcagccatatcttggcagagcgcaaagtcagccccattaaaatcaacctgaagaacctgagggtcactgaagccaatggcaggaacgagattccagggctgggtgcctgtgaccctgaggatgatgagtcaaacaaactggcagagcagctcccaggcaaagtgagctgcaaaaagactgcccagcagcggcacttgctgcggcagctctttgtccagacacagtggccaagcaaccaggactatgactccatcatggcccagacgggtctgccacggccagaggtggtgcgctggtttggagatagcaggtacgcactgaagaacggccaactcaaatggtacgaagactataagcgaggcaacttcccaccagggctactggtcattgcccctggcaaccgggagctcctgcaggactattacatgacacacaagatgctgtatgaagaggacctgcagaacctctgtgacaagacccagatgagctcccagcaggtcaagcagtggtttgctgagaaaatgggggaggagaccagagccgtggcagacacaggcagtgaggaccagggccctggtactggtgagctcacagcagttcacaaagggatgggtgacacctattcagaggtgtctgagaacagtgagtcgtgggagccccgtgtccctgaggccagctcagagccctttgacacatcgagtccccaggctggacgtcagctcggtaaggagtccacaggggccatggctatcctgtgtgggtaaggggaggaggcacttatggttgggcactgaatttactgcacaggggcatctgctgtctctaaggctgcctggcagcagcattaaccgcctggctgcttcagaggacaactagcagcagaagccataggaatataatatgataaacggttgagagctgttttttgtttcatgtgtttttaaaaacctgcgcaggggaaggaacatggtgaccctaaaggggtccaagcttttctagccatttcttagcaataggagaacaggtcaaaacatcctctgagtcgggcagat

SEQ ID NO: 28539 - protein, 44 aa, Homo sapiens
MSFCLYILLSCYPTHCGEGKRKRGWRLHYMLRTEMQLQKQHVTF

SEQ ID NO: 28540 - DNA, 3605 bp, Homo sapiens
aaatagactgaatgaaagatgagcttctgcctttatatccttctctcctgctacccaactcattgtggtgaaggaaaaagaaaacgcgggtggagactgcactatatgcttaggactgaaatgcaactgcagaagcaacatgtgaccttttagagatgcttgtgggactgcataaagtgaagagggaaactggaaaaaaacaatgaagtaaggaaaaaatgaggaaactgagacacagcttaagaattttgcccaaagctacaaagattgaatagggaaaacctgctttctgcaaacaactgaaaaagctgcatttagaaactgtttctttggccctcatcgagaagctggaacttgtattgttaggccccttatgggacaagctctcaactgctgatcacccagtgattgtcaccatggccagcaagaggaaatccaccacaccatgcatgatcccagtgaagactgtggtgttgcaagatgccagcatggaggcccagcccgctgagaccttgcctgaaggaccccagcaggatctgcccccagaagcatctgctgccagcagtgaggcagcacagaaccccagcagtactgatggctctacactggccaatgggcatcggagcactttagatggctatttatattcctgtaaatactgcgatttcagatcccatgacatgacccaatttgtgggacatatgaactcagagcacacagactttaataaagacccaacctttgtatgcagtgggtgcagttttctggcaaaaacccctgaggggctttccttgcacaatgccacatgtcactccggggaagccagctttgtgtggaacgtggccaagccagacaatcatgtggttgtggagcagagcatccctgagagcaccagcactcctgacctagcgggtgagcccagtgctgaaggggctgatggacaggcagaaatcatcattaccaaaactccaatcatgaagataatgaaaggcaaagctgaagccaaaaaaattcatacactcaaggagaatgtccctagccagcctgtgggtgaggccttaccaaagctgtcgactggagaaatggaggtgagagagggggaccattccttcatcaatggggcagttccagtcagccaggcatctgccagctctgcaaaaaacccccatgccgccaacgggcccctgataggaacagtgccagttttgccagctggcatagcacagttcctctccctccagcagcagcccccagtgcatgcccaacaccatgtccaccagccactgcccacggccaaggcccttcccaaagtgatgatccccctgagcagcattccaacgtacaatgcagccatggactctaacagcttcctgaagaactccttccacaagttcccctaccccaccaaagccgagctctgctatttgactgtggtgaccaagtatccagaagaacagctcaagatctggttcacagcccaaaggctgaagcaggggatcagctggtcccctgaggagattgaggatgcccggaaaaagatgttcaatacagtcatccagtctgtgcctcagcccacaattacggttctaaataccccactcgtcgccagtgctggcaatgtccagcatctcatccaggccgctcttccaggtcacgttgtggggcagccagagggtacaggagggggacttctggtcactcagccattgatggccaatgggttgcaagcaacaagttcccctctccccctcacggtgacatccgtccccaagcagccaggtgtggcacccattaacactgtgtgttcaaatacaacgtcagctgtgaaggtggtcaatgcggcccagtcgctcctcacggcctgccccagcataacctcccaagccttccttgatgctagcatctacaaaaataagaaatctcatgaacagctgtcagctctgaaagggagcttctgtcggaaccagttcccagggcagagcgaagttgaacatctcacaaaagtgacgggcctcagtaccagagaggtgcggaaatggttcagtgatcgtagataccactgccggaacttgaagggctccagagcgatgatacctggagatcacagttccatcatcattgactctgtgccagaggtgtccttctccccatcgtccaaggtccctgaggtaacctgcattccgacaacagccacactagcaacccacccttctgccaaacgacaatcttggcaccagactcctgacttcacaccaaccaaatacaaggagagagcccctgagcagctcagagccctggagagcagttttgcacaaaaccctcttcctcttgatgaggaactggaccgcctgagaagtgaaaccaaaatgacccgacgagaaattgatagctggttttcagagagacggaaaaaagtgaatgctgaggagaccaagaaggctgaggagaatgcctctcaggaggaagaggaggctgctgaggatgagggtggagaagaggatttggccagtgagctaagggtctctggtgaaaatggctctctggaaatgcccagcagccatatcttggcagagcgcaaagtcagccccattaaaatcaacctgaagaacctgagggtcactgaagccaatggcaggaacgagattccagggctgggtgcctgtgaccctgaggatgatgagtcaaacaaactggcagagcagctcccaggcaaagtgagctgcaaaaagactgcccagcagcggcacttgctgcggcagctctttgtccagacacagtggccaagcaaccaggactatgactccatcatggcccagacgggtctgccacggccagaggtggtgcgctggtttggagatagcaggtacgcactgaagaacggccaactcaaatggtacgaagactataagcgaggcaacttcccaccagggctactggtcattgcccctggcaaccgggagctcctgcaggactattacatgacacacaagatgctgtatgaagaggacctgcagaacctctgtgacaagacccagatgagctcccagcaggtcaagcagtggtttgctgagaaaatgggggaggagaccagagccgtggcagacacaggcagtgaggaccagggccctggtactggtgagctcacagcagttcacaaagggatgggtgacacctattcagaggtgtctgagaacagtgagtcgtgggagccccgtgtccctgaggccagctcagagccctttgacacatcgagtccccaggctggacgtcagctcggtaaggagtccacaggggccatggctatcctgtgtgggtaaggggaggaggcacttatggttgggcactgaatttactgcacaggggcatctgctgtctctaaggctgcctggcagcagcattaaccgcctggctgcttcagaggacaactagcagcagaagccataggaatataatatgataaacggttgagagctgttttttgtttcatgtgtttttaaaaacctgcgcaggggaaggaacatggtgaccctaaaggggtccaagcttttctagccatttcttagcaataggagaacaggtcaaaacatcctctgagtcgggcagat

SEQ ID NO: 28541 - protein, 44 aa, Homo sapiens; identical to SEQ ID NO: 28539

SEQ ID NO: 28542 - DNA, 3718 bp, Homo sapiens
ggcagcaaatagactgaatgaaagatgagcttctgcctttatatccttctctcctgctacccaactcattgtggtgaaggaaaaagaaaacgcgggtggagactgcactatatgcttaggactgaaatgcaactgcagaagcaacatgtgaccttttagagatgcttgtgggactgcataaagtgaagagggaaactggaaaaaaacaatgaagctaatcccgaactcctggcctcaaatgatcttcctaccttggcttcccaaagtgctgggattacagacgtgagctgctgtgcctggccaagacttaattttgaatgacattgggactattgccaaaaatcaaatccatcttcatgttgtccacttctcagccttaattgaatagggaaaacctgctttctgcaaacaactgaaaaagctgcatttagaaactgtttctttggccctcatcgagaagctggaacttgtattgttaggccccttatgggacaagctctcaactgctgatcacccagtgattgtcaccatggccagcaagaggaaatccaccacaccatgcatgatcccagtgaagactgtggtgttgcaagatgccagcatggaggcccagcccgctgagaccttgcctgaaggaccccagcaggatctgcccccagaagcatctgctgccagcagtgaggcagcacagaaccccagcagtactgatggctctacactggccaatgggcatcggagcactttagatggctatttatattcctgtaaatactgcgatttcagatcccatgacatgacccaatttgtgggacatatgaactcagagcacacagactttaataaagacccaacctttgtatgcagtgggtgcagttttctggcaaaaacccctgaggggctttccttgcacaatgccacatgtcactccggggaagccagctttgtgtggaacgtggccaagccagacaatcatgtggttgtggagcagagcatccctgagagcaccagcactcctgacctagcgggtgagcccagtgctgaaggggctgatggacaggcagaaatcatcattaccaaaactccaatcatgaagataatgaaaggcaaagctgaagccaaaaaaattcatacactcaaggagaatgtccctagccagcctgtgggtgaggccttaccaaagctgtcgactggagaaatggaggtgagagagggggaccattccttcatcaatggggcagttccagtcagccaggcatctgccagctctgcaaaaaacccccatgccgccaacgggcccctgataggaacagtgccagttttgccagctggcatagcacagttcctctccctccagcagcagcccccagtgcatgcccaacaccatgtccaccagccactgcccacggccaaggcccttcccaaagtgatgatccccctgagcagcattccaacgtacaatgcagccatggactctaacagcttcctgaagaactccttccacaagttcccctaccccaccaaagccgagctctgctatttgactgtggtgaccaagtatccagaagaacagctcaagatctggttcacagcccaaaggctgaagcaggggatcagctggtcccctgaggagattgaggatgcccggaaaaagatgttcaatacagtcatccagtctgtgcctcagcccacaattacggttctaaataccccactcgtcgccagtgctggcaatgtccagcatctcatccaggccgctcttccaggtcacgttgtggggcagccagagggtacaggagggggacttctggtcactcagccattgatggccaatgggttgcaagcaacaagttcccctctccccctcacggtgacatccgtccccaagcagccaggtgtggcacccattaacactgtgtgttcaaatacaacgtcagctgtgaaggtggtcaatgcggcccagtcgctcctcacggcctgccccagcataacctcccaagccttccttgatgctagcatctacaaaaataagaaatctcatgaacagctgtcagctctgaaagggagcttctgtcggaaccagttcccagggcagagcgaagttgaacatctcacaaaagtgacgggcctcagtaccagagaggtgcggaaatggttcagtgatcgtagataccactgccggaacttgaagggctccagagcgatgatacctggagatcacagttccatcatcattgactctgtgccagaggtgtccttctccccatcgtccaaggtccctgaggtaacctgcattccgacaacagccacactagcaacccacccttctgccaaacgacaatcttggcaccagactcctgacttcacaccaaccaaatacaaggagagagcccctgagcagctcagagccctggagagcagttttgcacaaaaccctcttcctcttgatgaggaactggaccgcctgagaagtgaaaccaaaatgacccgacgagaaattgatagctggttttcagagagacggaaaaaagtgaatgctgaggagaccaagaaggctgaggagaatgcctctcaggaggaagaggaggctgctgaggatgagggtggagaagaggatttggccagtgagctaagggtctctggtgaaaatggctctctggaaatgcccagcagccatatcttggcagagcgcaaagtcagccccattaaaatcaacctgaagaacctgagggtcactgaagccaatggcaggaacgagattccagggctgggtgcctgtgaccctgaggatgatgagtcaaacaaactggcagagcagctcccaggcaaagtgagctgcaaaaagactgcccagcagcggcacttgctgcggcagctctttgtccagacacagtggccaagcaaccaggactatgactccatcatggcccagacgggtctgccacggccagaggtggtgcgctggtttggagatagcaggtacgcactgaagaacggccaactcaaatggtacgaagactataagcgaggcaacttcccaccagggctactggtcattgcccctggcaaccgggagctcctgcaggactattacatgacacacaagatgctgtatgaagaggacctgcagaacctctgtgacaagacccagatgagctcccagcaggtcaagcagtggtttgctgagaaaatgggggaggagaccagagccgtggcagacacaggcagtgaggaccagggccctggtactggtgagctcacagcagttcacaaagggatgggtgacacctattcagaggtgtctgagaacagtgagtcgtgggagccccgtgtccctgaggccagctcagagccctttgacacatcgagtccccaggctggacgtcagctcggtaaggagtccacaggggccatggctatcctgtgtgggtaaggggaggaggcacttatggttgggcactgaatttactgcacaggggcatctgctgtctctaaggctgcctggcagcagcattaaccgcctggctgcttcagaggacaactagcagcagaagccataggaatataatatgataaacggttgagagctgttttttgtttcatgtgtttttaaaaacctgcgcaggggaaggaacatggtgaccctaaaggggtccaagcttttctagccatttcttagcaataggagaacaggtcaaaacatcctctgagtcgggcagat

SEQ ID NO: 28543 - protein, 44 aa, Homo sapiens; identical to SEQ ID NO: 28539

SEQ ID NO: 28544 - DNA, 3567 bp, Homo sapiens
gtgatagccgtcaaaggcagcaaatagactgaatgaaagatgagcttctgcctttatatccttctctcctgctacccaactcattgtggtgaaggaaaaagaaaacgcgggtggagactgcactatatgcttaggactgaaatgcaactgcagaagcaacatgtgaccttttagagatgcttgtgggactgcataaagtgaagagggaaactggaaaaaaacaatgaaattgaatagggaaaacctgctttctgcaaacaactgaaaaagctgcatttagaaactgtttctttggccctcatcgagaagctggaacttgtattgttaggccccttatgggacaagctctcaactgctgatcacccagtgattgtcaccatggccagcaagaggaaatccaccacaccatgcatgatcccagtgaagactgtggtgttgcaagatgccagcatggaggcccagcccgctgagaccttgcctgaaggaccccagcaggatctgcccccagaagcatctgctgccagcagtgaggcagcacagaaccccagcagtactgatggctctacactggccaatgggcatcggagcactttagatggctatttatattcctgtaaatactgcgatttcagatcccatgacatgacccaatttgtgggacatatgaactcagagcacacagactttaataaagacccaacctttgtatgcagtgggtgcagttttctggcaaaaacccctgaggggctttccttgcacaatgccacatgtcactccggggaagccagctttgtgtggaacgtggccaagccagacaatcatgtggttgtggagcagagcatccctgagagcaccagcactcctgacctagcgggtgagcccagtgctgaaggggctgatggacaggcagaaatcatcattaccaaaactccaatcatgaagataatgaaaggcaaagctgaagccaaaaaaattcatacactcaaggagaatgtccctagccagcctgtgggtgaggccttaccaaagctgtcgactggagaaatggaggtgagagagggggaccattccttcatcaatggggcagttccagtcagccaggcatctgccagctctgcaaaaaacccccatgccgccaacgggcccctgataggaacagtgccagttttgccagctggcatagcacagttcctctccctccagcagcagcccccagtgcatgcccaacaccatgtccaccagccactgcccacggccaaggcccttcccaaagtgatgatccccctgagcagcattccaacgtacaatgcagccatggactctaacagcttcctgaagaactccttccacaagttcccctaccccaccaaagccgagctctgctatttgactgtggtgaccaagtatccagaagaacagctcaagatctggttcacagcccaaaggctgaagcaggggatcagctggtcccctgaggagattgaggatgcccggaaaaagatgttcaatacagtcatccagtctgtgcctcagcccacaattacggttctaaataccccactcgtcgccagtgctggcaatgtccagcatctcatccaggccgctcttccaggtcacgttgtggggcagccagagggtacaggagggggacttctggtcactcagccattgatggccaatgggttgcaagcaacaagttcccctctccccctcacggtgacatccgtccccaagcagccaggtgtggcacccattaacactgtgtgttcaaatacaacgtcagctgtgaaggtggtcaatgcggcccagtcgctcctcacggcctgccccagcataacctcccaagccttccttgatgctagcatctacaaaaataagaaatctcatgaacagctgtcagctctgaaagggagcttctgtcggaaccagttcccagggcagagcgaagttgaacatctcacaaaagtgacgggcctcagtaccagagaggtgcggaaatggttcagtgatcgtagataccactgccggaacttgaagggctccagagcgatgatacctggagatcacagttccatcatcattgactctgtgccagaggtgtccttctccccatcgtccaaggtccctgaggtaacctgcattccgacaacagccacactagcaacccacccttctgccaaacgacaatcttggcaccagactcctgacttcacaccaaccaaatacaaggagagagcccctgagcagctcagagccctggagagcagttttgcacaaaaccctcttcctcttgatgaggaactggaccgcctgagaagtgaaaccaaaatgacccgacgagaaattgatagctggttttcagagagacggaaaaaagtgaatgctgaggagaccaagaaggctgaggagaatgcctctcaggaggaagaggaggctgctgaggatgagggtggagaagaggatttggccagtgagctaagggtctctggtgaaaatggctctctggaaatgcccagcagccatatcttggcagagcgcaaagtcagccccattaaaatcaacctgaagaacctgagggtcactgaagccaatggcaggaacgagattccagggctgggtgcctgtgaccctgaggatgatgagtcaaacaaactggcagagcagctcccaggcaaagtgagctgcaaaaagactgcccagcagcggcacttgctgcggcagctctttgtccagacacagtggccaagcaaccaggactatgactccatcatggcccagacgggtctgccacggccagaggtggtgcgctggtttggagatagcaggtacgcactgaagaacggccaactcaaatggtacgaagactataagcgaggcaacttcccaccagggctactggtcattgcccctggcaaccgggagctcctgcaggactattacatgacacacaagatgctgtatgaagaggacctgcagaacctctgtgacaagacccagatgagctcccagcaggtcaagcagtggtttgctgagaaaatgggggaggagaccagagccgtggcagacacaggcagtgaggaccagggccctggtactggtgagctcacagcagttcacaaagggatgggtgacacctattcagaggtgtctgagaacagtgagtcgtgggagccccgtgtccctgaggccagctcagagccctttgacacatcgagtccccaggctggacgtcagctcggtaaggagtccacaggggccatggctatcctgtgtgggtaaggggaggaggcacttatggttgggcactgaatttactgcacaggggcatctgctgtctctaaggctgcctggcagcagcattaaccgcctggctgcttcagaggacaactagcagcagaagccataggaatataatatgataaacggttgagagctgttttttgtttcatgtgtttttaaaaacctgcgcaggggaaggaacatggtgaccctaaaggggtccaagcttttctagccatttcttagcaataggagaacaggtcaaaacatcctctgagtcgggcagat

SEQ ID NO: 28545 - protein, 44 aa, Homo sapiens; identical to SEQ ID NO: 28539

SEQ ID NO: 28546 - DNA, 511 bp, Homo sapiens
gtcaaaggcagcaaatagactgaatgaaagatgagcttctgcctttatatccttctctcctgctacccaactcattgtggtgaaggaaaaagaaaacgcgggtggagactgcactatatgcttaggactgaaatgcaactgcagaagcaacatgtgaccttttagagatgcttgtgggactgcataaagtgaagagggaaactggaaaaaaacaatgaacatttatcaccatccagccactgtagataaatttgattggctgtctccctgccttcccttcacacccagtaccttccctgcctgaaatcctcattgagggcaagaactttatccccaggatctaaaccagtgctggacaatagatgctcagctaatcccgaactcctggcctcaaatgatcttcctaccttggcttcccaaagtgctgggattacagacgtgagctgctgtgcctggccaagacttaattttgaatgacattgggactattgccaaaaatcaaatccatctt

SEQ ID NO: 28547 - protein, 44 aa, Homo sapiens; identical to SEQ ID NO: 28539

SEQ ID NO: 28548 - DNA, 4701 bp, Homo sapiens
gtagaaggagtggagccgtgctctcaccctgtcttagaggacccggaagcgccaagtgactgagggccgaagacactcacctgtggagcctgtgcacgtaggtagaggcggcggctctgagtccaggagctccagtgggcagctccccagcaccagccatgaactacgtggggcagctggcggagacggtgtttgggacggtgaaggagctgtaccggggcctgaacccagccacactgagcggcggcattgacgtgctggtggtgaagcaggtggacggctcgttccggtgctcacccttccacgtgcgttttggcaagctgggcgtcctgcggtcgcgggagaaggtggtagacattgagctcaatggggagcctgtggacttgcacatgaagcttggggacagcggggaggccttctttgttcaggagctggagagcgatgatgaacatgtgcctcccggcctgtgcacctcacccatcccttgggggggtctgtctggcttcccctcggactcccagctgggcactgccagtgagcctgagggcctcgtcatggcaggcacggcctccactgggcggaggaagaggcgtcgcaggaggaaacccaagcagaaagaggatgcagtggcaactgattctagtccagaggaactggaggcaggcgctgagacagtgtccagttggaagagaagtcttcactgcagcccaaagacatctacccctactcggatggcgagtggcccccccaggccagcctctcagcaggtgagctaacatcccctaagagcgactcggagctggaggtgcggaccccggagcccagtcccctaagagccgagtcccacatgcagtgggcctgggggaggctgcctaaggtggccagagctgagcggcccgagtcctcagtggtccttgaaggcagagctggggcaacctctcctcctcggggaggacccagcactccctctacctctgtggctggcggcgtggaccctttgggactcccaatccagcaaacagaggctggtgccgaccttcagcctgacacagaggatcccactctagtgggtccccctctccacaccccagagacagaggaaagcaagactcagagctctggggacatgggcctccctcctgcctccaagtcatggagctgggccactctggaggttccagttcccaccgggcagccagagagggtctccagggggaaaggctccccaaagagaagccagcacctgggccccagtgacatctacctggatgacttgccctccctggactctgagaatgcagcgctttacttcccccaaagtgactctgggctgggggccagaagatggagtgaacccagcagtcagaagtccctgagggaccccaaccctgaacatgaacctgaacccactctggacacagtggatacaatagcactgtccctctgtggtggactggctgacagccgggacatctccctaggtatgttcgaccatggccaagcccttttgagggctggtgctgagcccagaggatggggagggcagggaagactgtgagggtggggcagtagaggtgagaggctgggcttccctgcagctctctgccctgtgcagtccacactccgccagcaggggctggaccttcccaagtccccatgaagcaaaatgcttgacgctaagttgtgagttatcctgtgaatcctggggtgggaacaggtgtaaaaaccacaggtagggaggagcactgccaggttacaaagccaaccgacaggaggtgagcagcagagtggggagcaccagggggctggggcagcgggtcacatgggatgtgccagcctcacccctcactctgcctctgtgcccagagaaattcaaccagcacagcgtctcttaccaggacctcaccaaaaaccccggacttttggatgacccaaacctagtggtgaaaatcaatggaaagcattataactgggctgtggctgcccccatgatcctctccctgcaagccttccagaaaaacttgcccaagagcaccatggacaagctggagagggagaagatgccccggaagggtgggcgatggtggttttcctggcgacgcagggacttcctggccgaggagcgcagtgcccagaaggagaagactgcagccaaggagcagcagggggagaagacagaagtcctgagcagtgatgacgatgccccagacagccctgtgatcctggagatcccctccttgccaccctccactccaccctccactcctacctacaagaagtccctccgcctctcctccgatcagatccggcgcctgaacctgcaagaaggtgccaatgatgtggtcttcagcgtgaccactcagtaccagggcacctgccgctgcaaggccaccatctacctgtggaaatgggacgacaaggtggtcatctctgacatcgacggcaccatcaccaagtcagatgctctgggccatatcctgccccagctggggaaagactggacacaccagggcatcaccagtctctatcacaaaatccaactaaatgggtacaagttcctgtactgctcggcgcgggccattggcatggcggacctcaccaaggggtacctgcagtggagaggtgatcgagaagaaaccagaggtgttcaaggtcgcctgcctgagtgacatccagcagctgtttctgccccacggacagcccttctatgctgcctttgggaataggcccaatgatgtctttgcctaccggcaggtgggcctgcctgagtcacgcatcttcacagtcaacccccggggagagctcatccaggagctcataaagaaccacaaatccacgtatgagcggcttggtgaagtggtcgagctcctcttcccacctgtggcccgtggccccagcacagacctggccaaccctgaatacagtaacttctgctactggcgggagccactgcctgctgtggaccttgataccctggactgaacctgccctggctggctcctcctccctggcccggcccaggactggctaggtgtcctggggtataggagggtgggaattggagtgtcatggggcaaacccactgaaggggaaggaggaggctgcaggttggttggcagctagagagactcccccatcttccccgtcatatttttgccagctaagctgcagctgctccaggcgtcagtgtggcactgtcctggggcaattagcttgtcatctgggcccttgcagggttctttttttttttttttttttttttttcctgagacagggtcttgttctgttgcccaggctggagtgcagtggcatgatctctcggctcactgcaacctccgcctcccgggttcaagcgattcacctgcctcagcctcccaagtagctgggattacaggcgtgtaccaccacgcctggctaattttcgtgtttttagtagagatgggttttcaccacattggccaggctggtctcgaactcctgacctcaagtgatttgcccacctcggcctcccaaagtgctgggattacaggcatgagctaccatgccaggcctccttgcagggttttctatgcccttgatatctgtctccctgtcaacctgggaccttgctgtaagtcttgataggacagggagaagagggaggccctaccgaggctcgaggcttcagtgaagggtgacagcagtgggagtgtggtacagcctctggaaggacacagtgttctccccgccccttgtctgggagccaggactgtaccctccgaagccagacatcactgccaacatatcccccttgctggtgccctggcatctcagcacatgacacacacccacacctgcaggctgtggttccggcttggcctgctccccgtccggctgctgccgctgcctctctccagacctcgcttaaggacagtcccaaactcagctggggcaggtgttggcctgaaagtcctcccccagcctctgctggccagcttggtgctcacagctgctgggtaagctcttgcctaaggagctgtgggaagcagggctgatgccccagcaacctctcctcccactgtctttgaagaaagtagctttagaccggctaaaagctttaatccagagcctgccctactctgatagtaccagagtggagggcagaataccaaatgtccaggaaccaaaggcagggctgtggggacctgaagagcagcacagtggggcccgtgctgctgtgggggaaactgaggctgggagcctcagcagagaccggtgtcaagagtctctgggaactgcataggcctgaggaacatgcattttcaagttgtccattgatggtttcgtacctgaatttctcaccttttgtgaacatcttgggagggtgggggttttgcaggggtgttaaaagcaaggcttggagcccctttcctccagctggtggctccttctcagggcctggcctcattcaggccactttgtagagaaatgccctgacctcgcaggaaggatttccccacccccaagtggaaggaagaggacagtgtgggcaccagagggccctggaaacatcttaggggaaggaaaggaaaaggataaatttggagtggggggtctctaaacagattgcctggattccgttctttcctggggttctacagctgcctaagccctcaccttgggggaggatcaaagggaataaagagaactcttggctgagtc

SEQ ID NO: 28549 - protein, 236 aa, Homo sapiens
MQWAWGRLPKVARAERPESSVVLEGRAGATSPPRGGPSTPSTSVAGGVDPLGLPIQQTEAGADLQPDTEDPTLVGPPLHTPETEESKTQSSGDMGLPPASKSWSWATLEVPVPTGQPERVSRGKGSPKRSQHLGPSDIYLDDLPSLDSENAALYFPQSDSGLGARRWSEPSSQKSLRDPNPEHEPEPTLDTVDTIALSLCGGLADSRDISLGMFDHGQALLRAGAEPRGWGGQGRL

SEQ ID NO: 28550 - DNA, 5414 bp, Homo sapiens
gtagaaggagtggagccgtgctctcaccctgtcttagaggacccggaagcgccaagtgactgagggccgaagacactcacctgtggagcctgtgcacgtaggtagaggcggcggctctgagtccaggagctccagtgggcagctccccagcaccagccatgaactacgtggggcagctggcggagacggtgtttgggacggtgaaggagctgtaccggggcctgaacccagccacactgagcggcggcattgacgtgctggtggtgaagcaggtggacggctcgttccggtgctcacccttccacgtgcgttttggcaagctgggcgtcctgcggtcgcgggagaaggtggtagacattgagctcaatggggagcctgtggacttgcacatgaagcttggggacagcggggaggccttctttgttcaggagctggagagcgatgatgaacatgtgcctcccggcctgtgcacctcacccatcccttgggggggtctgtctggcttcccctcggactcccagctgggcactgccagtgagcctgagggcctcgtcatggcaggcacggcctccactgggcggaggaagaggcgtcgcaggaggaaacccaagcagaaagaggatgcagtggcaactgattctagtccagaggaactggaggcaggcgctgagacagtgtccagttggaagagaagtcttcactgcagcccaaagacatctacccctactcggatggcgagtggcccccccaggccagcctctcagcaggtgagctaacatcccctaagagcgactcggagctggaggtgcggaccccggagcccagtcccctaagagccgagtcccacatgcagtgggcctgggggaggctgcctaaggtggccagagctgagcggcccgagtcctcagtggtccttgaaggcagagctggggcaacctctcctcctcggggaggacccagcactccctctacctctgtggctggcggcgtggaccctttgggactcccaatccagcaaacagaggctggtgccgaccttcagcctgacacagaggatcccactctagtgggtccccctctccacaccccagagacagaggaaagcaagactcagagctctggggacatgggcctccctcctgcctccaagtcatggagctgggccactctggaggttccagttcccaccgggcagccagagagggtctccagggggaaaggctccccaaagagaagccagcacctgggccccagtgacatctacctggatgacttgccctccctggactctgagaatgcagcgctttacttcccccaaagtgactctgggctgggggccagaagatggagtgaacccagcagtcagaagtccctgagggaccccaaccctgaacatgaacctgaacccactctggacacagtggatacaatagcactgtccctctgtggtggactggctgacagccgggacatctccctaggtatgttcgaccatggccaagcccttttgagggctggtgctgagcccagaggatggggagggcagggaagactgtgagggtggggcagtagaggtgagaggctgggcttccctgcagctctctgccctgtgcagtccacactccgccagcaggggctggaccttcccaagtccccatgaagcaaaatgcttgacgctaagttgtgagttatcctgtgaatcctggggtgggaacaggtgtaaaaaccacaggtagggaggagcactgccaggttacaaagccaaccgacaggaggtgagcagcagagtggggagcaccagggggctggggcagcgggtcacatgggatgtgccagcctcacccctcactctgcctctgtgcccagagaaattcaaccagcacagcgtctcttaccaggacctcaccaaaaaccccggacttttggatgacccaaacctagtggtgaaaatcaatggaaagcattataactgggctgtggctgcccccatgatcctctccctgcaagccttccagaaaaacttgcccaagagcaccatggacaagctggagagggagaagatgccccggaagggtgggcgatggtggttttcctggcgacgcagggacttcctggccgaggagcgcagtgcccagaaggagaagactgcagccaaggagcagcagggggagaagacagaagtcctgagcagtgatgacgatgccccagacagccctgtgatcctggagatcccctccttgccaccctccactccaccctccactcctacctacaagaagtccctccgcctctcctccgatcagatccggcgcctgaacctgcaagaaggtgccaatgatgtggtcttcagcgtgaccactcagtaccagggcacctgccgctgcaaggccaccatctacctgtggaaatgggacgacaaggtggtcatctctgacatcgacggcaccatcaccaagtcagatgctctgggccatatcctgccccagctggggaaagactggacacaccagggcatcaccagtctctatcacaaaatccaactgtgagtgcctgggctggggctggggctgaggcgaggcccccagctctagagagggagtgacaggacaggacatcttggggaccagcagggcccacaaggcaggctgccagggcaggtgcctggagtgctgagacctctctattggcccgcagttctgggaaaggctcatcccctggggctgtgttctaggatcagggcccacctactggcctgcagccggaggggaggccctctccatcctggtccacccaggcctcaggactctgtgcaccgtccagctgagtccactgcctggccgttctcttcaagtcccctccctgcaaaggttggaacatcagagtcccacagttgggctgggcaggctaaagccagagaaacagatgggggctggctggtctctgatggctctatgccaccctgtcccccactctcagaaatgggtacaagttcctgtactgctcggcgcgggccattggcatggcggacctcaccaaggggtacctgcagtgggtgagcgaggggggctgtagcctccccaagggccccatccttctgtctcccagcagcctcttctctgccctccacaggtaaccacccctacacatacaagcccgtggccccctggtggggaaaggcaggcccactgccaggccagccttagcaggctggcattaagctctcaggtggcaaggagggtggggtcagaccccccatcacctgagcctgccatcccctctggcttcttccctactttggcccccttccctgctgtggttctggccaccccagagaggtgatcgagaagaaaccagaggtgttcaaggtcgcctgcctgagtgacatccagcagctgtttctgccccacggacagcccttctatgctgcctttgggaataggcccaatgatgtctttgcctaccggcaggtgggcctgcctgagtcacgcatcttcacagtcaacccccggggagagctcatccaggagctcataaagaaccacaaatccacgtatgagcggcttggtgaagtggtcgagctcctcttcccacctgtggcccgtggccccagcacagacctggccaaccctgaatacagtaacttctgctactggcgggagccactgcctgctgtggaccttgataccctggactgaacctgccctggctggctcctcctccctggcccggcccaggactggctaggtgtcctggggtataggagggtgggaattggagtgtcatggggcaaacccactgaaggggaaggaggaggctgcaggttggttggcagctagagagactcccccatcttccccgtcatatttttgccagctaagctgcagctgctccaggcgtcagtgtggcactgtcctggggcaattagcttgtcatctgggcccttgcagggttctttttttttttttttttttttttttcctgagacagggtcttgttctgttgcccaggctggagtgcagtggcatgatctctcggctcactgcaacctccgcctcccgggttcaagcgattcacctgcctcagcctcccaagtagctgggattacaggcgtgtaccaccacgcctggctaattttcgtgtttttagtagagatgggttttcaccacattggccaggctggtctcgaactcctgacctcaagtgatttgcccacctcggcctcccaaagtgctgggattacaggcatgagctaccatgccaggcctccttgcagggttttctatgcccttgatatctgtctccctgtcaacctgggaccttgctgtaagtcttgataggacagggagaagagggaggccctaccgaggctcgaggcttcagtgaagggtgacagcagtgggagtgtggtacagcctctggaaggacacagtgttctccccgccccttgtctgggagccaggactgtaccctccgaagccagacatcactgccaacatatcccccttgctggtgccctggcatctcagcacatgacacacacccacacctgcaggctgtggttccggcttggcctgctccccgtccggctgctgccgctgcctctctccagacctcgcttaaggacagtcccaaactcagctggggcaggtgttggcctgaaagtcctcccccagcctctgctggccagcttggtgctcacagctgctgggtaagctcttgcctaaggagctgtgggaagcagggctgatgccccagcaacctctcctcccactgtctttgaagaaagtagctttagaccggctaaaagctttaatccagagcctgccctactctgatagtaccagagtggagggcagaataccaaatgtccaggaaccaaaggcagggctgtggggacctgaagagcagcacagtggggcccgtgctgctgtgggggaaactgaggctgggagcctcagcagagaccggtgtcaagagtctctgggaactgcataggcctgaggaacatgcattttcaagttgtccattgatggtttcgtacctgaatttctcaccttttgtgaacatcttgggagggtgggggttttgcaggggtgttaaaagcaaggcttggagcccctttcctccagctggtggctccttctcagggcctggcctcattcaggccactttgtagagaaatgccctgacctcgcaggaaggatttccccacccccaagtggaaggaagaggacagtgtgggcaccagagggccctggaaacatcttaggggaaggaaaggaaaaggataaatttggagtggggggtctctaaacagattgcctggattccgttctttcctggggttctacagctgcctaagccctcaccttgggggaggatcaaagggaataaagagaactcttggctgagtc

SEQ ID NO: 28551 - protein, 236 aa, Homo sapiens; identical to SEQ ID NO: 28549

SEQ ID NO: 28552 - DNA, 5403 bp, Homo sapiens
gtagaaggagtggagccgtgctctcaccctgtcttagaggacccggaagcgccaagtgactgagggccgaagacactcacctgtggagcctgtgcacgtaggtagaggcggcggctctgagtccaggagctccagtgggcagctccccagcaccagccatgaactacgtggggcagctggcggagacggtgtttgggacggtgaaggagctgtaccggggcctgaacccagccacactgagcggcggcattgacgtgctggtggtgaagcaggtggacggctcgttccggtgctcacccttccacgtgcgttttggcaagctgggcgtcctgcggtcgcgggagaaggtggtagacattgagctcaatggggagcctgtggacttgcacatgaagcttggggacagcggggaggccttctttgttcaggagctggagagcgatgatgaacatgtgcctcccggcctgtgcacctcacccatcccttgggggggtctgtctggcttcccctcggactcccagctgggcactgccagtgagcctgagggcctcgtcatggcaggcacggcctccactgggcggaggaagaggcgtcgcaggaggaaacccaagcagaaagaggatgcagtggcaactgattctagtccagaggaactggaggcaggcgctgagacagtgtccagttggaagagaagtcttcactgcagcccaaagacatctacccctactcggatggcgagtggcccccccaggccagcctctcagcaggtgagctaacatcccctaagagcgactcggagctggaggtgcggaccccggagcccagtcccctaagagccgagtcccacatgcagtgggcctgggggaggctgcctaaggtggccagagctgagcggcccgagtcctcagtggtccttgaaggcagagctggggcaacctctcctcctcggggaggacccagcactccctctacctctgtggctggcggcgtggaccctttgggactcccaatccagcaaacagaggctggtgccgaccttcagcctgacacagaggatcccactctagtgggtccccctctccacaccccagagacagaggaaagcaagactcagagctctggggacatgggcctccctcctgcctccaagtcatggagctgggccactctggaggttccagttcccaccgggcagccagagagggtctccagggggaaaggctccccaaagagaagccagcacctgggccccagtgacatctacctggatgacttgccctccctggactctgagaatgcagcgctttacttcccccaaagtgactctgggctgggggccagaagatggagtgaacccagcagtcagaagtccctgagggaccccaaccctgaacatgaacctgaacccactctggacacagtggatacaatagcactgtccctctgtggtggactggctgacagccgggacatctccctaggtatgttcgaccatggccaagcccttttgagggctggtgctgagcccagaggatggggagggcagggaagactgtgagggtggggcagtagaggtgagaggctgggcttccctgcagctctctgccctgtgcagtccacactccgccagcaggggctggaccttcccaagtccccatgaagcaaaatgcttgacgctaagttgtgagttatcctgtgaatcctggggtgggaacaggtgtaaaaaccacaggtagggaggagcactgccaggttacaaagccaaccgacaggaggtgagcagcagagtggggagcaccagggggctggggcagcgggtcacatgggatgtgccagcctcacccctcactctgcctctgtgcccagagaaattcaaccagcacagcgtctcttaccaggacctcaccaaaaaccccggacttttggatgacccaaacctagtggtgaaaatcaatggaaagcattataactgggctgtggctgcccccatgatcctctccctgcaagccttccagaaaaacttgcccaagagcaccatggacaagctggagagggagaagatgccccggaagggtgggcgatggtggttttcctggcgacgcagggacttcctggccgaggagcgcagtgcccagaaggagaagactgcagccaaggagcagcagggggagaagacagaagtcctgagcagtgatgacgatgccccagacagccctgtgatcctggagatcccctccttgccaccctccactccaccctccactcctacctacaagaagtccctccgcctctcctccgatcagatccggcgcctgaacctgcaagaaggtgccaatgatgtggtcttcagcgtgaccactcagtaccagggcacctgccgctgcaaggccaccatctacctgtggaaatgggacgacaaggtggtcatctctgacatcgacggcaccatcaccaagtcagatgctctgggccatatcctgccccagctggggaaagactggacacaccagggcatcaccagtctctatcacaaaatccaactaaatgggtacaagttcctgtactgctcggcgcgggccattggcatggcggacctcaccaaggggtacctgcagtggagaggtgatcgagaagaaaccagaggtgttcaaggtcgcctgcctgagtgacatccagcagctgtttctgccccacggacagcccttctatgctgcctttgggaataggcccaatgatgtctttgcctaccggcaggtgggcctgcctgagtcacgcatcttcacagtcaacccccggggagagctcatccaggagctcataaagaaccacaaatccacgtatgagcggcttggtgaagtggtcgagctcctcttcccacctgtggcccgtggccccagcacagacctggccaaccctgaatacagtaacttctgctactggcgggagccactgcctgctgtggaccttgataccctggactgaacctgccctggctggctcctcctccctggcccggcccaggactggctaggtgtcctggggtataggagggtgggaattggagtgtcatggggcaaacccactgaaggggaaggaggaggctgcaggttggttggcagctagagagactcccccatcttccccgtcatatttttgccagctaagctgcagctgctccaggcgtcagtgtggcactgtcctggggcaattagcttgtcatctgggcccttgcagggttctttttttttttttttttttttttttcctgagacagggtcttgttctgttgcccaggctggagtgcagtggcatgatctctcggctcactgcaacctccgcctcccgggttcaagcgattcacctgcctcagcctcccaagtagctgggattacaggcgtgtaccaccacgcctggctaattttcgtgtttttagtagagatgggttttcaccacattggccaggctggtctcgaactcctgacctcaagtgatttgcccacctcggcctcccaaagtgctgggattacaggcatgagctaccatgccaggcctccttgcagggttttctatgcccttgatatctgtctccctgtcaacctgggaccttgctgtaagtcttgataggacagggagaagagggaggccctaccgaggctcgaggcttcagtgaagggtgacagcagtgggagtgtggtacagcctctggaaggacacagtgttctccccgccccttgtctgggagccaggactgtaccctccgaagccagacatcactgccaacatatcccccttgctggtgccctggcatctcagcacatgacacacacccacacctgcaggctgtggttccggcttggcctgctccccgtccggctgctgccgctgcctctctccagacctcgcttaaggacagtcccaaactcagctggggcaggtgttggcctgaaagtcctcccccagcctctgctggccagcttggtgctcacagctgctgggtaagctcttgcctaaggagctgtgggaagcagggctgatgccccagcaacctctcctcccactgtctttgaagaaagtagctttagaccggctaaaagctttaatccagagcctgccctactctgatagtaccagagtggagggcagaataccaaatgtccaggaaccaaaggcagggctgtggggacctgaagagcagcacagtggggcccgtgctgctgtgggggaaactgaggctgggagcctcagcagagaccggtgtcaagagtctctgggaactgcataggcctgaggaacatgcattttcaagttgtccattgatggtttcgtacctgaatttctcaccttttgtgaacatcttgggagggtgggggttttgcaggggtgttaaaagcaaggcttggagcccctttcctccagctggtggctccttctcagggcctggcctcattcaggccactttgtagagaaatgccctgacctcgcaggaaggatttccccacccccaagtggaaggaagaggacagtgtgggcaccagagggccctggaaacatcttaggggaaggaaaggaaaaggataaatttggagtggggggtctctaaacagattgcctggattccgttctttcctggggttctacagctgcctaagccctcaccttgggggaggatcaaagggaataaagagaactcttggctgagtctttgtgcttctgttctgtcctgaaggacacgtgaggagccagaaacatctggcagcctctggtccttagttcagatacaacatccatgaagctgccaggtgtgaggagagttccagtgggcatcaccttcctgcacaaacctagtcctgatggctgcgaagagaagccgaggggacaaggaacagaagccaccaagggctgtggactgttgcttgtgggcacagggcaatgcggacaggccactggctgtgggcctgtaggtctctgcacagttgctgaggctggtgctgactgcctgcagggtcctctcaaggccttacatacggacactgatcaaggccagtttgccacagcagctgcccctgccagccatgctcaggccctgcagctggctgtccagacactgatttgctgacagtggaatgtgaactctctcaagtctaccctggccttcaagcatgacatccttgccttgaccgctgtccggaactgtccagtttctgcagcactgtgcatgggttttggtggctgggacagccacgtggaggattccctcagtggcctccttagtgccatttgggctagccagggaaggctggaaggcgctgctggataaggctgggctctggggtgatgttccccgagttggtgggatctaggggttgggtcctggccagcctgtctagttggcttgccctggcc

SEQ ID NO: 28553 - protein, 236 aa, Homo sapiens; identical to SEQ ID NO: 28549

SEQ ID NO: 28554 - DNA, 3046 bp, Homo sapiens
agcctccccaagggccccatccttctgtctcccagcagcctcttctctgccctccacaggtaaccacccctacacatacaagcccgtggccccctggtggggaaaggcaggcccactgccaggccagccttagcaggctggcattaagctctcaggtggcaaggagggtggggtcagaccccccatcacctgagcctgccatcccctctggcttcttccctactttggcccccttccctgctgtggttctggccaccccagagaggtgatcgagaagaaaccagaggtgttcaaggtcgcctgcctgagtgacatccagcagctgtttctgccccacggacagcccttctatgctgcctttgggaataggcccaatgatgtctttgcctaccggcaggtgggcctgcctgagtcacgcatcttcacagtcaacccccggggagagctcatccaggagctcataaagaaccacaaatccacgtatgagcggcttggtgaagtggtcgagctcctcttcccacctgtggcccgtggccccagcacagacctggccaaccctgaatacagtaacttctgctactggcgggagccactgcctgctgtggaccttgataccctggactgaacctgccctggctggctcctcctccctggcccggcccaggactggctaggtgtcctggggtataggagggtgggaattggagtgtcatggggcaaacccactgaaggggaaggaggaggctgcaggttggttggcagctagagagactcccccatcttccccgtcatatttttgccagctaagctgcagctgctccaggcgtcagtgtggcactgtcctggggcaattagcttgtcatctgggcccttgcagggttctttttttttttttttttttttttttcctgagacagggtcttgttctgttgcccaggctggagtgcagtggcatgatctctcggctcactgcaacctccgcctcccgggttcaagcgattcacctgcctcagcctcccaagtagctgggattacaggcgtgtaccaccacgcctggctaattttcgtgtttttagtagagatgggttttcaccacattggccaggctggtctcgaactcctgacctcaagtgatttgcccacctcggcctcccaaagtgctgggattacaggcatgagctaccatgccaggcctccttgcagggttttctatgcccttgatatctgtctccctgtcaacctgggaccttgctgtaagtcttgataggacagggagaagagggaggccctaccgaggctcgaggcttcagtgaagggtgacagcagtgggagtgtggtacagcctctggaaggacacagtgttctccccgccccttgtctgggagccaggactgtaccctccgaagccagacatcactgccaacatatcccccttgctggtgccctggcatctcagcacatgacacacacccacacctgcaggctgtggttccggcttggcctgctccccgtccggctgctgccgctgcctctctccagacctcgcttaaggacagtcccaaactcagctggggcaggtgttggcctgaaagtcctcccccagcctctgctggccagcttggtgctcacagctgctgggtaagctcttgcctaaggagctgtgggaagcagggctgatgccccagcaacctctcctcccactgtctttgaagaaagtagctttagaccggctaaaagctttaatccagagcctgccctactctgatagtaccagagtggagggcagaataccaaatgtccaggaaccaaaggcagggctgtggggacctgaagagcagcacagtggggcccgtgctgctgtgggggaaactgaggctgggagcctcagcagagaccggtgtcaagagtctctgggaactgcataggcctgaggaacatgcattttcaagttgtccattgatggtttcgtacctgaatttctcaccttttgtgaacatcttgggagggtgggggttttgcaggggtgttaaaagcaaggcttggagcccctttcctccagctggtggctccttctcagggcctggcctcattcaggccactttgtagagaaatgccctgacctcgcaggaaggatttccccacccccaagtggaaggaagaggacagtgtgggcaccagagggccctggaaacatcttaggggaaggaaaggaaaaggataaatttggagtggggggtctctaaacagattgcctggattccgttctttcctggggttctacagctgcctaagccctcaccttgggggaggatcaaagggaataaagagaactcttggctgagtctttgtgcttctgttctgtcctgaaggacacgtgaggagccagaaacatctggcagcctctggtccttagttcagatacaacatccatgaagctgccaggtgtgaggagagttccagtgggcatcaccttcctgcacaaacctagtcctgatggctgcgaagagaagccgaggggacaaggaacagaagccaccaagggctgtggactgttgcttgtgggcacagggcaatgcggacaggccactggctgtgggcctgtaggtctctgcacagttgctgaggctggtgctgactgcctgcagggtcctctcaaggccttacatacggacactgatcaaggccagtttgccacagcagctgcccctgccagccatgctcaggccctgcagctggctgtccagacactgatttgctgacagtggaatgtgaactctctcaagtctaccctggccttcaagcatgacatccttgccttgaccgctgtccggaactgtccagtttctgcagcactgtgcatgggttttggtggctgggacagccacgtggaggattccctcagtggcctccttagtgccatttgggctagccagggaaggctggaaggcgctgctggataaggctgggctctggggtgatgttccccgagttggtgggatctaggggttgggtcctggccagcctgtctagttggcttgccctggcc

SEQ ID NO: 28555 - protein, 37 aa, Homo sapiens
MLPLGIGPMMSLPTGRWACLSHASSQSTPGESSSRSS

SEQ ID NO: 28556 - DNA, 345 bp, Homo sapiens
gcctccccaagggccccatccttctgtctcccagcagcctcttctctgccctccacagagaggtgatcgagaagaaaccagaggtgttcaaggtcgcctgcctgagtgacatccagcagctgtttctgccccacggacagcccttctatgctgcctttgggaataggcccaatgatgtctttgcctaccggcaggtgggcctgcctgagtcacgcatcttcacagtcaacccccggggagagctcatccaggagctcataaagaaccacaaatccacgtatgagcggcttggtgaagtggtcgagctcctcttcccacctgtggcccgtggccccagcacagacc

SEQ ID NO: 28557 - protein, 37 aa, Homo sapiens; identical to SEQ ID NO: 28555

SEQ ID NO: 28558 - DNA, 4900 bp, Homo sapiens
cgcctcccctccgcggccccagccgctagcagcgccggccactccgcgggacgcagccgccgcgaagcgccaggcggccgggccagcgagctcgggggccgaaggggaccccgggaccctcggggcgggacccgggccgaccagcggcgggggcggcgcggcgctgcaggcggacacccggcggggggcaccgcgcggggccgggcagaggcgcgggggccgctatgggccgccgccgcctgctcgtctggctgtgcgccgtcgcggcgctgctctcgggggcgcaggccaggggcaccccgctcctggcgcggcctgcgccgcccggtgcctcccgctacagtctctacacgacgggatggcgcccgcggctgcgcccggggccgcacaaggccctctgtgcctatgtggtgcacaggaatgtgacctgcatcctacaggagggagcggagagctacgtaaaggctgaataccggcagtgtagatgggggcccaagtgccccgggacagtcacgtaccgcacagtactcagacccaaatacaaggttggctacaagacagtgacagacctcgcctggcgttgctgtcccggcttcactgggaaacgctgccctgagcacctcacggaccatggggctgcctcaccccagctggagcctgagcctcagattccttcagggcagctggacccaggccccaggcccccttcctacagcagagcagcccccagccctcatggaaggaaaggcccagggctgtttggtgagcggctggaacgcctggagggtgatgtccagcgcctggctcaaacatatggtaccctcagtggcctggtggctagccacgaggatcccaacaggatgactggtggccccagggctcctgctgtccctgtgggctttggggtcatccctgaggggcttgtgggcccaggagacagagccagagggccactaacacctcccttagacgagatcctaagcaaggtgacagaggtgagcaacactcttcagaccaaggtgcagcttctagacaaggtgcatgggctggcacttggccatgaggcccacctgcagcggctgcgggaagccccaccatccccgctcacctccctggccctgctggaggagtacgtggaccgacggctgcaccgactctgggggagcctgctggatggctttgagcagaagctgcaaggcgtccagagtgagtgtgacctgcgggtgcaggaggtacggcggcaatgtgaggagggtcaggccgccagccggaggctgcaccagagccttgatggccgggagctggccctgcgccaggagctgtcacagctgggcagccagctgcagggcctgagcgtgtctggcaggggcagctgctgtgggcaactagccttgatcaatgcccgtatggatggccttgagagggccctgcaggcagtcaccgagacccaaaggggccccggtgccccggccggggatgagcttacgaggctctctgctgccatgctcgagggaggtgtggacgggctgcttgagggtctggagacgctcaatgggacagagggtggagcaaggggatgctgtctgaggttggacatgggggggtggggagtgggcggctttgggaccatgctggaagagcgcgtgcagagcctcgaggagcgcctagcaacattggctggggagctaagccatgacagcgcctctccgggcaggtcagctcggccccttgtacagacagagctggctgtgctagagcaacggttggtctcactggagacttcgtgcaccccgagcaccacctcagccatcctggacagcctcgtggcagaggtgaaggcctggcagagccggagcgaggccctcctacgccaggtggccagccacgcagcactgctccagcagctcaatggcactgtggccgaggtccagggacagctggcagaagggacgggcagctcacttcaaggcgagatcactctgctcaaggtcaatctgaactcagtgagcaagtcgctcacaggcctcagtgactctgtcagccagtactctgatgccttcttggctgccaacacgtccctggatgagcgggaacgcaaggtggaagccgaagtccaggccatccaggagcaggtcagcagccaaggctccaggcttcaggctggccacaggcaggtcctgaacctgcgtggggagctggagcaactcaaggctggtgtggccaaggtggccagtgggctgagccgctgccaggacacagcccagaaacttcagcacacagtgggacactttgaccagcgggtggcacaagtggagggtgcgtgcaggaggctgggcctgctggccgcgggcctggacagcttgcccactgagccactgaggcccagagagggcctgtggagccatgtggaccagctgaatcgtacgctggcccagcacacgcaggacattgcccgcctccgggatgacctactggactgccaggcccagctggctgagcaggtgcggccagggcaagccaactagacaggctggccaggacccaacccctagatcccaccaactcggggaacatcaccccagagcccagccttatccagcagcgccttccagccttccctggctagcccaaatggcactaaggaggccactgagggaatcctccacgtggctgtcccagccaccaaaacccatgcacagtgctgcagaaactggacagttccggacagcggtcaaggcaaggatgtcatgcttgaaggccagggtagacttgagagagttcacattccactgtcagcaaatcagtgtctggacagccagctgcagggcctgagcatggctggcaggggcagctgctgtggcaaactggccttgatcagtgtccgtatgtaaggccttgagaggaccctgcaggcagtcagcaccagcctcagcaactgtgcagagacctacaggcccacagccagtggcctgtccgcattgccctgtgcccacaagcaacagtccacagcccttggtggcttctgttccttgtcccctcggcttctcttcgcagccatcaggactaggtttgtgcaggaaggtgatgcccactggaactctcctcacacctggcagcttcatggatgttgtatctgaactaaggaccagaggctgccagatgtttctggctcctcacgtgtccttcaggacagaacagaagcacaaagactcagccaagagttctctttattccctttgatcctcccccaaggtgagggcttaggcagctgtagaaccccaggaaagaacggaatccaggcaatctgtttagagaccccccactccaaatttatccttttcctttccttcccctaagatgtttccagggccctctggtgcccacactgtcctcttccttccacttgggggtggggaaatccttcctgcgaggtcagggcatttctctacaaagtggcctgaatgaggccaggccctgagaaggagccaccagctggaggaaaggggctccaagccttgcttttaacacccctgcaaaacccccaccctcccaagatgttcacaaaaggtgagaaattcaggtacgaaaccatcaatggacaacttgaaaatgcatgttcctcaggcctatgcagttcccagagactcttgacaccggtctctgctgaggctcccagcctcagtttcccccacagcagcacgggccccactgtgctgctcttcaggtccccacagccctgcctttggttcctggacatttggtattctgccctccactctggtactatcagagtagggcaggctctggattaaagcttttagccggtctaaagctactttcttcaaagacagtgggaggagaggttgctggggcatcagccctgcttcccacagctccttaggcaagagcttacccagcagctgtgagcaccaagctggccagcagaggctgggggaggactttcaggccaacacctgccccagctgagtttgggactgtccttaagcgaggtctggagagaggcagcggcagcagccggacggggagcaggccaagccggaaccacagcctgcaggtgtgggtgtgtgtcatgtgctgagatgccagggcaccagcaagggggatatgttggcagtgatgtctggcttcggagggtacagtcctggctcccagacaaggggcggggagaacactgtgtccttccagaggctgtaccacactcccactgctgtcacccttcactgaagcctcgagcctcggtagggcctccctcttctccctgtcctatcaagacttacagcaaggtcccaggttgacagggagacagatatcaagggcatagaaaaccctgcaaggaggcctggcatggtagctcatgcctgtaatcccagcactttgggaggccgaggtgggcaaatcacttgaggtcaggagttcgagaccagcctggccaatgtggtgaaaacccatctctactaaaaacacgaaaattagccaggcgtggtggtacacgcctgtaatcccagctacttgggaggctgaggcaggtgaatcgcttgaacccgggaggcggaggttgcagtgagccgagagatcatgccactgcactccagcctgggcaacagaacaagaccctgtctcaggaaaaaaaaaaaaaaaaaaaaaaaaagaaccctgcaagggcccagatgacaagctaattgccccaggacagtgccacactgacgcctggagcagctgcagcttagctggcaaaaatatgacggggaagatgggggagtctctctagctgccaaccaacctgcagcctcctccttccccttcagtgggtttgccccatgacactccaattcccaccctcctataccccaggacacctagccagtcctgggccgggcca

SEQ ID NO: 28559 - protein, 766 aa, Homo sapiens; identical to SEQ ID NO: 3917

SEQ ID NO: 28560 - DNA, 1762 bp, Homo sapiens
cctgagacagggtcttgttctgttgcccaggctggagtgcagtggcatgatctctcggctcactgcaacctccgcctcccgggttcaagcgattcacctgcctcagcctcccaagtagctgggattacaggcgtgtaccaccacgcctggctaattttcgtgtttttagtagagatgggttttcaccacattggccaggctggtctcgaactcctgacctcaagtgatttgcccacctcggcctcccaaagtgctgggattacaggcatgagctaccatgccaggcctccttgcagggttttctatgcccttgatatctgtctccctgtcaacctgggaccttgctgtaagtcttgataggacagggagaagagggaggccctaccgaggctcgaggcttcagtgaagggtgacagcagtgggagtgtggtacagcctctggaaggacacagtgttctccccgccccttgtctgggagccaggactgtaccctccgaagccagacatcactgccaacatatcccccttgctggtgccctggcatctcagcacatgacacacacccacacctgcaggctgtggttccggcttggcctgctccccgtccggctgctgccgctgcctctctccagacctcgcttaaggacagtcccaaactcagctggggcaggtgttggcctgaaagtcctcccccagcctctgctggccagcttggtgctcacagctgctgggtaagctcttgcctaaggagctgtgggaagcagggctgatgccccagcaacctctcctcccactgtctttgaagaaagtagctttagaccggctaaaagctttaatccagagcctgccctactctgatagtaccagagtggagggcagaataccaaatgtccaggaaccaaaggcagggctgtggggacctgaagagcagcacagtggggcccgtgctgctgtgggggaaactgaggctgggagcctcagcagagaccggtgtcaagagtctctgggaactgcataggcctgaggatcaaagggaataaagagaactcttggctgagtctttgtgcttctgttctgtcctgaaggacacgtgaggagccagaaacatctggcagcctctggtccttagttcagatacaacatccatgaagctgccaggtgtgaggagagttccagtgggcatcaccttcctgcacaaacctagtcctgatggctgcgaagagaagccgaggggacaaggaacagaagccaccaagggctgtggactgttgcttgtgggcacagggcaatgcggacaggccactggctgtgggcctgtaggtctctgcacagttgctgaggctggtgctgactgcctgcagggtcctctcaaggccttacatacggacactgatcaaggccagtttgccacagcagctgcccctgccagccatgctcaggccctgcagctggctgtccagacactgatttgctgacagtggaatgtgaactctctcaagtctaccctggccttcaagcatgacatccttgccttgaccgctgtccggaactgtccagtttctgcagcactgtgcatgggttttggtggctgggacagccacgtggaggattccctcagtggcctccttagtgccatttgggctagccagggaaggctggaaggcgctgctggataaggctgggctctggggtgatgttccccgagttggtgggatctaggggttgggtcctggccagcctgtctagttggcttgccctggcc

SEQ ID NO: 28561 - protein, 50 aa, Homo sapiens
MSRNQRQGCGDLKSSTVGPVLLWGKLRLGASAETGVKSLWELHRPEDQRE

SEQ ID NO: 28562 - DNA, 1619 bp, Homo sapiens
tcgaactcctgacctcaagtgatttgcccacctcggcctcccaaagtgctgggattacaggcatgagctaccatgccaggcctccttgcagggttttctatgcccttgatatctgtctccctgtcaacctgggaccttgctgtaagtcttgataggacagggagaagagggaggccctaccgaggctcgaggcttcagtgaagggtgacagcagtgggagtgtggtacagcctctggaaggacacagtgttctccccgccccttgtctgggagccaggactgtaccctccgaagccagacatcactgccaacatatcccccttgctggtgccctggcatctcagcacatgacacacacccacacctgcaggctgtggttccggcttggcctgctccccgtccggctgctgccgctgcctctctccagacctcgcttaaggacagtcccaaactcagctggggcaggtgttggcctgaaagtcctcccccagcctctgctggccagcttggtgctcacagctgctgggtaagctcttgcctaaggagctgtgggaagcagggctgatgccccagcaacctctcctcccactgtctttgaagaaagtagctttagaccggctaaaagctttaatccagagcctgccctactctgatagtaccagagtggagggcagaataccaaatgtccaggaaccaaaggcagggctgtggggacctgaagagcagcacagtggggcccgtgctgctgtgggggaaactgaggctgggagcctcagcagagaccggtgtcaagagtctctgggaactgcataggcctgaggaacatgcattttcaagttgtccattgatggtttcgtacctgaatttctcaccttgggggaggatcaaagggaataaagagaactcttggctgagtctttgtgcttctgttctgtcctgaaggacacgtgaggagccagaaacatctggcagcctctggtccttagttcagatacaacatccatgaagctgccaggtgtgaggagagttccagtgggcatcaccttcctgcacaaacctagtcctgatggctgcgaagagaagccgaggggacaaggaacagaagccaccaagggctgtggactgttgcttgtgggcacagggcaatgcggacaggccactggctgtgggcctgtaggtctctgcacagttgctgaggctggtgctgactgcctgcagggtcctctcaaggccttacatacggacactgatcaaggccagtttgccacagcagctgcccctgccagccatgctcaggccctgcagctggctgtccagacactgatttgctgacagtggaatgtgaactctctcaagtctaccctggccttcaagcatgacatccttgccttgaccgctgtccggaactgtccagtttctgcagcactgtgcatgggttttggtggctgggacagccacgtggaggattccctcagtggcctccttagtgccatttgggctagccagggaaggctggaaggcgctgctggataaggctgggctctggggtgatgttccccgagttggtgggatctaggggttgggtcctggccagcctgtctagttggcttgccctggcc

SEQ ID NO: 28563 - protein, 85 aa, Homo sapiens
MSRNQRQGCGDLKSSTVGPVLLWGKLRLGASAETGVKSLWELHRPEEHAFSSCPLMVSYLNFSPWGRIKGNKENSWLSLCASVLS

SEQ ID NO: 28564 - DNA, 3827 bp, Homo sapiens; identical to SEQ ID NO: 3916

SEQ ID NO: 28565 - protein, 766 aa, Homo sapiens; identical to SEQ ID NO: 3917

SEQ ID NO: 28566 - DNA, 3581 bp, Homo sapiens
agccagagaacacaagaaacaaccagtaactccaaagaaaggtcagggtttcaagaacattgtgcccccccggttgactgtgcagagcaagtacctctttggatggaggtcattctagctgaacagttgtcctactccctgccatccttctttccaccttccaagattggacactgcttctcatggggctccttggccctgggctggatcaagaccacaatttattatgtaagacatggggtgaagaatggtcaaggaaagttatggccgtgagtgacatggaattagatgaaaaggctcaagtttgctgaagagagtttaaatttggcttttgctcttggaaacgtcaaaataatcataagaagcacttgtgccttacagagcaaataatccacagagtgtcatattcattttgcaaacagggtcacaacagcagtcaaatagaagcctgaacacccagagagttaacatacagattccataaggataacaagggattgagcatgctggtgggtttttaagtcagatccacattgaaccctgtgacctaccggaggttataagtggaacccggggaaagcagcttttccatacaaaacaacaacaacacaacgacaacaaagaaaaccagactctgctggatgtctataatactcatttgcagtaaggctttcaagatacaggaatttttatagcatttgtattttaaggatttagggcaaatacatttttttttctacttgataaaaagaaaattagtacttaaaaggttcaaaaatatattgattgagttatttttcttacataaataaattatattgatttttaggatttaacagctgaaaaaaccctttctgcttccactggaggcaaaactgaacaaaatgttagttaaatagagagagcagcatttctaagaaatctgtggtcagcattatagaccatctatgctacaaggatgtcattaaataggatttgttcaattactggattcttcttctatgatcagttatagaatttctggtttatatctctgattcataaaactgggactccactttttgaagatacatctgattgatttttttcagtcatgatttaacagacttctttgagatgctcattttaacatttacataatttataatcccaaatgtataaaagacaatgaaaaaagcatcataaataaataatgcaaaatgaaatagttatgtcagacttttggaccttctgataaattagcaaaactgtaacagaaaaagtaaaaaatacagtaaattgtgacaacaaaaagtgaaactggtactagtaacacttgcaacatttccaagggtcctgcgcagccctgcgcccccagagtactgaaccatgagcttacttcaagtctcagagtgtgaactacctgtgaagagtgagaccatcagaagggacgttaacatgaaggtgaaaggacatggggaagtgctgcttaggcagtttctttctcagttcctaaacatggagaagctgaggaagaagagaaaataatgttgacttgcaatgtagtttcgattaactgataatttggaatttgggtccaactgtaagatataaacagaatggagaaattaatggagaagtaacttttcatagctgtattataaagggtggcacacatttgacagcctcagacactcttgatcaaaggacctactagcaagtgtcaaagtgttgggcaactgtcttcttgcaggctccagaaagaaccttattcttggtgaaggaaagcctgaagtgaaaatccattcggtcctggtgctctttaaacacagagaggcaaattaatggctagagaaatctgtaagcgaaccaggtgagagcagagcgctagccgtgtgcttgtgaagcagcgtgtagctctacggagcgcgggtccttgccccacccccgtcgacagcaataactcatggtgggtaaagctttctcgcagcaagaggaatcttttcactggtgagagggatgtatagaaaataatgcctagtcagtcagtatttcttcttgctgcaggtgtctgaaaaaccaccaagggggaaattatattactaccggtaaggtttttgttttttataaagaaatgaatatatgtattttcaaccattagttatatacttctgtctatactactcacttagtaatcatgataaaatagggaaatattttaactcaaaaatatgcaccagcacttcctttttctgtgctttttggttccctgtgacattcttcctgtgcaacccagctcacagaaaaagagctcctctttgtctctgttcttccacccttcaatggtaaaaccctagacagctttcttttgccatttttcctcctcaagtgagtgggaaacttggaagagaagggggtagggcgtgtcaccaagtactgtattaactatgattgctggaatgaactggataacagaatgagaattctgtgcctcctagactaggtagacaacacttatctaatgaagtggtgagaccctgcaactattaacatctgttaccatagttctcagacaggaaatcaggtacgtaatcttacttatggaaacacaggttcttatggaggtgaagtgagggaagtaacaaacctttatgggataagaaacttacaagtcacaataatttcttaaatgaaaaaagttctaattggtgtcgttgttggagtctttgagtgccccctccccagcctgtgccccatgttctctctctgcgggcaaaggggcactgggttcggcacagttctcatcaccgctgggctccctttcacagctgggagcaggctctgggtgggagttggggttgtccccctttgtcttcttcttcttcctcttctggctctccagacctactatttccgagtgtctggcctgctgcatggctggcagagccatgcccataccaggggagaggaacatggatgggtaaatgagtccaggagatactcctgggatgagaaatgggttaaaagccacaggactactagtagttattgcaggttcagactgatcagaaaatggacctggaccaggcttgtcctcagctaaagtgtctgttttcacatcatggctactcggcttgtcttccgcagtcttttcagtcactgccgtaccacttttcgttgtgcttgatagagacgccggagcagtggaagtgcaggtggttgccatgggtggactgaggagtcccccaacaccaaacatctggggcacagcagccatgcctggcagcatcatgggcagcatgctcagggtacttttgacctcttcacctgttggcatcgtggcaaagccagctggaaaccccaccagcccggtgagggggatgcctggcatatttctcatgttctgaagtcctaccaggtccatcccagcaatcagtccattcatgaacagtggccccattccagagggagagtctgccacaatggaaggagccttcaggagttcgctccgaggccgcctccccctcctgcgggggcccgtatctcgaagaataggctcagccagagtgtgattgaacttgttttctggaagaaacccctgg

SEQ ID NO: 28567 - protein, 56 aa, Homo sapiens
MEVILAEQLSYSLPSFFPPSKIGHCFSWGSLALGWIKTTIYYVRHGVKNGQGKLWP

SEQ ID NO: 28568 - DNA, 5363 bp, Homo sapiens
gtattgaggtcattagattaaaaacatttacctttctacactgagaaacaaacccttcttcctcagacgcaaaataatttgtggatcttttatctctatttcggttgtcctgctttattttctctcattataagatgccctccatcttctgtagaactagatagttactaactcattaatggcgcttaatctgcttacagcctggagaaatgagccaggaggtcttgccatttcaaataggaacaaccccgctcctccagggtttcagaagagccactgttgacggcacggcagagcaagatggcagggttgagtgtgcagcggcttttctccggggtagtgaggctctccaagactggggtatgggagaaagaacaggagtcagggctacctgaatgtgatcctggctcttctgcttgacttactgggtgatattgggctacaactgagactcactttgctcctgtgtaaagtggggcaacagcatctaccacggagggttgaagatttacggagatcatgctaagacagtttgttccaaactcaaaggaaatcatttgcaaacaacagaaaaggtcagaaaccgtatacctggccaagagagatcccttttacgctttgtttaatgtttcatgttgtattttgggttttcccatttactggattctgagctccaaaacaggaatcacattttatgttttcttattttaaaagcaataataataactagtacttattgagtgcctactgcttaccatgttcaaggctttacatgattatcttgtttgttcctcacaaccactctgaagatgggctttgttattcccattttataggtgaggaaaataaggctttaaagcattaaataatttccccaagattatccagctagtaagtgacaaagcaggaaaccaaaccaaggacctttttctctaggggctgagaactttactgctaagccatattgcttgggttatgtcttcctcttagactttcaaagtaatctgggaagctgaagtgacacgttctttccctgctcaatcctgcaagcttttaagaagtcttttaccttttttagatgtgcaacaccatagtttctctataatgatcatagaattccaatggaatgaccgataaaaattttcccccttgtcctcagagtatttttttaatttattgatgcaaacacttatttagcatggtcattgttatagaccccattataggcattagtaaaacagaggtaagacaggcattcaaactatagagggtgagtaaattgtggtatggcgttttctttatgtgagagagctaggaaccgagtgctgtggggacaggagctggagcagtgagtgctgcctgggacagtgggcagtggtgacagaggaggaaaactgaatccggcagtcaggatggagttaaagtgtaccaagtggacaagagcgggagaggagtgctcaggtgaagggaacaccaaatcacttgcaagagcttatgtgggcgtgggtcagtggtgtgtgtagggttctaattcaggcaccccagctgagtaatatcagggtggaaataggtggagtgattcaaataacaccttacatgttttctttctttagaaactaattttcattgtgtcgtgattatacatactcgtttttccttcatccaggaagtccatgaagacccagggcaggccaccttgagcaccacacaccctgaggggccagggcctgccacctcggctcctgagccagctacggcagccagcagccaagccgagaaatccattcccagcaagagtctgcttgactggctaaggcagcaggctgactactccttagaagttcctggctttggggcaaatttttcagacaaaccaaagcagaggaggccacgctgtaaagaacctggaaaattagatgtcagctccctgagcggggaagagagagttcctgccatccccaaggagccaggactgagggggtttcttccagaaaacaagttcaatcacactctggctgagcctattcttcgagatacgggcccccgcaggagggggaggcggcctcggagcgaactcctgaaggctccttccattgtggcagactctccctctggaatggggccactgttcatgaatggactgattgctgggatggacctggtaggacttcagaacatgagaaatatgccaggcatccccctcaccgggctggtggggtttccagctggctttgccacgatgccaacaggtgaagaggtcaaaagtaccctgagcatgctgcccatgatgctgccaggcatggctgctgtgccccagatgtttggtgttgggggactcctcagtccacccatggcaaccacctgcacttccactgctccggcgtctctatcaagcacaacgaaaagtggtacggcagtgactgaaaagactgcggaagacaagccgagtagccatgatgtgaaaacagacactttagctgaggacaagcctggtccaggtccattttctgatcagtctgaacctgcaataactactagtagtcctgtggcttttaacccatttctcatcccaggagtatctcctggactcatttacccatccatgttcctctcccctggtatgggcatggctctgccagccatgcagcaggccagacactcggaaatagtaggtctggagagccagaagaggaagaagaagaagacaaagggggacaaccccaactcccacccagagcctgctcccagctgtgaaagggagcccagcggtgatgagaactgtgccgaacccagtgcccctttgcccgcagagagagaacatggggcacaggctggggagggggcactcaaagactccaacaacgacaccaattagaacttttttcatttaagaaattattgtgacttgtaagtttcttatcccataaaggtttgttacttccctcacttcacctccataagaacctgtgtttccataagtaagattacgtacctgatttcctgtctgagaactatggtaacagatgttaatagttgcagggtctcaccacttcattagataagtgttgtctacctagtctaggaggcacagaattctcattctgttatccagttcattccagcaatcatagttaatacagtacttggtgacacgccctacccccttctcttccaagtttcccactcacttgaggaggaaaaatggcaaaagaaagctgtctagggttttaccattgaagggtggaagaacagagacaaagaggagctctttttctgtgagctgggttgcacaggaagaatgtcacagggaaccaaaaagcacagaaaaaggaagtgctggtgcatatttttgagttaaaatatttccctattttatcatgattactaagtgagtagtatagacagaagtatataactaatggttgaaaatacatatattcatttctttataaaaaacaaaaaccttaccggtagtaatataatttcccccttggtggtttttcagacacctgcagcaagaagaaatactgactgactaggcattattttctatacatccctctcaccagtgaaaagattcctcttgctgcgagaaagctttacccaccatgagttattgctgtcgacgggggtggggcaaggacccgcgctccgtagagctacacgctgcttcacaagcacacggctagcgctctgctctcacctggttcgcttacagatttctctagccattaatttgcctctctgtgtttaaagagcaccaggaccgaatggattttcacttcaggctttccttcaccaagaataaggttctttctggagcctgcaagaagacagttgcccaacactttgacacttgctagtaggtcctttgatcaagagtgtctgaggctgtcaaatgtgtgccaccctttataatacagctatgaaaagttacttctccattaatttctccattctgtttatatcttacagttggacccaaattccaaattatcagttaatcgaaactacattgcaagtcaacattattttctcttcttcctcagcttctccatgtttaggaactgagaaagaaactgcctaagcagcacttccccatgtcctttcaccttcatgttaacgtcccttctgatggtctcactcttcacaggtagttcacactctgagacttgaagtaagctcatggttcagtactctgggggcgcagggctgcgcaggacccttggaaatgttgcaagtgttactagtaccagtttcactttttgttgtcacaatttactgtattttttactttttctgttacagttttgctaatttatcagaaggtccaaaagtctgacataactatttcattttgcattatttatttatgatgcttttttcattgtcttttatacatttgggattataaattatgtaaatgttaaaatgagcatctcaaagaagtctgttaaatcatgactgaaaaaaatcaatcagatgtatcttcaaaaagtggagtcccagttttatgaatcagagatataaaccagaaattctataactgatcatagaagaagaatccagtaattgaacaaatcctatttaatgacatccttgtagcatagatggtctataatgctgaccacagatttcttagaaatgctgctctctctatttaactaacattttgttcagttttgcctccagtggaagcagaaagggttttttcagctgttaaatcctaaaaatcaatataatttatttatgtaagaaaaataactcaatcaatatatttttgaaccttttaagtactaattttctttttatcaagtagaaaaaaaaatgtatttgccctaaatccttaaaatacaaatgctataaaaattcctgtatcttgaaagccttactgcaaatgagtattatagacatccagcagagtctggttttctttgttgtcgttgtgttgttgttgttttgtatggaaaagctgctttccccgggttccacttataacctccggtaggtcacagggttcaatgtggatctgacttaaaaacccaccagcatgctcaatcccttgttatccttatggaatctgtatgttaactctctgggtgttcaggcttctatttgactgctgttgtgaccctgtttgcaaaatgaatatgacactctgtggattatttgctctgtaaggcacaagtgcttcttatgattattttgacgtttccaagagcaaaagccaaatttaaactctcttcagcaaacttgagccttttcatctaattccatgtcactcacggccataactttccttgaccattcttcaccccatgtcttacataataaattgtggtcttgatcctggatttaaaaac

SEQ ID NO: 28569 - protein, 252 aa, Homo sapiens [sequence omitted]

SEQ ID NO: 28570 - DNA, 8192 bp, Homo sapiens; identical to SEQ ID NO: 3918

SEQ ID NO: 28571 - protein, 2715 aa, Homo sapiens; identical to SEQ ID NO: 3919

SEQ ID NO: 28572 - DNA, 4942 bp, Homo sapiens
gtattgaggtcattagattaaaaacatttacctttctacactgagaaacaaacccttcttcctcagacgcaaaataatttgtggatcttttatctctatttcggttgtcctgctttattttctctcattataagatgccctccatcttctgtagaactagatagttactaactcattaatggcgcttaatctgcttacagcctggagaaatgagccaggaggtcttgccatttcaaataggaacaaccccgctcctccagggtttcagaagagccactgttgacggcacggcagagcaagatggcagggttgagtgtgcagcggcttttctccggggtagtgaggctctccaagactggggtatgggagaaagaacaggagtcagggctacctgaatgtgatcctggctcttctgcttgacttactgggtgatattgggctacaactgagactcactttgctcctgtgtaaagtggggcaacagcatctaccacggagggttgaagatttacggagatcatgctaagacagtttgttccaaactcaaaggaaatcatttgcaaacaacagaaaaggtcagaaaccgtatacctggccaagagagatcccttttacgctttgtttaatgtttcatgttgtattttgggttttcccatttactggattctgagctccaaaacaggaatcacattttatgttttcttattttaaaagcaataataataactagtacttattgagtgcctactgcttaccatgttcaaggctttacatgattatcttgtttgttcctcacaaccactctgaagatgggctttgttattcccattttataggtgaggaaaataaggctttaaagcattaaataatttccccaagattatccagctagtaagtgacaaagcaggaaaccaaaccaaggacctttttctctaggggctgagaactttactgctaagccatattgcttgggttatgtcttcctcttagactttcaaagtaatctgggaagctgaagtgacacgttctttccctgctcaatcctgcaagcttttaagaagtcttttaccttttttagatgtgcaacaccatagtttctctataatgatcatagaattccaatggaatgaccgataaaaattttcccccttgtcctcagagtatttttttaatttattgatgcaaacacttatttagcatggtcattgttatagaccccattataggcattagtaaaacagaggtaagacaggcattcaaactatagagggtgagtaaattgtggtatggcgttttctttatgtgagagagctaggaaccgagtgctgtggggacaggagctggagcagtgagtgctgcctgggacagtgggcagtggtgacagaggaggaaaactgaatccggcagtcaggatggagttaaagtgtaccaagtggacaagagcgggagaggagtgctcaggtgaagggaacaccaaatcacttgcaagagcttatgtgggcgtgggtcagtggtgtgtgtagggttctaattcaggcaccccagctgagtaatatcagggtggaaataggtggagtgattcaaataacaccttacatgttttctttctttagaaactaattttcattgtgtcgtgattatacatactcgtttttccttcatccaggaagtccatgaagacccagggcaggccaccttgagcaccacacaccctgaggggccagggcctgccacctcggctcctgagccagctacggcagccagcagccaagccgagaaatccattcccagcaagagtctgcttgactggctaaggcagcaggctgactactccttagaagttcctggctttggggcaaatttttcagacaaaccaaagcagaggaggccacgctgtaaagaacctggaaaattagatgtcagctccctgagcggggaagagagagttcctgccatccccaaggagccaggactgagggggtttcttccagaaaacaagttcaatcacactctggctgagcctattcttcgagatacgggcccccgcaggagggggaggcggcctcggagcgaactcctgaaggctccttccattgtggcagactctccctctggaatggggccactgttcatgaatggactgattgctgggatggacctggtaggacttcagaacatgagaaatatgccaggcatccccctcaccgggctggtggggtttccagctggctttgccacgatgccaacaggtgaagaggtcaaaagtaccctgagcatgctgcccatgatgctgccaggcatggctgctgtgccccagatgtttggtgttgggggactcctcagtccacccatggcaaccacctgcacttccactgctccggcgtctctatcaagcacaacgaaaagtggtacggcagtgactgaaaagactgcggaagacaagccgagtagccatgatgtgaaaacagacactttagctgaggacaagcctggtccaggtccattttctgatcagtctgaacctgcaataactactagtagtcctgtggcttttaacccatttctcatcccaggagtatctcctggactcatttacccatccatgttcctctcccctggtatgggcatggctctgccagccatgcagcaggccagacactcggaaatagtaggtctggagagccagaagaggaagaagaagaagacaaagggggacaaccccaactcccacccagagcctgctcccagctgtgaaagggagcccagcggtgatgagaactgtgccgaacccagtgcccctttgcccgcagagagagaacatggggcacaggctggggagggggcactcaaagactccaacaacgacaccaattagaacttttttcatttaagaaattattgtgacttgtaagtttcttatcccataaaggtttgttacttccctcacttcacctccataagaacctgtgtttccataagtaagattacgtacctgatttcctgtctgagaactatggtaacagatgttaatagttgcagggtctcaccacttcattagataagtgttgtctacctagtctaggaggcacagaattctcattctgttatccagttcattccagcaatcatagttaatacagtacttggtgacacgccctacccccttctcttccaagtttcccactcacttgaggaggaaaaatggcaaaagaaagctgtctagggttttaccattgaagggtggaagaacagagacaaagaggagctctttttctgtgagctgggttgcacaggaagaatgtcacagggaaccaaaaagcacagaaaaaggaagtgctggtgcatatttttgagttaaaatatttccctattttatcatgattactaagtgagtagtatagacagaagtatataactaatggttgaaaatacatatattcatttctttataaaaaacaaaaaccttaccggtagtaatataatttcccccttggtggtttttcagacacctgcagcaagaagaaatactgactgactaggcattattttctatacatccctctcaccagtgaaaagattcctcttgctgcgagaaagctttacccaccatgagttattgctgtcgacgggggtggggcaaggacccgcgctccgtagagctacacgctgcttcacaagcacacggctagcgctctgctctcacctggttcgcttacagatttctctagccattaatttgcctctctgtgtttaaagagcaccaggaccgaatggattttcacttcaggctttccttcaccaagaataaggttctttctggagcctgcaagaagacagttgcccaacactttgacacttgctagtaggtcctttgatcaagagtgtctgaggctgtcaaatgtgtgccaccctttataatacagctatgaaaagttacttctccattaatttctccattctgtttatatcttacagttggacccaaattccaaattatcagttaatcgaaactacattgcaagtcaacattattttctcttcttcctcagcttctccatgtttaggaactgagaaagaaactgcctaagcagcacttccccatgtcctttcaccttcatgttaacgtcccttctgatggtctcactcttcacaggtagttcacactctgagacttgaagtaagctcatggttcagtactctgggggcgcagggctgcgcaggacccttggaaatgttgcaagtgttactagtaccagtttcactttttgttgtcacaatttactgtattttttactttttctgttacagttttgctaatttatcagaaggtccaaaagtctgacataactatttcattttgcattatttatttatgatgcttttttcattgtcttttatacatttgggattataaattatgtaaatgttaaaatgagcatctcaaagaagtctgttaaatcatgactgaaaaaaatcaatcagatgtatcttcaaaaagtggagtcccagttttatgaatcagagatataaaccagaaattctataactgatcatagaagaagaatccagtaattgaacaaatcctatttaatgacatccttgtagcatagatggtctataatgctgaccacagatttcttagaaatgctgctctctctatttaactaacattttgttcagttttgcctccagtggaagcagaaagggttttttcagctgttaaatcctaaaaatcaatataatttatttatgtaagaaaaataactcaatcaatatatttttgaaccttttaagtactaattttctttttatcaagtagaaaaaaaaatgtatttgccctaaatccttaaaatacaaatgctataaaaattcctgtatcttgaaagccttactgcaaatgagtattatagacatccagcagagtctggttttctttgttgtc

SEQ ID NO: 28573 - protein, 252 aa, Homo sapiens [sequence omitted]

SEQ ID NO: 28574 - DNA, 8192 bp, Homo sapiens; identical to SEQ ID NO: 3918

SEQ ID NO: 28575 - protein, 2715 aa, Homo sapiens; identical to SEQ ID NO: 3919

SEQ ID NO: 28576 - DNA, 841 bp, Homo sapiens
tgttttcattataagcccttcagcccagtttaacttaaataaaaataataaaagagacaaaccagctctgcctcctttcttgactttatgggctctcatagtaggctctcaataagcagttattggctttaaaaaaagaagaaagagctcactcttcctttctgattaaatctcaaggtggactaggagagaacaagcagacttctatagaacagtgtcttcctttggtgttgtttacgatcaagaaaagaaaacctttgactggacacagttccgcatcatttcccgtttggacaagaagtcggatgagagcctggaacagtatttttatagttttgtggccatgtgccggaatgtctgtcgtctacccacatggaaagatggcggtcccccagataccaccatctacgttgaacccatcactgaggaacgtgctgcaagaactctgtaccgcattgaactgttacggaaagtccgagagcaagtgctcaagtgccctcagctgcatgaacgcctccagctgtgcaggcccagcctctacctcccagtctggtgggagtgtgggaagcatgatcgagacctgctcatcggcactgccaaacatgggctgaaccgcactgactgttacatcatgaacgacccccagctgtccttcctggatgcctatagaaactatgcccagcataaaagatctggcacccaggcaccaggaaatctctgttgcctttaccagaccaactccaagttatatgaatctcttacatattctcaaatgagtaggacttcagagtcccttgaaaatgaacctgaaaatctagtgagagtagaaagcagagatgat

SEQ ID NO: 28577 - protein, 165 aa, Homo sapiens
MCRNVCRLPTWKDGGPPDTTIYVEPITEERAARTLYRIELLRKVREQVLKCPQLHERLQLCRPSLYLPVWWECGKHDRDLLIGTAKHGLNRTDCYIMNDPQLSFLDAYRNYAQHKRSGTQAPGNLCCLYQTNSKLYESLTYSQMSRTSESLENEPENLVRVESRD

SEQ ID NO: 28578 - DNA, 351 bp, Homo sapiens
gcatggttctatcccaaatgtgtcctgaggatacacttatgctttgtgaaaggagtagagaaaagaggactttcttcccagtagtcctctccatttctaggaaagcttagtgatcgaccgacctcgcgtgagaaagcagaccaaacactacaactcgtttgaggaagacgagctcatggagttttcagagttagacagcgactcagacgaaaggcccacgagatccaggcgcctcaatgacaaagccaggcgctacctccgagcggagtgcttccgggtagagaagaacctgctcatctttggctggggccggtggaaggacatcctgactcatggccgattcaagtggca

SEQ ID NO: 28579 - protein, 57 aa, Homo sapiens
MEFSELDSDSDERPTRSRRLNDKARRYLRAECFRVEKNLLIFGWGRWKDILTHGRFK

SEQ ID NO: 28580 - DNA, 414 bp, Homo sapiens
cacaaagtactcatcttctcccagatggtgcgctgcctcgacatcctagaagattacctcatccagagaaggctcaggcccgatgtcaccgcataggccagagcaaagctgtgaaggtgtatcgcctcatcactcgaaattcctacgagcgcgagatgtttgacaaggccagcctaaagctggggctggacaaggctgttcttcaggacatcaaccgaaagggcggcaccaatggggtacagcagctctcaaaaatggaggtggaggacctactccggaaaggtgcttatggagccttaatggatgaagaagatgaaggctccaagttctgtgaagaagacatagaccagattctgcagaggcgaacgcacaccatcaccatccagtctgaggggaaagggtccacttttgcca

SEQ ID NO: 28581 - protein, 85 aa, Homo sapiens
MFDKASLKLGLDKAVLQDINRKGGTNGVQQLSKMEVEDLLRKGAYGALMDEEDEGSKFCEEDIDQILQRRTHTITIQSEGKGSTF

SEQ ID NO: 28582 - DNA, 2477 bp, Homo sapiens
gctgtttgtattttggctgctgcaggagccattttagcccatgtgtcagtctcatatgattggcttttgtaccagttctgtaaatgaagaaactgagacccagggagatcaaataagttgcccaaatcccacaacgcttgtgttcagaacccagatatcttcactcccaagtctacagttgtcaaatttaaaagttttgaatcactccccaatgtctgatgcctctgtcaattttgactacaaatctccatccccatttgactgcagcactgatcaagaagagaaaattgaagatgttgctagtcactgtctgcctcagaaggacctgtatactgctgaagaggaagctgctaccctttttcctaggaaaatgacatcccataatgggatggaggacagtggaggaggaggtactggagtgaagaagaaacggaagaaaaaggagccaggagaccaagagggtgcagcaaagggaagcaaggacagagagcccaagccaaagaggaaacgagaaccgaaagagccaaaggaacccagaaaggccaaggagccgaagaaggccaaggagcacaaggagccgaagcaaaaagatggggcaaagaaggcacggaagccccgggaggcctcgggcaccaaggaggccaaagagaagaggagctgcactgactctgcagccaggacgaagtccaggaaggccagcaaggagcaaggaccaaccccagtggagaaaaagaagaaaggaaaaaggaaaagtgaaactacagtggagagtttagagctggatcagggcctgacgaacccatctctgcggagtcctgaggagtccactgagtctacagacagccagaaacgacgctcgggaaggcaagtaaagcgcagaaaatacaatgaggacctggacttcaaagtggtggatgatgatggggaaacaattgctgttcttggagctggtcgaacatctgcactctcagcctctacactggcctggcaggcggaggagcctccagaagatgatgcaaacatcattgagaagatcctggcatctaagactgtccaggaggttcacccaggagaacctccgttcgacttggagctgttctacgttaagtatagaaatttgtacgtctatttaaagtattctctgtatttgggttttatatgaataaaactttttttctcttgtgactttattatcttctacatcttcagagtcttgcctctaaggcatgacccacaggtcttggctgactcaagtttaccttaggcagtaacgctcaattatagctgcacacagaattacctggagagcttttttaaacctctaaagcctttgctccacccaagaccattggctcagactcagtggggcccaaggattgttgtgtttttaaaaactccttgggcaattctcatatgcaaccagggtagagaaccactctcctgtagcatatgctcttttcccctcttgtatattttcctttctgctacagacccactttcactaatgtgtgttaatgataacctgcccacagctgccctgcctctgttctcagccagtttctctagaagctgcagagagatcagttgcttggaattactccgttttgttttgttttctgttgttgcccttaaggggaaggtctttctaagcccaatctccagcagtttcacaataaaccattttactatttctgtgttaggtggtcaccgtgtttattgaacaccttaaagctcgatcatttgctagttatgtgcttgcctgacaatttgtatgtctttggatagttcctacttacattgtaaatgggccacaatggaagagctcgaaaaggatcctcgcatcgcacagaagatcaagcgatttaggaataaacaagcccagatgaagcacatttttacggaggtgaagcaatatttactgactcatttgactgctgcttttcttgcagcagtaaatactgtgtttacgtttctaagtccaagttaaattcctatacagatctgttgctcaagtcaaattgataaatgtgtgctgatttgcaacaaaactagtctagattcaagtcaaagaaaactatccaccaaagttaaggatcaaaccttataaactgacaactcataacggcgtgcatcttggtctgaatactaataaatagctagagtgagaggaatacgcacacaattcttttgtccctgctccctcaacccactgcaacccaaaaaggacatttcagaaggtcctaaagtttgaatgtaaaaaacaaaacaaatctaaaagtgagagaaagtaaacaaataaataattttatttatgtaaacttgggaatttctaagtattgtacctatagcaagaggaaggactgatggattttaatattaaacaaatctataatgctatatatcagaaaatgccacaaaccttaaccttaatgtgttattcttggaataaagactaaaccctgtaatagagcctacac

SEQ ID NO: 28583 - protein, 373 aa, Homo sapiens
MCQSHMIGFCTSSVNEETETQGDQISCPNPTTLVFRTQISSLPSLQLSNLKVLNHSPMSDASVNFDYKSPSPFDCSTDQEEKIEDVASHCLPQKDLYTAEEEAATLFPRKMTSHNGMEDSGGGGTGVKKKRKKKEPGDQEGAAKGSKDREPKPKRKREPKEPKEPRKAKEPKKAKEHKEPKQKDGAKKARKPREASGTKEAKEKRSCTDSAARTKSRKASKEQGPTPVEKKKKGKRKSETTVESLELDQGLTNPSLRSPEESTESTDSQKRRSGRQVKRRKYNEDLDFKVVDDDGETIAVLGAGRTSALSASTLAWQAEEPPEDDANIIEKILASKTVQEVHPGEPPFDLELFYVKYRNLYVYLKYSLYLGFI

SEQ ID NO: 28584 - DNA, 518 bp, Homo sapiens
gtattttggctgctgcaggagccattttagaaataaatatcttccttcaatagatgaaaatgaaaatacagaaaaaagagaagcagcactgatcaagaagagaaaattgaagatgttgctagtcactgtctgcctcagaaggacctgtatactgctgaagaggaagctgctaccctttttcctaggaaaatgacatcccataatgggatggaggacagtggaggaggaggtactggagtgaagaagaaacggaagaaaaaggagccaggagaccaagagggtgcagcaaagggaagcaaggacagagagcccaagccaaagaggaaacgagaaccgaaagagccaaaggaacccagaaaggccaaggagccgaagaaggccaaggagcacaaggagccgaagcaaaaagatggggcaaagaaggcacggaagccccgggaggcctcgggcaccaaggaggccaaagagaagaggagctgcactgactctgcagccaggacgaagtccaggaaggccag

SEQ ID NO: 28585 - protein, 108 aa, Homo sapiens
MTSHNGMEDSGGGGTGVKKKRKKKEPGDQEGAAKGSKDREPKPKRKREPKEPKEPRKAKEPKKAKEHKEPKQKDGAKKARKPREASGTKEAKEKRSCTDSAARTKSRK

SEQ ID NO: 28586 - DNA, 469 bp, Homo sapiens
agctgtttgtattttggctgctgcaggagccattttaggaatttgtcactgaagaggagtgttggaatacagtgaggacacccttttccccacttttgtctccatggagtaggagtggtcttcctggggcacttaggagttcaggtgtaccctggtacagtaataaccatgaagtgcagagggagaacgcagtcactttttcctttgccaaaatgttcttttctttggttcatgttgtggaggcgttgataccctcatgagaaattctgttacttccataaaagtcctgaagcccatgtgtcagtctcatatgattggcttttgtaccagttctgtaaatgaagaaactgagacccagggagatcaaataagttgcccaaatcccacaacgcttgtgttcagaacccagatatcttcactcccaagtctacaggtaatcactgaagagtccaaatgtcaggcactgagt

SEQ ID NO: 28587 - protein, 70 aa, Homo sapiens
MRNSVTSIKVLKPMCQSHMIGFCTSSVNEETETQGDQISCPNPTTLVFRTQISSLPSLQVITEESKCQAL

SEQ ID NO: 28588 - DNA, 785 bp, Homo sapiens
agtgggatgtgaatggcagcgatgcatcctttgtgagctgaggcttttaagaagctggtgaggcttcctatgctttctttctgcttctgctggctagaaacaaaggacactgaggccctcgggggatggtagagccacaggaagcaccccgggtccttaaatcaacatgcggaggaaagccaacggccagccatggatacttgcattggacttttaagtgaatgagagaacacatgctggctgtgtaaaggaaaagctaattattccctgcattctccaagcttctgcatcccccgccccaccaagataaccagtgttgccagcctgctgaacatttcttcttgcagttctccctgtgagagaaggttgaccctttgggcccggagctcacgcacgcagttgaagatgtccaccaccccttcattctcggccatgtcaagcatggtgtcaatggcaatgaagcagccagtccgcccagccccagcactggaagagagcaaatgggttgacggatggaagcaaagaaggagaggagagagaacagaggggagatgaatgacaggacagaaacgagagtcctctgagctgtccccaagacagagagtggttggtggagcaccacgttcaaaggccggcatctggctccacctgcagctgttttcgcaggatcgtgaagcaagagtgtcatgaaactggagcagctgaccgtccggagacccttgtcagggatcaagtttcttgatacatacttacttgatttctggtcactagtggcttctttagga

SEQ ID NO: 28589 - protein, 49 aa, Homo sapiens
MSTTPSFSAMSSMVSMAMKQPVRPAPALEESKWVDGWKQRRRGERTEGR

SEQ ID NO: 28590 - DNA, 591 bp, Homo sapiens
cagggacacctgcggctccaggtcagagatgcacctgctagtcctgcctctacaggacccaacccatcagttcctagcttgtccttctggtgagaattgagcacactatactgtggacataaagacaaaccttgctggaactgactggtggaatgtagcaggaatcggagggaagctttactcatcattccagtccagggaccaacataggaaattatattaaaattggttcttctctgcttacttccgtcctctagttgcatattcttaatcaggtaaagcatttgttaaccttgtttttaatacttagaggagtgccctggagcctgtctgccctcatgattgtctggagaggtgagaagaccaggagtagtaaaacagaccaaagatttcccaatttctcttggggaagtggctgggattggggatggtggccaatgggagcccaactttattggtaaaattctgattattttatgagaagaatgtatttttgtatcatttgtgtaattaaaaaattaagcaaatgaataatatgaacacttcagttcttaaacattgacaatgtatatactggatgtaataaaacgc

SEQ ID NO: 28591 - protein, 40 aa, Homo sapiens
MIVWRGEKTRSSKTDQRFPNFSWGSGWDWGWWPMGAQLYW

SEQ ID NO: 28592 - DNA, 415 bp, Homo sapiens
caggtgagactcatcttagacccagtcaacctgagctgagaaagacaaagaataggaatagcggaagaaatttacatggctaaagaggaccaacgatgaaattacttttaaaagaacagagaatgctgggagcagtggctcacacctgtaatcccagcactttgggaggccaaggcggacggatcacgagtcaagaggttcctaataatgctggacaacttccagtttggaaatgaccaactccccgggtgttgtctaatcacattgtccaaatgctacgacaacaacttcttgagaaacatccacaaactcaggtgatcttacgcctgagtgaagaatataattgttactctaaaatgtatttggcgtattgaaattatatggtactgcaaaataaagcattctcagaatgata

SEQ ID NO: 28593 - protein, 46 aa, Homo sapiens
MKLLLKEQRMLGAVAHTCNPSTLGGQGGRITSQEVPNNAGQLPVWK

SEQ ID NO: 28594 - DNA, 8192 bp, Homo sapiens
cctcccgcctcagttcgcgccgcgcctcggcttggaacgcaggagcgccggctccgggagcccgagcggagccagccgcgcgcacagccagcggccgcgccggcgatgcggggccaccccgcgcccgccccagtcccggccccggcccccgcgggaaggggctgagctgcccgccgccgcccggatggcgagcctcgccgcgctcgccctcagcctgctcctgaggctgcagctgccgccactgcccggcgcccgggctcagagcgccgcaggtggctgttcctttgatgagcactacagcaactgtggttatagtgtggctctagggaccaatgggttcacctgggagcagattaacacatgggagaaaccaatgctggaccaggcagtgcccacaggatctttcatgatggtgaacagctctgggagagcctctggccagaaggcccaccttctcctgccaaccctgaaggagaatgacacccactgcatcgacttccattactacttctccagccgtgacaggtccagcccaggggccttgaacgtctacgtgaaggtgaatggtggcccccaagggaaccctgtgtggaatgtgtccggggtcgtcactgagggctgggtgaaggcagagctcgccatcagcactttctggccacatttctatcaggtgatatttgaatccgtctcattgaagggtcatcctggctacatcgccgtggacgaggtccgggtccttgctcatccatgcagaaaagcacctcattttctgcgactccaaaacgtggaggtgaatgtggggcagaatgccacatttcagtgcattgctggtgggaagtggtctcagcatgacaagctttggctccagcaatggaatggcagggacacggccctgatggtcacccgtgtggtcaaccacaggcgcttctcagccacagtcagtgtggcagacactgcccagcggagcgtcagcaagtaccgctgtgtgatccgctctgatggtgggtctggtgtgtccaactacgcggagctgatcgtgaaagagcctcccacgcccattgctcccccagagctgctggctgtgggggccacatacctgtggatcaagccaaatgccaactccatcatcggggatggccccatcatcctgaaggaagtggaatatcgcaccaccacaggcacgtgggcagagacccacatagtcgactctcccaactataagctgtggcatctggaccccgatgttgagtatgagatccgagtgctcctcacacgaccaggtgaggggggtacgggaccgccagggcctcccctcaccaccaggaccaagtgtgcagatccggtacatggcccacagaacgtggaaatcgtagacatcagagcccggcagctgaccctgcagtgggagcccttcggctacgcggtgacccgctgccatagctacaacctcaccgtgcagtaccagtatgtgttcaaccagcagcagtacgaggccgaggaggtcatccagacctcctcccactacaccctgcgaggcctgcgccccttcatgaccatccggctgcgactcttgctgtctaaccccgagggccgaatggagagcgaggagctggtggtgcagactgaggaagacgttccaggagctgttcctctagaatccatccaaggggggccctttgaggagaagatctacatccagtggaaacctcccaatgagaccaatggggtcatcacgctctacgagatcaactacaaggctgtcggctcgctggacccaagtgctgacctctcgagccagagggggaaagtgttcaagctccggaatgaaacccaccacctctttgtgggtctgtacccagggaccacctattccttcaccatcaaggccagcacagcaaagggctttgggccccctgtcaccactcggattgccaccaaaatttcagctccatccatgcctgagtacgacacagacaccccattgaatgagacagacacgaccatcacagtgatgctgaaacccgctcagtcccggggagctcctgtcagtgtttatcagctggttgtcaaggaggagcgacttcagaagtcacggagggcagctgacattattgagtgcttttcggtgcccgtgagctatcggaatgcctccagcctcgattctctacactactttgctgctgagttgaagcctgccaacctgcctgtcacccagccatttacagtgggtgacaataagacatacaatggctactggaaccctcctctctctcccctgaaaagctacagcatctacttccaggcactcagcaaagccaatggagagaccaaaatcaactgtgttcgtctggctacaaaaggtgcctccacccagaattctaacactgtggagccagagaagcaggtggacaacaccgtgaagatggctggcgtgatcgctggcctcctcatgttcatcatcattctcctgggcgtgatgctcaccatcaaaaggagaagaaatgcttattcctactcctattacttgaagctggccaagaagcagaaggagacccagagtggagcccagagggagatggggcctgtggcctctgccgacaaacccaccaccaagctcagcgccagccgcaatgatgaaggcttctcttctagttctcaggacgtcaacggattcacagatggcagccgcggggagctttcccagcccaccctcacgatccagactcatccctaccgcacctgtgaccctgtggagatgagctacccccgggaccagttccaacccgccatccgggtggctgacttgctgcagcacatcacgcagatgaagagaggccagggctacgggttcaaggaggaatacgaggccttaccagaggggcagacagcttcgtgggacacagccaaggaggatgaaaaccgcaataagaatcgatatgggaacatcatatcctacgaccattcccgggtgaggctgctggtgctggatggagacccgcactctgactacatcaatgccaactacattgacggataccatcgacctcggcactacattgcgactcaaggtccgatgcaggagactgtaaaggacttttggagaatgatctggcaggagaactccgccagcatcgtcatggtcacaaacctggtggaagtgggcagggtgaaatgtgtgcgatactggccagatgacacggaggtctacggagacattaaagtcaccctgattgaaacagagcccctggcagaatacgtcatacgcaccttcacagtccagaagaaaggctaccatgagatccgggagctccgcctcttccacttcaccagctggcctgaccacggcgttccctgctatgccactggccttctgggcttcgtccgccaggtcaagttcctcaaccccccggaagctgggcccatagtggtccactgcagtgctggggctgggcggactggctgcttcattgccattgacaccatgcttgacatggccgagaatgaaggggtggtggacatcttcaactgcgtgcgtgagctccgggcccaaagggtcaacctggtacagacagaggagcaatatgtgtttgtgcacgatgccatcctggaagcgtgcctctgtggcaacactgccatccctgtgtgtgagttccgttctctctactacaatatcagcaggctggacccccagacaaactccagccaaatcaaagatgaatttcagaccctcaacattgtgacaccccgtgtgcggcccgaggactgcagcattgggctcctgccccggaaccatgataagaatcgaagtatggacgtgctgcctctggaccgctgcctgcccttccttatctcagtggacggagaatccagcaattacatcaacgcagcactgatggatagccacaagcagcctgccgccttcgtggtcacccagcaccctctacccaacaccgtggcagacttctggaggctggtgttcgattacaactgctcctctgtggtgatgctgaatgagatggacactgcccagttctgtatgcagtactggcctgagaagacctccgggtgctatgggcccatccaggtggagttcgtctccgcagacatcgacgaggacatcatccacagaatattccgcatctgtaacatggcccggccacaggatggttatcgtatagtccagcacctccagtacattggctggcctgcctaccgggacacgcccccctccaagcgctctctgctcaaagtggtccgacgactggagaagtggcaggagcagtatgacgggagggagggacgtactgtggtccactgcctaaatgggggaggccgtagtggaaccttctgtgccatctgcagtgtgtgtgagatgatccagcagcaaaacatcattgacgtgttccacatcgtgaaaacactgcgtaacaacaaatccaacatggtggagaccctggaacagtataaatttgtatacgaggtggcactggaatatttaagctccttttagctcaatgggatggggaacctgccggagtccagaggctgctgtgaccaagcccccttttgtgtgaatggcagtaactgggctcaggagctctgaggtggcaccctgcctgactccaaggagaagactggtggccctgtgttccacggggggctctgcaccttctgaggggtctcctgttgccgtgggagatgctgctccaaaaggcccaggcttccttttcaacctaaccagccacagccaagggcccaagcagaagtacacccacaagcaaggccttggatttctggctcccagaccacctgcttttgttctgagtttgtggatctcttggcaagccaactgtgcaggtgctggggagtgggaggctcccctgccctccttctccttaggagtggaggagatgtgtgttctgctcctctacgtcatggaaaagattgaggctcttgggggtcactgctctgctgccccctgcaacctccttcaggggcctctggcaccagacatttgcagtctggaccagtgtgaccttacgatgttccctaggccacaagagaggccccccatcctcacacctaacctgcatggggcttcgcccacaaccattctgtaccccttccccagcctgggccttgaccgtccagcattcactggccggccagctgtgtccacagcagtttttgataaaggtgttctttgcttttttgtgtggtcagtgggagggggtggaactgcagggaacttctctgctcctccttgtctttgtaaaaagggaccacctccctggggcagggcttgggctgacctgtaggatgtaacccctgtgtttctttggtggtagctttctttggaagagacaaacaagataagatttgattattttccaaagtgtatgtgaaaagaaactttcttttggagggtgtaaaatcttagtctcttatgtcaaaaagaagggggcgggggagtttgagtatgtacctctaagacaaatctctcgggccttttattttttcctggcaatgtccttaaaagctcccaccctgggacagcatgccactgagcaaggagagatgggtgagcctgaagatggtccctttggtttctggggcaaatagagcaccagctttgtgcataatttggatgtccaaatttgaactccttcctaaagaaacccagcagccaccttgaaaaaggccattgtggagcccattatactttgatttaaaataggccaagagaatcaggcctggagatctagggtcttgtccaaagtgtgagtgagtcaatgagagggaaccaacatttgctaagtctctactgtatgccagggatcatgcttggcactttccataggacatttcacacagtccttagaacccccaggagagagctactgacttgttatcatctccatttgatcatctcctccaatgaggaaacccacgcaccttccttagtaatgaaatcctgggttccaaaggggcaggtaatggcaatgagacttctccgtgctgttttcttcatcttctctaagccaagcaattattttatggagggaaaataaggccagaaacttctgagcagataactccacaaatggaaatttagtactttcttcctgatgccagttcttctgggaagcgcagaatttcagatatattttagtaacacattcccagctccccaggaaagccagtctcatctaatttcttagtcagtaaaaacaattccctgttccttcaggctatgaatggaccagccagggaaactctcgaccttgatctctagccagtgcttaggcccaatatctgacagcctcaggtgggctgggacctaggaagctccatcttgaaggctggtctagccccagacagggcatgaggggcagagaattcaagaaggtacagctttggccctcaagagcccactgtatgctggggaaatggaaccatggtgcagtagtgtggagtggatgagtgttccatgagcctaggagcaagaaagtctcttcggcctcgggcttcctggagaaggggacgtccattcctgctgggtcttaacaagcataaaaaggaaaaaaaggaaactcaggcaaagggatccatatgtgcaatggcaaagaaatgtgaaaaggcattgggagaagcagtctgggggaggccagcccagtgcgggcacagcacaacacggggagcagcaagagatgagccagggtccaggagacagatgcccatcgcgagtacagactttgtcctattggcaacaaggagtccatggagctttagagagatgcactcagcttcgtgttggccaagactccttctgggccaatggggctgcctcttttcctttcatcagacactgtgaaaacattcccttaagcgtgcactttttaatatcacatctatttgtctgtctgctcattgttttgttgctggaactaaatatgcaatggatcatgagactcagattctatgagaaacccagggtctctgctttaccacggagcagggtcaccaacccagatctccaggcccatgaggatggaacatgaaaggagccgacaaaagttgcttccattggcatgggctctggagctgtccagaagtccagggacaccagacttgatcaaggaagggctgtcactttagaggttcaaaaggaagtgcctcaaagcaaaggcaagcaaaggaaccccacgatgaacttgctcttttcctttgatgagcctctccccaggtgtatttcagcagaccccggggacccacccccactgggcctgctggcctccctcggctccagcccaatgccccagctggccttccccagcctgcaaggagcctgtagcatggcaaatctgcctgctgtatgctattttcttagatcttggtacatccagacaggatgagggtggagggagagctatttaacacaaatcctaagatttttttctgctcaggaaggggtgaaatagctggcagatacaaaagacagtggcttttatcattttaaatggtaggaatttaaggtgtgacttcagggagaaacaaacttgcaaaaaaaaaaaatctcaggccatgttggggtaacccagcaagggccagtgatgatttcccccagctcatccccttattttcccacaacccaaccattctctaaagcaggacagtgaataggtcttaggccagtgcacacaggaagaaattgaggcttatggatggggatgacttccctaagatcccatgggacaaggatgtggcaaggcttggatgagatggggcaccagtgcccaggaatttgaacattttcctttacccaggaaatctccggagccaacaccaccacccccagggggtctccccaccccaccccatttacagggtgagctcagcctgtcatgagcagaggaaaatattattaatgctctctgagtctttacaacaggagctcttacctcatagatgtgggctctgtttggggaagatgcaaggaagtaatgagaagcccaggaaatttctccacctgtgtttatggcctaaatagcttcaggatgtatcttagctgcactccaacattgcatcctttctggggtgaagaatctgggccaaccaggggtccttgggcctctagaaggccacagtaggcctctctttgtgggaatggaaggggacagtttgcttttagt

SEQ ID NO: 28595 - protein, 1441 aa, Homo sapiens
MASLAALALSLLLRLQLPPLPGARAQSAAGGCSFDEHYSNCGYSVALGTNGFTWEQINTWEKPMLDQAVPTGSFMMVNSSGRASGQKAHLLLPTLKENDTHCIDFHYYFSSRDRSSPGALNVYVKVNGGPQGNPVWNVSGVVTEGWVKAELAISTFWPHFYQVIFESVSLKGHPGYIAVDEVRVLAHPCRKAPHFLRLQNVEVNVGQNATFQCIAGGKWSQHDKLWLQQWNGRDTALMVTRVVNHRRFSATVSVADTAQRSVSKYRCVIRSDGGSGVSNYAELIVKEPPTPIAPPELLAVGATYLWIKPNANSIIGDGPIILKEVEYRTTTGTWAETHIVDSPNYKLWHLDPDVEYEIRVLLTRPGEGGTGPPGPPLTTRTKCADPVHGPQNVEIVDIRARQLTLQWEPFGYAVTRCHSYNLTVQYQYVFNQQQYEAEEVIQTSSHYTLRGLRPFMTIRLRLLLSNPEGRMESEELVVQTEEDVPGAVPLESIQGGPFEEKIYIQWKPPNETNGVITLYEINYKAVGSLDPSADLSSQRGKVFKLRNETHHLFVGLYPGTTYSFTIKASTAKGFGPPVTTRIATKISAPSMPEYDTDTPLNETDTTITVMLKPAQSRGAPVSVYQLVVKEERLQKSRRAADIIECFSVPVSYRNASSLDSLHYFAAELKPANLPVTQPFTVGDNKTYNGYWNPPLSPLKSYSIYFQALSKANGETKINCVRLATKGASTQNSNTVEPEKQVDNTVKMAGVIAGLLMFIIILLGVMLTIKRRRNAYSYSYYLKLAKKQKETQSGAQREMGPVASADKPTTKLSASRNDEGFSSSSQDVNGFTDGSRGELSQPTLTIQTHPYRTCDPVEMSYPRDQFQPAIRVADLLQHITQMKRGQGYGFKEEYEALPEGQTASWDTAKEDENRNKNRYGNIISYDHSRVRLLVLDGDPHSDYINANYIDGYHRPRHYIATQGPMQETVKDFWRMIWQENSASIVMVTNLVEVGRVKCVRYWPDDTEVYGDIKVTLIETEPLAEYVIRTFTVQKKGYHEIRELRLFHFTSWPDHGVPCYATGLLGFVRQVKFLNPPEAGPIVVHCSAGAGRTGCFIAIDTMLDMAENEGVVDIFNCVRELRAQRVNLVQTEEQYVFVHDAILEACLCGNTAIPVCEFRSLYYNISRLDPQTNSSQIKDEFQTLNIVTPRVRPEDCSIGLLPRNHDKNRSMDVLPLDRCLPFLISVDGESSNYINAALMDSHKQPAAFVVTQHPLPNTVADFWRLVFDYNCSSVVMLNEMDTAQFCMQYWPEKTSGCYGPIQVEFVSADIDEDIIHRIFRICNMARPQDGYRIVQHLQYIGWPAYRDTPPSKRSLLKVVRRLEKWQEQYDGREGRTVVHCLNGGGRSGTFCAICSVCEMIQQQNIIDVFHIVKTLRNNKSNMVETLEQYKFVYEVALEYLSSF

SEQ ID NO: 28596 - DNA, 8192 bp, Homo sapiens
cctcccgcctcagttcgcgccgcgcctcggcttggaacgcaggagcgccggctccgggagcccgagcggagccagccgcgcgcacagccagcggccgcgccggcgatgcggggccaccccgcgcccgccccagtcccggccccggcccccgcgggaaggggctgagctgcccgccgccgcccggatggcgagcctcgccgcgctcgccctcagcctgctcctgaggctgcagctgccgccactgcccggcgcccgggctcagagcgccgcaggtggctgttcctttgatgagcactacagcaactgtggttatagtgtggctctagggaccaatgggttcacctgggagcagattaacacatgggagaaaccaatgctggaccaggcagtgcccacaggatctttcatgatggtgaacagctctgggagagcctctggccagaaggcccaccttctcctgccaaccctgaaggagaatgacacccactgcatcgacttccattactacttctccagccgtgacaggtccagcccaggggccttgaacgtctacgtgaaggtgaatggtggcccccaagggaaccctgtgtggaatgtgtccggggtcgtcactgagggctgggtgaaggcagagctcgccatcagcactttctggccacatttctatcaggtgatatttgaatccgtctcattgaagggtcatcctggctacatcgccgtggacgaggtccgggtccttgctcatccatgcagaaaagcacctcattttctgcgactccaaaacgtggaggtgaatgtggggcagaatgccacatttcagtgcattgctggtgggaagtggtctcagcatgacaagctttggctccagcaatggaatggcagggacacggccctgatggtcacccgtgtggtcaaccacaggcgcttctcagccacagtcagtgtggcagacactgcccagcggagcgtcagcaagtaccgctgtgtgatccgctctgatggtgggtctggtgtgtccaactacgcggagctgatcgtgaaagagcctcccacgcccattgctcccccagagctgctggctgtgggggccacatacctgtggatcaagccaaatgccaactccatcatcggggatggccccatcatcctgaaggaagtggaatatcgcaccaccacaggcacgtgggcagagacccacatagtcgactctcccaactataagctgtggcatctggaccccgatgttgagtatgagatccgagtgctcctcacacgaccaggtgaggggggtacgggaccgccagggcctcccctcaccaccaggaccaagtgtgcagatccggtacatggcccacagaacgtggaaatcgtagacatcagagcccggcagctgaccctgcagtgggagcccttcggctacgcggtgacccgctgccatagctacaacctcaccgtgcagtaccagtatgtgttcaaccagcagcagtacgaggccgaggaggtcatccagacctcctcccactacaccctgcgaggcctgcgccccttcatgaccatccggctgcgactcttgctgtctaaccccgagggccgaatggagagcgaggagctggtggtgcagactgaggaagacgttccaggagctgttcctctagaatccatccaaggggggccctttgaggagaagatctacatccagtggaaacctcccaatgagaccaatggggtcatcacgctctacgagatcaactacaaggctgtcggctcgctggacccaagtgctgacctctcgagccagagggggaaagtgttcaagctccggaatgaaacccaccacctctttgtgggtctgtacccagggaccacctattccttcaccatcaaggccagcacagcaaagggctttgggccccctgtcaccactcggattgccaccaaaatttcagctccatccatgcctgagtacgacacagacaccccattgaatgagacagacacgaccatcacagtgatgctgaaacccgctcagtcccggggagctcctgtcagtgtttatcagctggttgtcaaggaggagcgacttcagaagtcacggagggcagctgacattattgagtgcttttcggtgcccgtgagctatcggaatgcctccagcctcgattctctacactactttgctgctgagttgaagcctgccaacctgcctgtcacccagccatttacagtgggtgacaataagacatacaatggctactggaaccctcctctctctcccctgaaaagctacagcatctacttccaggcactcagcaaagccaatggagagaccaaaatcaactgtgttcgtctggctacaaaagcaccaatgggcagcgcccaggtgaccccggggactccactctgcctcctcaccacaggtgcctccacccagaattctaacactgtggagccagagaagcaggtggacaacaccgtgaagatggctggcgtgatcgctggcctcctcatgttcatcatcattctcctgggcgtgatgctcaccatcaaaaggagaagaaatgcttattcctactcctattacttgaagctggccaagaagcagaaggagacccagagtggagcccagagggagatggggcctgtggcctctgccgacaaacccaccaccaagctcagcgccagccgcaatgatgaaggcttctcttctagttctcaggacgtcaacggattcacagatggcagccgcggggagctttcccagcccaccctcacgatccagactcatccctaccgcacctgtgaccctgtggagatgagctacccccgggaccagttccaacccgccatccgggtggctgacttgctgcagcacatcacgcagatgaagagaggccagggctacgggttcaaggaggaatacgaggccttaccagaggggcagacagcttcgtgggacacagccaaggaggatgaaaaccgcaataagaatcgatatgggaacatcatatcctacgaccattcccgggtgaggctgctggtgctggatggagacccgcactctgactacatcaatgccaactacattgacggataccatcgacctcggcactacattgcgactcaaggtccgatgcaggagactgtaaaggacttttggagaatgatctggcaggagaactccgccagcatcgtcatggtcacaaacctggtggaagtgggcagggtgaaatgtgtgcgatactggccagatgacacggaggtctacggagacattaaagtcaccctgattgaaacagagcccctggcagaatacgtcatacgcaccttcacagtccagaagaaaggctaccatgagatccgggagctccgcctcttccacttcaccagctggcctgaccacggcgttccctgctatgccactggccttctgggcttcgtccgccaggtcaagttcctcaaccccccggaagctgggcccatagtggtccactgcagtgctggggctgggcggactggctgcttcattgccattgacaccatgcttgacatggccgagaatgaaggggtggtggacatcttcaactgcgtgcgtgagctccgggcccaaagggtcaacctggtacagacagaggagcaatatgtgtttgtgcacgatgccatcctggaagcgtgcctctgtggcaacactgccatccctgtgtgtgagttccgttctctctactacaatatcagcaggctggacccccagacaaactccagccaaatcaaagatgaatttcagaccctcaacattgtgacaccccgtgtgcggcccgaggactgcagcattgggctcctgccccggaaccatgataagaatcgaagtatggacgtgctgcctctggaccgctgcctgcccttccttatctcagtggacggagaatccagcaattacatcaacgcagcactgatggatagccacaagcagcctgccgccttcgtggtcacccagcaccctctacccaacaccgtggcagacttctggaggctggtgttcgattacaactgctcctctgtggtgatgctgaatgagatggacactgcccagttctgtatgcagtactggcctgagaagacctccgggtgctatgggcccatccaggtggagttcgtctccgcagacatcgacgaggacatcatccacagaatattccgcatctgtaacatggcccggccacaggatggttatcgtatagtccagcacctccagtacattggctggcctgcctaccgggacacgcccccctccaagcgctctctgctcaaagtggtccgacgactggagaagtggcaggagcagtatgacgggagggagggacgtactgtggtccactgcctaaatgggggaggccgtagtggaaccttctgtgccatctgcagtgtgtgtgagatgatccagcagcaaaacatcattgacgtgttccacatcgtgaaaacactgcgtaacaacaaatccaacatggtggagaccctggaacagtataaatttgtatacgaggtggcactggaatatttaagctccttttagctcaatgggatggggaacctgccggagtccagaggctgctgtgaccaagcccccttttgtgtgaatggcagtaactgggctcaggagctctgaggtggcaccctgcctgactccaaggagaagactggtggccctgtgttccacggggggctctgcaccttctgaggggtctcctgttgccgtgggagatgctgctccaaaaggcccaggcttccttttcaacctaaccagccacagccaagggcccaagcagaagtacacccacaagcaaggccttggatttctggctcccagaccacctgcttttgttctgagtttgtggatctcttggcaagccaactgtgcaggtgctggggagtgggaggctcccctgccctccttctccttaggagtggaggagatgtgtgttctgctcctctacgtcatggaaaagattgaggctcttgggggtcactgctctgctgccccctgcaacctccttcaggggcctctggcaccagacatttgcagtctggaccagtgtgaccttacgatgttccctaggccacaagagaggccccccatcctcacacctaacctgcatggggcttcgcccacaaccattctgtaccccttccccagcctgggccttgaccgtccagcattcactggccggccagctgtgtccacagcagtttttgataaaggtgttctttgcttttttgtgtggtcagtgggagggggtggaactgcagggaacttctctgctcctccttgtctttgtaaaaagggaccacctccctggggcagggcttgggctgacctgtaggatgtaacccctgtgtttctttggtggtagctttctttggaagagacaaacaagataagatttgattattttccaaagtgtatgtgaaaagaaactttcttttggagggtgtaaaatcttagtctcttatgtcaaaaagaagggggcgggggagtttgagtatgtacctctaagacaaatctctcgggccttttattttttcctggcaatgtccttaaaagctcccaccctgggacagcatgccactgagcaaggagagatgggtgagcctgaagatggtccctttggtttctggggcaaatagagcaccagctttgtgcataatttggatgtccaaatttgaactccttcctaaagaaacccagcagccaccttgaaaaaggccattgtggagcccattatactttgatttaaaataggccaagagaatcaggcctggagatctagggtcttgtccaaagtgtgagtgagtcaatgagagggaaccaacatttgctaagtctctactgtatgccagggatcatgcttggcactttccataggacatttcacacagtccttagaacccccaggagagagctactgacttgttatcatctccatttgatcatctcctccaatgaggaaacccacgcaccttccttagtaatgaaatcctgggttccaaaggggcaggtaatggcaatgagacttctccgtgctgttttcttcatcttctctaagccaagcaattattttatggagggaaaataaggccagaaacttctgagcagataactccacaaatggaaatttagtactttcttcctgatgccagttcttctgggaagcgcagaatttcagatatattttagtaacacattcccagctccccaggaaagccagtctcatctaatttcttagtcagtaaaaacaattccctgttccttcaggctatgaatggaccagccagggaaactctcgaccttgatctctagccagtgcttaggcccaatatctgacagcctcaggtgggctgggacctaggaagctccatcttgaaggctggtctagccccagacagggcatgaggggcagagaattcaagaaggtacagctttggccctcaagagcccactgtatgctggggaaatggaaccatggtgcagtagtgtggagtggatgagtgttccatgagcctaggagcaagaaagtctcttcggcctcgggcttcctggagaaggggacgtccattcctgctgggtcttaacaagcataaaaaggaaaaaaaggaaactcaggcaaagggatccatatgtgcaatggcaaagaaatgtgaaaaggcattgggagaagcagtctgggggaggccagcccagtgcgggcacagcacaacacggggagcagcaagagatgagccagggtccaggagacagatgcccatcgcgagtacagactttgtcctattggcaacaaggagtccatggagctttagagagatgcactcagcttcgtgttggccaagactccttctgggccaatggggctgcctcttttcctttcatcagacactgtgaaaacattcccttaagcgtgcactttttaatatcacatctatttgtctgtctgctcattgttttgttgctggaactaaatatgcaatggatcatgagactcagattctatgagaaacccagggtctctgctttaccacggagcagggtcaccaacccagatctccaggcccatgaggatggaacatgaaaggagccgacaaaagttgcttccattggcatgggctctggagctgtccagaagtccagggacaccagacttgatcaaggaagggctgtcactttagaggttcaaaaggaagtgcctcaaagcaaaggcaagcaaaggaaccccacgatgaacttgctcttttcctttgatgagcctctccccaggtgtatttcagcagaccccggggacccacccccactgggcctgctggcctccctcggctccagcccaatgccccagctggccttccccagcctgcaaggagcctgtagcatggcaaatctgcctgctgtatgctattttcttagatcttggtacatccagacaggatgagggtggagggagagctatttaacacaaatcctaagatttttttctgctcaggaaggggtgaaatagctggcagatacaaaagacagtggcttttatcattttaaatggtaggaatttaaggtgtgacttcagggagaaacaaacttgcaaaaaaaaaaaatctcaggccatgttggggtaacccagcaagggccagtgatgatttcccccagctcatccccttattttcccacaacccaaccattctctaaagcaggacagtgaataggtcttaggccagtgcacacaggaagaaattgaggcttatggatggggatgacttccctaagatcccatgggacaaggatgtggcaaggcttggatgagatggggcaccagtgcccaggaatttgaacattttcctttacccaggaaatctccggagccaacaccaccacccccagggggtctccccaccccaccccatttacagggtgagctcagcctgtcatgagcagaggaaaatattattaatgctctctgagtctttacaacaggagctcttacctcatagatgtgggctctgtttggggaagatgcaaggaagtaatgagaagcccaggaaatttctccacctgtgtttatggcctaaatagcttcaggatgtatcttagctgcactccaacattgcatcctttctggggtgaagaatctgggccaaccaggggtccttgggcctct

SEQ ID NO: 28597 - protein, 1460 aa, Homo sapiens
MASLAALALSLLLRLQLPPLPGARAQSAAGGCSFDEHYSNCGYSVALGTNGFTWEQINTWEKPMLDQAVPTGSFMMVNSSGRASGQKAHLLLPTLKENDTHCIDFHYYFSSRDRSSPGALNVYVKVNGGPQGNPVWNVSGVVTEGWVKAELAISTFWPHFYQVIFESVSLKGHPGYIAVDEVRVLAHPCRKAPHFLRLQNVEVNVGQNATFQCIAGGKWSQHDKLWLQQWNGRDTALMVTRVVNHRRFSATVSVADTAQRSVSKYRCVIRSDGGSGVSNYAELIVKEPPTPIAPPELLAVGATYLWIKPNANSIIGDGPIILKEVEYRTTTGTWAETHIVDSPNYKLWHLDPDVEYEIRVLLTRPGEGGTGPPGPPLTTRTKCADPVHGPQNVEIVDIRARQLTLQWEPFGYAVTRCHSYNLTVQYQYVFNQQQYEAEEVIQTSSHYTLRGLRPFMTIRLRLLLSNPEGRMESEELVVQTEEDVPGAVPLESIQGGPFEEKIYIQWKPPNETNGVITLYEINYKAVGSLDPSADLSSQRGKVFKLRNETHHLFVGLYPGTTYSFTIKASTAKGFGPPVTTRIATKISAPSMPEYDTDTPLNETDTTITVMLKPAQSRGAPVSVYQLVVKEERLQKSRRAADIIECFSVPVSYRNASSLDSLHYFAAELKPANLPVTQPFTVGDNKTYNGYWNPPLSPLKSYSIYFQALSKANGETKINCVRLATKAPMGSAQVTPGTPLCLLTTGASTQNSNTVEPEKQVDNTVKMAGVIAGLLMFIIILLGVMLTIKRRRNAYSYSYYLKLAKKQKETQSGAQREMGPVASADKPTTKLSASRNDEGFSSSSQDVNGFTDGSRGELSQPTLTIQTHPYRTCDPVEMSYPRDQFQPAIRVADLLQHITQMKRGQGYGFKEEYEALPEGQTASWDTAKEDENRNKNRYGNIISYDHSRVRLLVLDGDPHSDYINANYIDGYHRPRHYIATQGPMQETVKDFWRMIWQENSASIVMVTNLVEVGRVKCVRYWPDDTEVYGDIKVTLIETEPLAEYVIRTFTVQKKGYHEIRELRLFHFTSWPDHGVPCYATGLLGFVRQVKFLNPPEAGPIVVHCSAGAGRTGCFIAIDTMLDMAENEGVVDIFNCVRELRAQRVNLVQTEEQYVFVHDAILEACLCGNTAIPVCEFRSLYYNISRLDPQTNSSQIKDEFQTLNIVTPRVRPEDCSIGLLPRNHDKNRSMDVLPLDRCLPFLISVDGESSNYINAALMDSHKQPAAFVVTQHPLPNTVADFWRLVFDYNCSSVVMLNEMDTAQFCMQYWPEKTSGCYGPIQVEFVSADIDEDIIHRIFRICNMARPQDGYRIVQHLQYIGWPAYRDTPPSKRSLLKVVRRLEKWQEQYDGREGRTVVHCLNGGGRSGTFCAICSVCEMIQQQNIIDVFHIVKTLRNNKSNMVETLEQYKFVYEVALEYLSSF

SEQ ID NO: 28598 - DNA, 2747 bp, Homo sapiens
ccaggactgggcggcgccgacgcgcttggcgggagatagaaaagtgcttcaacccgcgccggcggcgactgcagttcctgcgagcgaggagcgcgggacctgctgacacgctgacgccttcgagcgcggcccggggcccggagcggccggagcagcccgggtcctgaccccggcccggctcccgctccgggctctgccggcgggcgggcgagcgcggcgcggtccgggccggggggatgtctcggcggacgcgctgcgaggatctggatgagctgcactaccaggacacagattcagatgtgccggagcagagggatagcaagtgcaaggtcaaatggacccatgaggaggacgagcagctgagggccctggtgaggcagtttggacagcaggactggaagttcctggccagccacttccctaaccgcactgaccagcaatgccagtacaggtggctgagagttttgaatccagaccttgtcaaggggccatggaccaaagaggaagaccaaaaagtcatcgagctggttaagaagtatggcacaaagcagtggacactgattgccaagcacctgaagggccggctggggaagcagtgccgtgaacgctggcacaaccacctcaaccctgaggtgaagaagtcttgctggaccgaggaggaggaccgcatcatctgcgaggcccacaaggtgctgggcaaccgctgggccgagatcgccaagatgttgccagggaggacagacaatgctgtgaagaatcactggaactctaccatcaaaaggaaggtggacacaggaggcttcttgagcgagtccaaagactgcaagcccccagtgtacttgctgctggagctcgaggacaaggacggcctccagagtgcccagcccacggaaggccagggaagtcttctgaccaactggccctccgtccctcctaccataaaggaggaggaaaacagtgaggaggaacttgcagcagccaccacatcgaaggaacaggagcccatcggtacagatctggacgcagtgcgaacaccagagcccttggaggaattcccgaagcgtgaggaccaggaaggctccccaccagaaacgagcctgccttacaagtgggtggtggaggcagctaacctcctcatccctgctgtgggttctagcctctctgaagccctggacttgatcgagtcggaccctgatgcttggtgtgacctgagtaaatttgacctccctgaggaaccatctgcagaggacagtatcaacaacagcctagtgcagctgcaagcgtcacatcagcagcaagtcctgccaccccgccagccttccgccctggtgcccagtgtgaccgagtaccgcctggatggccacaccatctcagacctgagccggagcagccggggcgagctgatccccatctcccccagcactgaagtcgggggctctggcattggcacaccgccctctgtgctcaagcggcagaggaagaggcgtgtggctctgtcccctgtcactgagaatagcaccagtctgtccttcctggattcctgtaacagcctcacgcccaagagcacacctgttaagaccctgcccttctcgccctcccagtttctgaacttctggaacaaacaggacacattggagctggagagcccctcgctgacatccaccccagtgtgcagccagaaggtggtggtcaccacaccactgcaccgggacaagacacccctgcaccagaaacatgctgcgtttgtaaccccagatcagaagtactccatggacaacactccccacacgccaaccccgttcaagaacgccctggagaagtacggacccctgaagcccctgccacagaccccgcacctggaggaggacttgaaggaggtgctgcgttctgaggctggcatcgaactcatcatcgaggacgacatcaggcccgagaagcagaagaggaagcctgggctgcggcggagccccatcaagaaagtccggaagtctctggctcttgacattgtggatgaggatgtgaagctgatgatgtccacactgcccaagtctctatccttgccgacaactgccccttcaaactcttccagcctcaccctgtcaggtatcaaagaagacaacagcttgctcaaccagggcttcttgcaggccaagcccgagaaggcagcagtggcccagaagccccgaagccacttcacgacacctgcccctatgtccagtgcctggaagacggtggcctgcggggggaccagggaccagcttttcatgcaggagaaagcccggcagctcctgggccgcctgaagcccagccacacatctcggaccctcatcttgtcctgaggtgttgagggtgtcacgagcccattctcatgtttacaggggttgtgggggcagagggggtctgtgaatctgagagtcattcaggtgacctcctgcagggagccttctgccaccagcccctccccagactctcaggtggaggcaacagggccatgtgctgccctgttgccgagcccagctgtgggcggctcctggtgctaacaacaaagttccacttccaggtctgcctggttccctccccaaggccacagggagctccgtcagcttctcccaagcccacgtcaggcctggcctcatctcagaccctgcttaggatgggggatgtggccaggggtgctcctgtgctcaccctctcttggtgcatttttttggaagaataaaattgcctctctctttgtgctggtctgg

SEQ ID NO: 28599 - protein, 700 aa, Homo sapiens; identical to SEQ ID NO: 3925

SEQ ID NO: 28600 - DNA, 3161 bp, Homo sapiens
taccagcacacaagggttcgtgtttgtggaacctggtagcttccttcagagctgacatttgcccacagccagcctggcccagccccataccaccagccctggcgctctggggcgtgaggtgccttttctgcccccctgctctagggcaggtggaaatcacccatggtgggtctacatctgatagaagcatcttatagttctgcttctggaccagaccatcctgggtttttctctgttctgctgaagggttccctccacgtgtccatcacctcggtgaactcttgggagacctgggaagatgctggcctcacctctcgcccctcctttccctcattgtgctgccaccatccttctcacacaggctctccagggagagctgggcaggatgggatcttcctgggttcccaccttgctccgtgccccctctcactgttcctgaagtgtggccacggactgccttgttttctggaaagtcccaagtctggaccatgactgagcagcattctcggctatctgccacctgtctggggctcctggcccctcttagactcccctctcccttctgtttcccccgagcccctgacttggacctgcagggtggggagagggatgggacgagaacctgtgctggggccaaaggtcgcactgggggaaggtggagccagggcagcagagtgcctggcgtcggcccctatcctgtcactagttcccccgttctggcccctggcaggtttgtaaccccagatcagaagtactccatggacaacactccccacacgccaaccccgttcaagaacgccctggagaagtacggacccctgaagcccctggtacgtggtgtggtcgctgccgtggatctctgcacagtgggatcccttcggttcatccaaccatgttcagtccacaggacccttccctctgaggtctcatttgattctttctcctgagaagatgcagagatcctgataatataaatggggaagctgaggctgctctttgtcacttcctccgactgctcctgagcacctgagtttgcaagcacgcgccggctggtgctagagacatggtggtatcccgtgacactcagcctcaggatgggggagactgatgtgaaatacaaataacttaaacactttcaggcaaagataagcactgggcctagttcagagaagtggcaaattgctactctggcctgtctctgaccaactcccagttctctacagagcacgggaaagcccctcggggacgtctttcctgcagtgtgcaggctgcccttctcccctgctcttcccagttgatgggatggttgtgttttctctatgaaaaaaggagttggcaccttgggctttctgaaacacacaggtgttttagaaatcagtggagggtgagagaaaggcatggttgtggaggcactggactgtgaacaaggtctgcagcgggtccccctgctgtctctctccactgcatggagcctcctatgaagcccaaggtggctgggggctgaggctcccttgggcctgccatggaactgattctgagtcaagcagactttccacggaccatgctacatgagccgaggtgaggcactagttagtgctcctttcctgttgcagtggagatttggctcctctgtactaaaatatctgcatgctctccaaacaggtgtgagggcaaatcacatgaccttggcagctgtaattaaagtttgtgggggcttttcggatgacttatgaggagtggctgtgattcgcacctttcactcttagtagcactcgccctcccctgttctctgttgcctgaagctggagaggtccttggaaccccgaggcctgagaaagggaaatgggtttgagagcccccattagtgtggaacaaagggttgagtgagcctgggctttgagctgtcggggtcctaattcagcagctgtgtgactgtgtgccaggctgttgatctctgagcttctgtttctacctgcttaaaatgacggttactgcacagggctgtgtgagggttacagtgcgtctctgggctgctcccagccatggcaggcccctgggaatcaaggtcatcagctgcttgtccaaggcagcagttagtggttgtgaatggtgcgtgtgagatctgcatcctggcgtcaggcctccttcctgccttacccaggacagcccagttgcagctgggttggtcccacagtcccacacacacacagcccgagtgtggtgcctcacgtgggctgccccgtgcctacccacagccacagaccccgcacctggaggaggacttgaaggaggtgctgcgttctgaggctggcatcgaactcatcatcgaggacgacatcaggcccgagaagcagaagaggaagcctgggctgcggcggagccccatcaagaaagtccggaagtctctggctcttgacattgtggatgaggatgtgaagctgatgatgtccacactgcccaagtctctatccttgccgacaactgccccttcaaactcttccagcctcaccctgtcaggtatcaaagaagacaacagcttgctcaaccagggcttcttgcaggccaagcccgagaaggcagcagtggcccagaagccccgaagccacttcacgacacctgcccctatgtccagtgcctggaagacggtggcctgcggggggaccagggaccagcttttcatgcaggagaaagcccggcagctcctgggccgcctgaagcccagccacacatctcggaccctcatcttgtcctgaggtgttgagggtgtcacgagcccattctcatgtttacaggggttgtgggggcagagggggtctgtgaatctgagagtcattcaggtgacctcctgcagggagccttctgccaccagcccctccccagactctcaggtggaggcaacagggccatgtgctgccctgttgccgagcccagctgtgggcggctcctggtgctaacaacaaagttccacttccaggtctgcctggttccctccccaaggccacagggagctccgtcagcttctcccaagcccacgtcaggcctggcctcatctcagaccctgcttaggatgggggatgtggccaggggtgctcctgtgctcaccctctcttggtgcatttttttggaagaataaaattgcctctctctttgtgctggtctgg

SEQ ID NO: 28601 - protein, 236 aa, Homo sapiens
MAGPWESRSSAACPRQQLVVVNGACEICILASGLLPALPRTAQLQLGWSHSPTHTQPECGASRGLPRAYPQPQTPHLEEDLKEVLRSEAGIELIIEDDIRPEKQKRKPGLRRSPIKKVRKSLALDIVDEDVKLMMSTLPKSLSLPTTAPSNSSSLTLSGIKEDNSLLNQGFLQAKPEKAAVAQKPRSHFTTPAPMSSAWKTVACGGTRDQLFMQEKARQLLGRLKPSHTSRTLILS

SEQ ID NO: 28602 - DNA, 842 bp, Homo sapiens; identical to SEQ ID NO: 3928

SEQ ID NO: 28603 - protein, 148 aa, Homo sapiens; identical to SEQ ID NO: 3929

SEQ ID NO: 28604 - DNA, 625 bp, Homo sapiens
tgctaactctgttctctgtgtagctgcttttggcagctcctcatctctcttctaatccaccactcacagtcctagagaacagaccacaagttaagaccgtcacctacagaatcccaagggccaaaactgggcagaggacaactccatccttcttacaaaagggcttctccacaagaagcatttccgttagactctagcagtgagataccctgcttcaagaatttctcatggagccagaagcctttgaaatttgcccttatgatcctcaccaccgaatcccactcagcagattccagtaccacctggcatcgtgcaggagaaagaaccccaagaaagccaaaaagatggccacctgcaaatacaacgcctgccacgtggtccccatcaaaaatctggaggaacatgaggctgtttgtgtcaacaggagcgctgtggaagaagaggacaccgagaaccctctgaaagttgtttgtgaaaatgacacgaaagagtcagcaagagagaccagtccccagaagatcctcagaccaggacagtaaactgccagctgaggaaggagcacacgcctcatcaatgcatggaagaacgtgcaatgcatcagaataaaagacatgcaaagtaaact

SEQ ID NO: 28605 - protein, 103 aa, Homo sapiens
MEPEAFEICPYDPHHRIPLSRFQYHLASCRRKNPKKAKKMATCKYNACHVVPIKNLEEHEAVCVNRSAVEEEDTENPLKVVCENDTKESARETSPQKILRPGQ

SEQ ID NO: 28606 - DNA, 683 bp, Homo sapiens
tgctaactctgttctctgtgtagctgcttttggcagctcctcatctctcttctaatccaccactcacagtcctagagaacagaccacaagttaagaccgtcacctacagaatcccaagggccaaaactgggcagaggacaactccatccttcttacaaaagggcttctccacaagaagcatttccgttagactctagcagtgagataccctgcttcaagaatttctcatggagccagaagcctttgaaatttgcccttatgatcctcaccaccgaatcccactcagcagattccagtaccacctggcatcgtgcaggagaaagaaccccaagaaagccaaaaagatggccacctgcaaatacaacgcctgccacgtggtccccatcaaaaatctggaggaacatgaggctgtttgtgtcaacaggagcgctgtggaagaagaggacaccgagaaccctctgaaagtcagtcctcctagttcagagcagaacgatgacacccagcagactttttttcctcaaaaggttgtttgtgaaaatgacacgaaagagtcagcaagagagaccagtccccagaagatcctcagaccaggacagtaaactgccagctgaggaaggagcacacgcctcatcaatgcatggaagaacgtgcaatgcatcagaataaaagacatgcaaagtaaa

SEQ ID NO: 28607 - protein, 123 aa, Homo sapiens; identical to SEQ ID NO: 3927

SEQ ID NO: 28608 - DNA, 2420 bp, Homo sapiens
gttcttgacattaatgaagttgcctcctgaatttcactgttaaggatgactttggcatttggtttgaaatgttaatttttatttatcatcttgaggagaaggcaatatgaagatagagacaatggagattttaaaacgttgattggtggagactggaaagttgtggtcagaagccaaggaatgctgacagccaccataaactggaagagggtcttgctctattgcacaggagtgcagtggtacaatcatggctgtctgcggcctcaatctccctggcttaagcaatcctcctgcctcagcctcccaaagtagctgggactacaggaaaagtgtcaggcccattgaagttaccacgtgccatggctgtgagtgccttcactacttggagtaggctcatcagtagacaaccctcccagagctctacgtgcagccggcatctgcgcggtctgttaggccttgctctgttgcccaagctggagtgggcaacaacccatccaccttggcctcccaaagtgctgggattacagccacctattctagaggagcagtattgaagggcttggggaaaccgagtgctctctaagtgtggccctcaccatccttcctggtgcgctatctccagccgtgcatccgaaaacatcccagtctgcccctggcctctgcatggagcctgacccccaacacagacctctcaagaggttctggattcactggtgctgctacagccctgagcaaaaacacagctgtttcgtttaccaccccaccccaacataagctgtcctcagactttacaaagacttagggattgcacagtccacaagactttcaatgcctttgccctgtatctcaactaactttcaaatagagggaccttcttataggaagaagaaggaaaaatcaagtggaaaaacaccttgatcaggtaattgaaggagaactggggctcaggctgccacttggtttggaaagggtgtggaggtggctaatctggccctggcctaagagcaattccaggctggcgggctggaccgcctgtctccatagcaactgttgttattggtaactgaataaccatttcctagaacagcggctggagctgctgatggttttcccttctacttggaagcgagaggagccaggctctttgctgattgatcctaagtgctgagctctttgctgattgggatcttcacttgatattgggcaagctgaagccacccttctgttttatctctgacctctgccagcagagagggtgggacaaactgacttaatgtctattttccggcttcctctgagaggttgagaaaggtgctcaagggcatttagctagcaagatctagaacttgaactttgccctgtctgattctgaaacccatgctcgtgaccacatggctgttctgactctgtcccattcctctgagatctcatgaaaacctgattagccctttctcatgacaccatgagctgtctaattatttgtgaggacaggtagcatcttacagtgatccatggtctgcacaaaggctgttctagaagctgtcttacttgattatcctgcagtggtgtcagtgggaccttaaaatgctgtagccctagagttattagggctattgtgtttgttaccaagccaaaggagcttgctgcccaatgcactagaagccaatactatgacactgggtttttgagaaacaaaaagctttttaagtcgactaacaaggagacaggagtccggctcaaatctgtctccctgtgctggctttcagtcatttcattaaaaaaggttgagggggtagattctgggattagcggatgattggtggaaggaaaggggaggtctggaaagtcctcgggcacgcgcagttctctctctatgctaccacatgtgcaaatttgcggggagtgttcatgtggaacaggcagtgtttcctgtttccagaccaggcaaggtggctcacaaatggctctacgatccagagaaagtcagcagggagggttgtgatttgttattatgaaaaattaacaaattacatccaaaatgtgtttaactcctattccctttgaaaaggatctttgggtacctaattgacatattttaagagacatattggctagttagacatcaattgacatcctcattaaatatcaattaacacatatcctaacgtaatatttaattagcttgctgtagctattcttttaaaagtcaattaaatgcttggcatattcttacaagccgactccattgatagcaattatggatgaattcctgtcataagtcatttttagtggatagcagggcaaactgattctgaatatacacatcaggtctttcaagaagaatttaaaaatcaatcattagatatctaatgaaccctcttctctgctgattgtgaataaaaggcatgttcggctcttgg

SEQ ID NO: 28609 - protein, 64 aa, Homo sapiens
MAVSAFTTWSRLISRQPSQSSTCSRHLRGLLGLALLPKLEWATTHPPWPPKVLGLQPPILEEQY

SEQ ID NO: 28610 - DNA, 524 bp, Homo sapiens
ttccaatctcatgagagaagagcccctagttctcaggactttaaccctcttcctgccagcacccccaggccagtgctgaggctgacaagttgtctaaaagggcaggaggacttactcctgacatgcatctgccacccaaaccatcacaatagccttccgccttctcagtgggagtacgagtgaccctgcagcagaaggcagcaggaggtggtgacaagaatacacgtctggccctaaaacctgggtcagtcacatcctggctgccattcaccagctatatgattttaggaaagtggattcacctctgagctgcagattcctcatcaataaaatgaagacaagaacacccacccttagtatttgggtatttagactgtttccatgttttttttatttcttttatcatattcttggcattacgagtttagcattcaaggttctgaccaataagtgatcccaggggtgttcatgaaaatccccggggaaagcttttacaaaataaagaacggagtctattgagctgg

SEQ ID NO: 28611 - protein, 40 aa, Homo sapiens
MKTRTPTLSIWVFRLFPCFFYFFYHILGITSLAFKVLTNK

SEQ ID NO: 28612 - DNA, 2519 bp, Homo sapiens
cgcagccctggcgcagacgcgtgggctccgtggcgatgcggggtgttgcctgaggctccactgaagctatggcataatttgcagaatttgcacttcattacttttctgaaattcaaacaaattctgaaactgcacgagttctggctgagagctgtggatctgtgcattttgatggtgacagtgcctacgtggggatgagtgacggaaacccagagctcctgtcaaccagccagacctacaacggccagagcgagaacaacgaagactatgagatccccccgataacacctcccaacctcccggagccatccctcctgcacctgggggaccacgaagccagctaccactcgctgtgccacggcctcacccccaacggtctgctccctgcctactcctatcaggccatggacctcccagccatcatggtgtccaacatgctagcacaggacagccacctgctgtcgggccagctgcccacgatccaggagatggtccactcggaagtggctgcctatgactcgggccggcccgggcccctgctgggtcgcccggcaatgctggccagccacatgagtgccctcagccagtcccagctcatctcgcagatgggcatccggagcagcatcgcccacagctccccatcaccgccggggagcaagtcagcgaccccctctccctccagctccactcaggaagaggagtcggaagtgcatttcaagatctcgggagaaaagagaccttcagccgacccaggaaaaaaggccaagaacccgaagaagaagaaaaagaaggaccccaatgagccgcagaagcctgtgtcggcctacgcactcttcttcagagacactcaggccgccatcaagggtcagaaccccagtgccactttcggtgacgtgtccaaaatcgtggcctccatgtgggacagcctgggagaggaacagaagcaggcctacaagaggaagacagaagcagcaaagaaggaatatctgaaggccctggcagcctaccgggctagcctcgtctccaagagctccccagatcaaggtgagaccaagagcactcaggcaaacccaccagccaaaatgctcccacccaagcagcccatgtatgccatgccaggcctggcctccttcctgacgccgtcggacctgcaggccttccgcagtggggcctcccctgccagcctcgcccggacgctgggctccaagtctctgctgccaggcctcagtgcgtccccgccgccgccaccctccttcccgctcagccccacactgcaccagcagctgtcactgccccctcacgcccagggcgccctcctcagtccacctgttagcatgtccccagccccccagccccctgtcctgcccacccccatggcactccaggtgcagctggcgatgagcccctcacctccagggccacaggacttcccgcacatctctgagttccccagcagctcgggatcctgctcacctggcccatccaaccccaccagcagcggggactgggacagcagctaccccagtggggagtgtggcatcagcacctgcagcctgctccccagggacaaatcgctctacctcacctaatcccgcctccctaccatccctgaggctcgctggaaggcactgctcagagcctgaagggctgacagcagaaaagaggccctggccagaggcagggtggcccatcggagagagcagtgacacacccattgcccgggggctgagtctcttcctcaacctcccaccagactctgcagaggcagcccactgcccaccaccagcccaaagaacctgcaggaaccttccgcccgctgacctgcttgctccagggtaactgtggaccctgtcctcgccctgcgcacggtaccctatgtctggacacccggccccagctccagccccagcccaggtgggccgcccctggcggggtcgcttaccaacggacacccaccccagatgcatgggccagagggccggcccccggcatagatgtgcacatcggttttccagtgtgaacaaaagattacgaaacctagaaactgttggttccgtgtaagtagttgactacgtgttttagaactgtgctgaagacatctgtaagactattttgtgggggaaaaaagtagtttcctttaaggtaaaaagcattttatatgatccttagcacatttttaagttttatcttaagggagacgcgcacaaaagcggctgccaaaccgtttcgtcatcctcacagcaaggaccggacgcttgctagccaccccggagcactgctctccttttaatcatgtattcatctattttaaattgccggcgacgacttttgtctatttatgaagaaaccttgagaacgaagttacagcttatcctaccgtgtgtgtggttttggggtttcgtttgggtttgggttcttgacgtcgtttgcagctgtttcctggccctggcgagtgtctgtcttggtgcccagtgcttctctcaaatctctttataataaaacttctgaaaagctgaaaa

SEQ ID NO: 28613 - protein, 464 aa, Homo sapiens; identical to SEQ ID NO: 3931

SEQ ID NO: 28614 - DNA, 2605 bp, Homo sapiens
accaggagctccgaacacgcaggcccaaattggaataggagatggattttgataaaagaggttaaataacaggtttttccatttcaccttatacgaatgggatggggggtgggggtgctgggcctccagccaatagaggaccaagagttgtcaggagggcttataaagcttgctatttctggcattttttcctctttctctgctgattatgcagcagactcgcacagaggctgtcgcgggcgcgttctctcgctgcctgggcttctgtggaatgagactcgggctccttctacttgcaagacactggtgcattgcaggtgtgtttccgcagaagtttgatggtgacagtgcctacgtggggatgagtgacggaaacccagagctcctgtcaaccagccagacctacaacggccagagcgagaacaacgaagactatgagatccccccgataacacctcccaacctcccggagccatccctcctgcacctgggggaccacgaagccagctaccactcgctgtgccacggcctcacccccaacggtctgctccctgcctactcctatcaggccatggacctcccagccatcatggtgtccaacatgctagcacaggacagccacctgctgtcgggccagctgcccacgatccaggagatggtccactcggaagtggctgcctatgactcgggccggcccgggcccctgctgggtcgcccggcaatgctggccagccacatgagtgccctcagccagtcccagctcatctcgcagatgggcatccggagcagcatcgcccacagctccccatcaccgccggggagcaagtcagcgaccccctctccctccagctccactcaggaagaggagtcggaagtgcatttcaagatctcgggagaaaagagaccttcagccgacccaggaaaaaaggccaagaacccgaagaagaagaaaaagaaggaccccaatgagccgcagaagcctgtgtcggcctacgcactcttcttcagagacactcaggccgccatcaagggtcagaaccccagtgccactttcggtgacgtgtccaaaatcgtggcctccatgtgggacagcctgggagaggaacagaagcagagctccccagatcaaggtgagaccaagagcactcaggcaaacccaccagccaaaatgctcccacccaagcagcccatgtatgccatgccaggcctggcctccttcctgacgccgtcggacctgcaggccttccgcagtggggcctcccctgccagcctcgcccggacgctgggctccaagtctctgctgccaggcctcagtgcgtccccgccgccgccaccctccttcccgctcagccccacactgcaccagcagctgtcactgccccctcacgcccagggcgccctcctcagtccacctgttagcatgtccccagccccccagccccctgtcctgcccacccccatggcactccaggtgcagctggcgatgagcccctcacctccagggccacaggacttcccgcacatctctgagttccccagcagctcgggatcctgctcacctggcccatccaaccccaccagcagcggggactgggacagcagctaccccagtggggagtgtggcatcagcacctgcagcctgctccccagggacaaatcgctctacctcacctaatcccgcctccctaccatccctgaggctcgctggaaggcactgctcagagcctgaagggctgacagcagaaaagaggccctggccagaggcagggtggcccatcggagagagcagtgacacacccattgcccgggggctgagtctcttcctcaacctcccaccagactctgcagaggcagcccactgcccaccaccagcccaaagaacctgcaggaaccttccgcccgctgacctgcttgctccagggtaactgtggaccctgtcctcgccctgcgcacggtaccctatgtctggacacccggccccagctccagccccagcccaggtgggccgcccctggcggggtcgcttaccaacggacacccaccccagatgcatgggccagagggccggcccccggcatagatgtgcacatcggttttccagtgtgaacaaaagattacgaaacctagaaactgttggttccgtgtaagtagttgactacgtgttttagaactgtgctgaagacatctgtaagactattttgtgggggaaaaaagtagtttcctttaaggtaaaaagcattttatatgatccttagcacatttttaagttttatcttaagggagacgcgcacaaaagcggctgccaaaccgtttcgtcatcctcacagcaaggaccggacgcttgctagccaccccggagcactgctctccttttaatcatgtattcatctattttaaattgccggcgacgacttttgtctatttatgaagaaaccttgagaacgaagttacagcttatcctaccgtgtgtgtggttttggggtttcgtttgggtttgggttcttgacgtcgtttgcagctgtttcctggccctggcgagtgtctgtcttggtgcccagtgcttctctcaaatctctttataataaaacttctgaaaagctgaaaa

SEQ ID NO: 28615 - protein, 488 aa, Homo sapiens
MQQTRTEAVAGAFSRCLGFCGMRLGLLLLARHWCIAGVFPQKFDGDSAYVGMSDGNPELLSTSQTYNGQSENNEDYEIPPITPPNLPEPSLLHLGDHEASYHSLCHGLTPNGLLPAYSYQAMDLPAIMVSNMLAQDSHLLSGQLPTIQEMVHSEVAAYDSGRPGPLLGRPAMLASHMSALSQSQLISQMGIRSSIAHSSPSPPGSKSATPSPSSSTQEEESEVHFKISGEKRPSADPGKKAKNPKKKKKKDPNEPQKPVSAYALFFRDTQAAIKGQNPSATFGDVSKIVASMWDSLGEEQKQSSPDQGETKSTQANPPAKMLPPKQPMYAMPGLASFLTPSDLQAFRSGASPASLARTLGSKSLLPGLSASPPPPPSFPLSPTLHQQLSLPPHAQGALLSPPVSMSPAPQPPVLPTPMALQVQLAMSPSPPGPQDFPHISEFPSSSGSCSPGPSNPTSSGDWDSSYPSGECGISTCSLLPRDKSLYLT

SEQ ID NO: 28616 - DNA, 2290 bp, Homo sapiens
agctgagacagattccctaagaggtatatggaagactcttgaaaataaaggacagaaaagccttaggaaatacagatgcattcaggaatcagtacgaccaatacatatcatctttaaggttttaaaaagaaagccagaacatgtatttctcttgcttatcccaggcaggatctaaatatgcaaatatgccacttttctacaagataactcactgtgagtcaattgcaggacagacacaatacaatggagcccgaatttctcaggcaaagaaatgtggatatggacatctaagagcttttagaatataatttcaaaggcaggactgattctgtgaaaagccatcaaatgtactgtctgacagctgttcctgcccagcaaatgaacaggatacctacgacacggtgactaccatgtcatcagggccatgagatgtacagagttgaccaggaagcaacagaaatgtaactcaaaacctcaaaacagaaaaccacgtagcctatgacagtggtcgctggagtatatattttactcttgcggattagaaaaaaatctcaagccgtcaaagatagaaaagaaaaactggggaaaacaaagaattgaaatcaacatataagagacaagactacaattgctacatttatagtattagaaggaaaaaaaaaacacttcaaggtgagggaaaaaaaactggatcagagttcagaaatccctccagggcatgagcaaaatgaagtgagagactcctaggtaggaagataataccatgcctgaagttagcaaagttctagacgtgatataacagagatatcatgcagttgaaaaacaattcctggggtcacgtcatacagatggttgccccacaccgctccaggaattcaaaccaagacggcattctgggggaggctggacaaggaacaaatggctctgttgtaaaagttaaatgagattccatgcctgccactccaatggctcagggcacacctctaactatttttttttttttatttgaggtggagtctcagtctgtcacccaggctggagtccagtggtgtgatctcagctcactgcaagctctgcctctcgggttcacgccattctcctgcctcagcctcccgagtagctgggactacaggcgcccaccaccacgcccggctaattttttgtatttttagtagagatggggtttcaccgtgttagccaggatggtctcgatctcctgatctcgtgatccgcccgcctcagcctcccaaagtgctgggattacaggggtgagccaccgtgcctgccccaatttgtttatttttaattggtcctcagcagcatcaccataggaataggaaaaactaaagtggacctgcgtcaggacaccatcatccacaaaaacccagccttgttccctcaggctgcaacgggcagtaggttgggggactactttaacaagggaaaacgatggcaacaacggacaggcaaaatctcccatgctttctgaggaaatagacgtaaaaaaaacatggaagaaaatattcattaaatttttgtgtcttagcaattgcagatataaattaaggtgcatttaaaatgccaccttaagatgtctgatgtgtcctgggtgggatgagtgtatgcatgtatcgcaccttgtattatgtaatgactaggctgcttggttctactggaatattctgccacacccgtattcaacatccaacagatctgtactgaacacctgctgtatacatggaatgattctaagtcctggggatagaacagtgaatacagcagacaaaatttctgccttcatggaacttatattcttattagcaagatagaaaaaaatgtacaatatacatcctatataagcactatagagaaaataaagaatatagcagggtaaattaaaccacttgtgataggagcaatatttgagataggtcacttagacaaaccctctccgagaggaattgagccatgatacatataccaccgtatataaatactatctaggacagagggaatagccagggcaaaagcccctgtgcttattatattcaagaaccactgtgaggccaaagaaatgacagacacttggaccagcatgctgtccatggagttgtgagaagtgtttagtaataagtgaaatacattttgaaggtaaagttggcatagcatgacttctttctttctaacccagaaaccccacacaccagatttcctttctcatatggacatttgtgacaggctctctaaattgaatccccttaggctattaactgaaaggagcatggtgctt

SEQ ID NO: 28617 - protein, 55 aa, Homo sapiens
MYFSCLSQAGSKYANMPLFYKITHCESIAGQTQYNGARISQAKKCGYGHLRAFRI

SEQ ID NO: 28618 - DNA, 828 bp, Homo sapiens
gaaaagaagtatggaaggcaggggtagcaaggcggagctgtgccctgtcacggcacacagagaatgcccatggattttcacaaatgctgttaaaatgtgaaaagaaggtgtttcttttttcttcaatctgagcttcaagctaatatgggcattcagctaaatccctcctgggtcctgaaacagtatgtggttttggatttcaaagataatccctacaacttctgggagaggtgcaagtatcaaccagttggagacacagggaaagggtgatataatgcagaaagtgacttgaacaaatttacacagaaggcagtgaagtgtgattcaaattcaagcagtctagactgtgccccacacaactctgcagcataaccttgcagtatgaaaataatgcctctcatgcagatacaagtctgacaggaaaaccactgctgcttctgctgccaatttgttaagcatcgtgacaagaggagtgaccgagaagatggaaaagcccggtctgcctagtgccccttcagttggcaggattgctggcacagggccgtctaactgtgctggaaggtgttttagaagggacaagtggcactttggggagaggagtcacggatctcctggcttggccatgattcagcttttggagatttcatttagaatctgtgatctttcccatattcttcctaaaaggtattgcccttcctggcccctgcaatatagcaaggatggattttcaacaaagcaaataaaggactgattttcacaagatctgaaccccgaggagcagattgtcaacctttcttctctgctgaggacaaagacaagatcacagac

SEQ ID NO: 28619 - protein, 88 aa, Homo sapiens
MEKPGLPSAPSVGRIAGTGPSNCAGRCFRRDKWHFGERSHGSPGLAMIQLLEISFRICDLSHILPKRYCPSWPLQYSKDGFSTKQIKD

SEQ ID NO: 28620 - DNA, 614 bp, Homo sapiens
gtagcaaggcggagctgtgccctgtcacggcacacagagaatgcccatggattttcacaaatgctgttaaaatgtgaaaagaaggtgtttcttttttcttcaatctgagcttcaagctaatatgggcattcagctaaatccctcctgggtcctgaaacagtatgtggttttggatttcaaagataatccctacaacttctgggagaggtgcaagtatcaaccagttggagacacagggaaagggtgatataatgcagaaagtgacttgaacaaatttacacagaaggcagtgaagtgtgattcaaattcaagcagtctagactgtgccccacacaactctgcagcataaccttgcagtatgaaaataatgcctctcatgcagatcagggatatgagatccagtgacttacccaaagtttcaaaggaaagatgtaacagagccatctctgaacttctgctcttgggaatctacacactctttccactagttctgaccttagcaggtgtttgacccaggacttgcccaacttggtttccatttgtatagaactaatgccaaatttcaaaagaaaatattacataccataatcaataaaaacaaaatatcaaacatg

SEQ ID NO: 28621 - protein, 50 aa, Homo sapiens
MKIMPLMQIRDMRSSDLPKVSKERCNRAISELLLLGIYTLFPLVLTLAGV

SEQ ID NO: 28622 - DNA, 1083 bp, Homo sapiens; identical to SEQ ID NO: 3932

SEQ ID NO: 28623 - protein, 360 aa, Homo sapiens; identical to SEQ ID NO: 3933

SEQ ID NO: 28624 - DNA, 453 bp, Homo sapiens
cagagggatttagagcaggcgttaagcttgaagctctgaagtctgctgtgagaatgaaatgagatagcaaagctgtgcctgaagtcatgtctaccctttggactttctcttcaatttaagtcattttgagtagtgtttctgcctcttggaatctaaaggatccacatgaatgtaatgaagttatgtgccaggtgctatgaggcgatgagaaggaagaagagtatgtaccactgtcttcctggaggaagtgacacaggacctgagtcttgaaagcccagtaggacttagccagctcaagggattctgagcagagtgagccacataagaaattacgtaggagcatgacagtttgtgccgtgttttggagatcaatgcagttcattgttattggagtgaggttggcagtagtggaacattaggtggatgaataaatgtcactatctccgtccccaa

SEQ ID NO: 28625 - protein, 34 aa, Homo sapiens
MNVMKLCARCYEAMRRKKSMYHCLPGGSDTGPES

SEQ ID NO: 28626 - DNA, 3012 bp, Homo sapiens
ccggcctccgcccgcctcccgggtcagcggcgcgggtgctgcgcctagctgcgcaccatggccgggttgctggcgttgctgggtccggcaggcagggtgggcgcccgggtccggcctcgcgccacctggctcctgggcgccaccgccccctgcgccccgccgcccctggccctggccctgctcccgcccaggctagacgcccggctgctccgcacggcgcgcggggactgccgcggccaccaggaccccagccaggccacggggacaacaggcagcagcgtcagctgcacagaggagaaaaagcaaagcaagtcacagcaactgaaaaagatttttcaagagtatggcactgttggcgtgtcattgcacattggaatctcattaatttccttgggcatattttacatggttgtgtcaagtggtgtggacatgcctgcaatcctgctgaaactcggatttaaagagtccctggtacagtcaaaaatggcagcaggcacaagtaccttcgtggtggcctatgcaatccacaagctgtttgcgccagtgagaatcagcattacgctagtctctgtgcccttgattgtcagatattttcgaaaagtgggattttttaaacctccagctgcaaaaccttaatgaactcttcagtcgtacacactgaaaacctatttcttctaaattacatgatttggattggttttagggttttagggttgtagggtttcttttggagaggtagggggctaattgctatgttctcatggataaactttgccagcaaaaatcaggcttttgaacaattttaattttttgcctcataaattttgtgaatgctattcattatagggcttgtatatataatctaaaatgtcagcaaggcatcggagatgggttaacatctcaaaacaaaatagcctacaaatgttccttgtgggagactttggcgagggtctgtgggtaaaagcaccagggggttaatcttggctcagtttcctaaaaagcattgattaatttaactggcttttaaatatccccttccgctgatatttgttgtcagctgcctacagtttaatatgcagcgttcacaaaacagctgccagtgctacaattaatgaagcaaaacttaatatgtaatcacaatctaaattagcatcaatactttgacattcattacattggtttgggggaagaaaagtagttctggtatgtttcattgatccccagataccttccaatctggacatgatggggctgattccagatggtttttctgaaatttcattaaggtaggtcagcgtcatttgtctctgtttaggtaaaatataaaaaccctgcccagtagcagtggcatcgcttggttcctgatgcccatgttccagaggaattcggataccacaaacagctaagacaatctcagcttttcttagacaatcttctatctcaaacttcagacattccagaattgtcatgatgtttacactgtctgagttaaaaatcctgttcaagaaaaaaaaagattttgtatcacttcttaaaaaggaatattcatagcacttgtcacaaatagaaggcaaccatgagataatacaagccagggagaggcttgtattacatgacaggtgtaattagtctgctgagccagctttacccaatgaagggcatatgtgttagagagattagctaagagtagaaattcgagcatagaggccaggtgcggtggctcacgcctgtaatcccagcactttgggaggttgaggcaggcgtgtcacttgaggccaggagttcgagaccagcctggccaacatgatgaaaccccgtctctactacaaatacaaaaattagccgggtgtggtggcacacgcctgtagtcccagctactggggaggctgaggcagcattgcttgaacccaggaggtggaggttgcagtgagccaagatcacaccactgcactccagcctgggcgacagagggagacactgtctccaaaagaaagaaatcccagcgtagatccaaactgagacactgaggcttcgtccttatagtagtcaggagcaggcgattgaagtaattctgtcctgcggggttcagcatcatgcacgttccccctgggccattctctgatgcagggcacttgctccacactctgggaacccagattcaccagtctgccctgtcacgtagttgaaggagttgcatttatctttctggctcctaattcctttaaaattacatttgttgcagaacctccacaaggctaaataaaattacatttgtgaccatcagagaactgaataaaccattaactggccatcctggttttgcagagatcaggttgttgacagttcctggttgacccacagctacccatgtcagttatctccactaacatatccaagaatctttgtaggacaatttctccacctgcaaggtctttcaggtagaactcttcttttaaggcaattagcccattgccaaaaggttttactgtcttaaagctgtctttctgagatctaattccaaggacttctccacagctaagtgagatgcctcacaccattaggtgatgctttggacagaacagagtattttcatcttgtgtttaaagcaattccttggcttcggctcctcaccactttctatgccagtctcccatttatgtccctagtaatgcctatgcaaaaaaaaaaaaagaaaaaaaagaaaaactgatggtgaaacctacaggtttaagggcttaaatctcaaactttgttaggagtaacaggagcgtgctgagcgggcaagcaataaaacaaatcataccaaaaagccacattgctctctcctaagccccaaccccactccactcctgtggccaggggtccaaacagaaaataaccggagaagacaaggaggtcaaaggatcagggaactaagcattatgtgaattcaccagcaagatgtacagaacgcctgtgtttacattgtttttatggaactagcagaataaaacatctattttaaaaatgaaa

SEQ ID NO: 28627 - protein, 192 aa, Homo sapiens; identical to SEQ ID NO: 3935

SEQ ID NO: 28628 - DNA, 802 bp, Homo sapiens
ggcctccgcccgcctcccgggtcagcggcgcgggtgctgcgcctagctgcgcaccatggccgggttgctggcgttgctgggtccggcaggcagggtgggcgcccgggtccggcctcgcgccacctggctcctgggcgccaccgccccctgcgccccgccgcccctggccctggccctgctcccgcccaggctagacgcccggctgctccgcacggcgcgcggggactgccgcggccaccaggaccccagccaggccacggggacaacaggcagcagcgtcagctgcacagaggagaaaaagcaaagcaagtcacagcaactgaaaaagatttttcaagagtatggcactgttggcgtgtcattgcacattggaatctcattaatttccttgggcatattttacatggttgtgtcaagtggtgtggacatgcctgcaatcctgctgaaactcggatttaaagagtccctggtacagtcaaaaatggcagcaggcacaagtaccttcgtggtggcctatgcaatccacaagctgtttgcgccagtgagaatcagcattacgctagtctctgtgcccttgattgtcagatattttcgaaaagtgggattttttaaacctccagctgcaaaaccttaatgaactcttcagtcgtacacactgaaaacctatttcttctaaattacatgatttggattggttttagggttttagggttgtagggtttcttttggagaggtagggggctaattgctatgttctcatggataaactttgccagcaaaaatcaggcttttgaacaatttt

SEQ ID NO: 28629 - protein, 192 aa, Homo sapiens; identical to SEQ ID NO: 3935

SEQ ID NO: 28630 - DNA, 614 bp, Homo sapiens
cgcccctggccctggccctgctcccgcccaggctagacgcccggctgctccgcacggcgcgcggggactgccgcggccaccagtccgacaggtggcacacaggtcttggggatcctctccagagtggcaccttctgcacacaccgtgccgcctcctgatgattcttcagggcccagcccagctgttccttcctccgggaagccctctctaacgacctgtgaggtctcggatgcctccactgggcctgcttccaccccatggctgtgggtcttctctgcactcatctggaatggcctcttgtcctgcctgtcagccacattgaccttgtccccagctcaggccctggcactggagcggtgtgtgtgtatacagtggcaaagagttggcctcagactccctggattcctctctctactcacttgttgttgactttgatcaaattcccttctctctatctcaggcccctcatctgtaaaatgggacgttaataattcagacttcatagaatatgaatgtaaaatgagatatgttcatacctggcatctggtgtgtcctaaattaaggttagaaatgactataattgcagtaaatatatacagtcacaaggccccagg

SEQ ID NO: 28631 - protein, 76 aa, Homo sapiens [sequence omitted]

SEQ ID NO: 28632 - DNA, 578 bp, Homo sapiens
aaatactgtaaatcttatagccaaatcaatttcttcatttaatcccttgctgtaataattgttttctttgcttcttcccccctagtggtgtggacatgcctgcaatcctgctgaaactcggatttaaagagtccctggtacagtcaaaaatggcagcaggcacaagtaccttcgtggtggcctatgcaatccacaagctgtttgcgccagtgagaatcagcattacgctagtctctgtgcccttgattgtcagatattttcgaaaagtgggattttttaaacctccagctgcaaaaccttaatgaactcttcagtcgtacacactgaaaacctatttcttctaaattacatgatttggattggttttagggttttagggttgtagggtttcttttggagaggtagggggctaattgctatgttctcatggataaactttgccagcaaaaatcaggcttttgaacaattttaattttttgcctcataaattttgtgaattcaccagcaagatgtacagaacgcctgtgtttacattgtttttatggaactagcagaataaaacatctattttaaaaatg

SEQ ID NO: 28633 - protein, 68 aa, Homo sapiens [sequence omitted]

SEQ ID NO: 28634 - DNA, 2123 bp, Homo sapiens
agctcttggaagacttgggtccttgggtcgcaggctggagtgcaatggtgtgatctcagctcactgcaacctctgcttcctgggtttaagtgattctcctgcctcagcctcccgagtagctgggattacaggcatcatggaccgatctaaagaaaactgcatttcaggacctgttaaggctacagctccagttggaggtccaaaacgtgttctcgtgactcagcaatttccttgtcagaatccattacctgtaaatagtggccaggctcagcgggtcttgtgtccttcaaattcttcccagcgcattcctttgcaagcacaaaagcttgtctccagtcacaagccggttcagaatcagaagcagaagcaattgcaggcaaccagtgtacctcatcctgtctccaggccactgaataacacccaaaagagcaagcagcccctgccatcggcacctgaaaataatcctgaggaggaactggcatcaaaacagaaaaatgaagaatcaaaaaagaggcagtgggctttggaagactttgaaattggtcgccctctgggtaaaggaaagtttggtaatgtttatttggcaagagaaaagcaaagcaagtttattctggctcttaaagtgttatttaaagctcagctggagaaagccggagtggagcatcagctcagaagagaagtagaaatacagtcccaccttcggcatcctaatattcttagactgtatggttatttccatgatgctaccagagtctacctaattctggaatatgcaccacttggaacagtttatagagaacttcagaaactttcaaagtttgatgagcagagaactgctacttatataacagaattggcaaatgccctgtcttactgtcattcgaagagagttattcatagagacattaagccagagaacttacttcttggatcagctggagagcttaaaattgcagattttgggtggtcagtacatgctccatcttccaggaggaccactctctgtggcaccctggactacctgccccctgaaatgattgaaggtcggatgcatgatgagaaggtggatctctggagccttggagttctttgctatgaatttttagttgggaagcctccttttgaggcaaacacataccaagagacctacaaaagaatatcacgggttgaattcacattccctgactttgtaacagagggagccagggacctcatttcaagactgttgaagcataatcccagccagaggccaatgctcagagaagtacttgaacacccctggatcacagcaaattcatcaaaaccatcaaattgccaaaacaaagaatcagctagcaaacagtcttaggaatcgtgcagggggagaaatccttgagccagggctgccatataacctgacaggaacatgctactgaagtttattttaccattgactgctgccctcaatctagaacgctacacaagaaatatttgttttactcagcaggtgtgccttaacctccctattcagaaagctccacatcaataaacatgacactctgaagtgaaagtagccacgagaattgtgctacttatactggttcataatctggaggcaaggttcgactgcagccgccccgtcagcctgtgctaggcatggtgtcttcacaggaggcaaatccagagcctggctgtggggaaagtgaccactctgccctgaccccgatcagttaaggagctgtgcaataaccttcctagtacctgagtgagtgtgtaacttattgggttggcgaagcctggtaaagctgttggaatgagtatgtgattctttttaagtatgaaaataaagatatatgtacagacttgtattttttctctggtggcattcctttaggaatgctgtgtgtctgtccggcaccccggtaggcctgattgggtttctagtcctccttaaccacttatctcccatatgagagtgtgaaaaataggaacacgtgctctacctccatttagggatttgcttgggatacagaagaggccatgtgtctcagagctgttaagggcttatttttttaaaacattggagtcatagcatgtgtgtaaactttaaatatgcaaataaataagtatctatgtctgtgtgg

SEQ ID NO: 28635 - protein, 403 aa, Homo sapiens; identical to SEQ ID NO: 3937

SEQ ID NO: 28636 - DNA, 2134 bp, Homo sapiens
acaaggcagcctcgctcgagcgcaggccaatcggctttctagctagagggtttaactcctatttaaaaagaagaacctttgaattctaacggctgagctcttggaagacttgggtccttgggtcgcaggtgggagccgacgggcatcatggaccgatctaaagaaaactgcatttcaggacctgttaaggctacagctccagttggaggtccaaaacgtgttctcgtgactcagcaatttccttgtcagaatccattacctgtaaatagtggccaggctcagcgggtcttgtgtccttcaaattcttcccagcgcattcctttgcaagcacaaaagcttgtctccagtcacaagccggttcagaatcagaagcagaagcaattgcaggcaaccagtgtacctcatcctgtctccaggccactgaataacacccaaaagagcaagcagcccctgccatcggcacctgaaaataatcctgaggaggaactggcatcaaaacagaaaaatgaagaatcaaaaaagaggcagtgggctttggaagactttgaaattggtcgccctctgggtaaaggaaagtttggtaatgtttatttggcaagagaaaagcaaagcaagtttattctggctcttaaagtgttatttaaagctcagctggagaaagccggagtggagcatcagctcagaagagaagtagaaatacagtcccaccttcggcatcctaatattcttagactgtatggttatttccatgatgctaccagagtctacctaattctggaatatgcaccacttggaacagtttatagagaacttcagaaactttcaaagtttgatgagcagagaactgctacttatataacagaattggcaaatgccctgtcttactgtcattcgaagagagttattcatagagacattaagccagagaacttacttcttggatcagctggagagcttaaaattgcagattttgggtggtcagtacatgctccatcttccaggaggaccactctctgtggcaccctggactacctgccccctgaaatgattgaaggtcggatgcatgatgagaaggtggatctctggagccttggagttctttgctatgaatttttagttgggaagcctccttttgaggcaaacacataccaagagacctacaaaagaatatcacgggttgaattcacattccctgactttgtaacagagggagccagggacctcatttcaagactgttgaagcataatcccagccagaggccaatgctcagagaagtacttgaacacccctggatcacagcaaattcatcaaaaccatcaaattgccaaaacaaagaatcagctagcaaacagtcttaggaatcgtgcagggggagaaatccttgagccagggctgccatataacctgacaggaacatgctactgaagtttattttaccattgactgctgccctcaatctagaacgctacacaagaaatatttgttttactcagcaggtgtgccttaacctccctattcagaaagctccacatcaataaacatgacactctgaagtgaaagtagccacgagaattgtgctacttatactggttcataatctggaggcaaggttcgactgcagccgccccgtcagcctgtgctaggcatggtgtcttcacaggaggcaaatccagagcctggctgtggggaaagtgaccactctgccctgaccccgatcagttaaggagctgtgcaataaccttcctagtacctgagtgagtgtgtaacttattgggttggcgaagcctggtaaagctgttggaatgagtatgtgattctttttaagtatgaaaataaagatatatgtacagacttgtattttttctctggtggcattcctttaggaatgctgtgtgtctgtccggcaccccggtaggcctgattgggtttctagtcctccttaaccacttatctcccatatgagagtgtgaaaaataggaacacgtgctctacctccatttagggatttgcttgggatacagaagaggccatgtgtctcagagctgttaagggcttatttttttaaaacattggagtcatagcatgtgtgtaaactttaaatatgcaaataaataagtatctatgtctgtgtgg

SEQ ID NO: 28637 - protein, 403 aa, Homo sapiens; identical to SEQ ID NO: 3937

SEQ ID NO: 28638 - DNA, 2345 bp, Homo sapiens
acaaggcagcctcgctcgagcgcaggccaatcggctttctagctagagggtttaactcctatttaaaaagaagaacctttgaattctaacggctgagctcttggaagacttgggtccttgggtcgcaggtgggagccgacgggtgggtagaccgtgggggatatctcagtggcggacgaggacggcggggacaaggggcggctggtcggagtggcggagcgtcaagtcccctgtcggttcctccgtccctgagtgtccttggcgctgccttgtgcccgcccagcgcctttgcatccgctcctgggcaccgaggcgccctgtaggatactgcttgttacttattacagctagaggcatcatggaccgatctaaagaaaactgcatttcaggacctgttaaggctacagctccagttggaggtccaaaacgtgttctcgtgactcagcaatttccttgtcagaatccattacctgtaaatagtggccaggctcagcgggtcttgtgtccttcaaattcttcccagcgcattcctttgcaagcacaaaagcttgtctccagtcacaagccggttcagaatcagaagcagaagcaattgcaggcaaccagtgtacctcatcctgtctccaggccactgaataacacccaaaagagcaagcagcccctgccatcggcacctgaaaataatcctgaggaggaactggcatcaaaacagaaaaatgaagaatcaaaaaagaggcagtgggctttggaagactttgaaattggtcgccctctgggtaaaggaaagtttggtaatgtttatttggcaagagaaaagcaaagcaagtttattctggctcttaaagtgttatttaaagctcagctggagaaagccggagtggagcatcagctcagaagagaagtagaaatacagtcccaccttcggcatcctaatattcttagactgtatggttatttccatgatgctaccagagtctacctaattctggaatatgcaccacttggaacagtttatagagaacttcagaaactttcaaagtttgatgagcagagaactgctacttatataacagaattggcaaatgccctgtcttactgtcattcgaagagagttattcatagagacattaagccagagaacttacttcttggatcagctggagagcttaaaattgcagattttgggtggtcagtacatgctccatcttccaggaggaccactctctgtggcaccctggactacctgccccctgaaatgattgaaggtcggatgcatgatgagaaggtggatctctggagccttggagttctttgctatgaatttttagttgggaagcctccttttgaggcaaacacataccaagagacctacaaaagaatatcacgggttgaattcacattccctgactttgtaacagagggagccagggacctcatttcaagactgttgaagcataatcccagccagaggccaatgctcagagaagtacttgaacacccctggatcacagcaaattcatcaaaaccatcaaattgccaaaacaaagaatcagctagcaaacagtcttaggaatcgtgcagggggagaaatccttgagccagggctgccatataacctgacaggaacatgctactgaagtttattttaccattgactgctgccctcaatctagaacgctacacaagaaatatttgttttactcagcaggtgtgccttaacctccctattcagaaagctccacatcaataaacatgacactctgaagtgaaagtagccacgagaattgtgctacttatactggttcataatctggaggcaaggttcgactgcagccgccccgtcagcctgtgctaggcatggtgtcttcacaggaggcaaatccagagcctggctgtggggaaagtgaccactctgccctgaccccgatcagttaaggagctgtgcaataaccttcctagtacctgagtgagtgtgtaacttattgggttggcgaagcctggtaaagctgttggaatgagtatgtgattctttttaagtatgaaaataaagatatatgtacagacttgtattttttctctggtggcattcctttaggaatgctgtgtgtctgtccggcaccccggtaggcctgattgggtttctagtcctccttaaccacttatctcccatatgagagtgtgaaaaataggaacacgtgctctacctccatttagggatttgcttgggatacagaagaggccatgtgtctcagagctgttaagggcttatttttttaaaacattggagtcatagcatgtgtgtaaactttaaatatgcaaataaataagtatctatgtctgtgtgg

SEQ ID NO: 28639 - protein, 403 aa, Homo sapiens; identical to SEQ ID NO: 3937

SEQ ID NO: 28640 - DNA, 2230 bp, Homo sapiens
acaaggcagcctcgctcgagcgcaggccaatcggctttctagctagagggtttaactcctatttaaaaagaagaacctttgaattctaacggctgagctcttggaagacttgggtccttgggtcgcagggtctcactccattgcccaggccagagtgcggggatatttgataagaaacttcagtgaaggccgggcgcggtggctcatgcccgtaatcccagcattttcggaggccgaggcatcatggaccgatctaaagaaaactgcatttcaggacctgttaaggctacagctccagttggaggtccaaaacgtgttctcgtgactcagcaatttccttgtcagaatccattacctgtaaatagtggccaggctcagcgggtcttgtgtccttcaaattcttcccagcgcattcctttgcaagcacaaaagcttgtctccagtcacaagccggttcagaatcagaagcagaagcaattgcaggcaaccagtgtacctcatcctgtctccaggccactgaataacacccaaaagagcaagcagcccctgccatcggcacctgaaaataatcctgaggaggaactggcatcaaaacagaaaaatgaagaatcaaaaaagaggcagtgggctttggaagactttgaaattggtcgccctctgggtaaaggaaagtttggtaatgtttatttggcaagagaaaagcaaagcaagtttattctggctcttaaagtgttatttaaagctcagctggagaaagccggagtggagcatcagctcagaagagaagtagaaatacagtcccaccttcggcatcctaatattcttagactgtatggttatttccatgatgctaccagagtctacctaattctggaatatgcaccacttggaacagtttatagagaacttcagaaactttcaaagtttgatgagcagagaactgctacttatataacagaattggcaaatgccctgtcttactgtcattcgaagagagttattcatagagacattaagccagagaacttacttcttggatcagctggagagcttaaaattgcagattttgggtggtcagtacatgctccatcttccaggaggaccactctctgtggcaccctggactacctgccccctgaaatgattgaaggtcggatgcatgatgagaaggtggatctctggagccttggagttctttgctatgaatttttagttgggaagcctccttttgaggcaaacacataccaagagacctacaaaagaatatcacgggttgaattcacattccctgactttgtaacagagggagccagggacctcatttcaagactgttgaagcataatcccagccagaggccaatgctcagagaagtacttgaacacccctggatcacagcaaattcatcaaaaccatcaaattgccaaaacaaagaatcagctagcaaacagtcttaggaatcgtgcagggggagaaatccttgagccagggctgccatataacctgacaggaacatgctactgaagtttattttaccattgactgctgccctcaatctagaacgctacacaagaaatatttgttttactcagcaggtgtgccttaacctccctattcagaaagctccacatcaataaacatgacactctgaagtgaaagtagccacgagaattgtgctacttatactggttcataatctggaggcaaggttcgactgcagccgccccgtcagcctgtgctaggcatggtgtcttcacaggaggcaaatccagagcctggctgtggggaaagtgaccactctgccctgaccccgatcagttaaggagctgtgcaataaccttcctagtacctgagtgagtgtgtaacttattgggttggcgaagcctggtaaagctgttggaatgagtatgtgattctttttaagtatgaaaataaagatatatgtacagacttgtattttttctctggtggcattcctttaggaatgctgtgtgtctgtccggcaccccggtaggcctgattgggtttctagtcctccttaaccacttatctcccatatgagagtgtgaaaaataggaacacgtgctctacctccatttagggatttgcttgggatacagaagaggccatgtgtctcagagctgttaagggcttatttttttaaaacattggagtcatagcatgtgtgtaaactttaaatatgcaaataaataagtatctatgtctgtgtgg

SEQ ID NO: 28641 - protein, 403 aa, Homo sapiens; identical to SEQ ID NO: 3937

SEQ ID NO: 28642 - DNA, 2553 bp, Homo sapiens
acaaggcagcctcgctcgagcgcaggccaatcggctttctagctagagggtttaactcctatttaaaaagaagaacctttgaattctaacggctgagctcttggaagacttgggtccttgggtcgcaggtgggagccgacgggtgggtagaccgtgggggatatctcagtggcggacgaggacggcggggacaaggggcggctggtcggagtggcggagcgtcaagtcccctgtcggttcctccgtccctgagtgtccttggcgctgccttgtgcccgcccagcgcctttgcatccgctcctgggcaccgaggcgccctgtaggatactgcttgttacttattacagctagagggtctcactccattgcccaggccagagtgcggggatatttgataagaaacttcagtgaaggccgggcgcggtggctcatgcccgtaatcccagcattttcggaggccgaggctggagtgcaatggtgtgatctcagctcactgcaacctctgcttcctgggtttaagtgattctcctgcctcagcctcccgagtagctgggattacaggcatcatggaccgatctaaagaaaactgcatttcaggacctgttaaggctacagctccagttggaggtccaaaacgtgttctcgtgactcagcaatttccttgtcagaatccattacctgtaaatagtggccaggctcagcgggtcttgtgtccttcaaattcttcccagcgcattcctttgcaagcacaaaagcttgtctccagtcacaagccggttcagaatcagaagcagaagcaattgcaggcaaccagtgtacctcatcctgtctccaggccactgaataacacccaaaagagcaagcagcccctgccatcggcacctgaaaataatcctgaggaggaactggcatcaaaacagaaaaatgaagaatcaaaaaagaggcagtgggctttggaagactttgaaattggtcgccctctgggtaaaggaaagtttggtaatgtttatttggcaagagaaaagcaaagcaagtttattctggctcttaaagtgttatttaaagctcagctggagaaagccggagtggagcatcagctcagaagagaagtagaaatacagtcccaccttcggcatcctaatattcttagactgtatggttatttccatgatgctaccagagtctacctaattctggaatatgcaccacttggaacagtttatagagaacttcagaaactttcaaagtttgatgagcagagaactgctacttatataacagaattggcaaatgccctgtcttactgtcattcgaagagagttattcatagagacattaagccagagaacttacttcttggatcagctggagagcttaaaattgcagattttgggtggtcagtacatgctccatcttccaggaggaccactctctgtggcaccctggactacctgccccctgaaatgattgaaggtcggatgcatgatgagaaggtggatctctggagccttggagttctttgctatgaatttttagttgggaagcctccttttgaggcaaacacataccaagagacctacaaaagaatatcacgggttgaattcacattccctgactttgtaacagagggagccagggacctcatttcaagactgttgaagcataatcccagccagaggccaatgctcagagaagtacttgaacacccctggatcacagcaaattcatcaaaaccatcaaattgccaaaacaaagaatcagctagcaaacagtcttaggaatcgtgcagggggagaaatccttgagccagggctgccatataacctgacaggaacatgctactgaagtttattttaccattgactgctgccctcaatctagaacgctacacaagaaatatttgttttactcagcaggtgtgccttaacctccctattcagaaagctccacatcaataaacatgacactctgaagtgaaagtagccacgagaattgtgctacttatactggttcataatctggaggcaaggttcgactgcagccgccccgtcagcctgtgctaggcatggtgtcttcacaggaggcaaatccagagcctggctgtggggaaagtgaccactctgccctgaccccgatcagttaaggagctgtgcaataaccttcctagtacctgagtgagtgtgtaacttattgggttggcgaagcctggtaaagctgttggaatgagtatgtgattctttttaagtatgaaaataaagatatatgtacagacttgtattttttctctggtggcattcctttaggaatgctgtgtgtctgtccggcaccccggtaggcctgattgggtttctagtcctccttaaccacttatctcccatatgagagtgtgaaaaataggaacacgtgctctacctccatttagggatttgcttgggatacagaagaggccatgtgtctcagagctgttaagggcttatttttttaaaacattggagtcatagcatgtgtgtaaactttaaatatgcaaataaataagtatctatgtctgtgtgg

SEQ ID NO: 28643 - protein, 403 aa, Homo sapiens; identical to SEQ ID NO: 3937

SEQ ID NO: 28644 - DNA, 530 bp, Homo sapiens
ggccagagtgcggggatatttgataagaaacttcagtgaaggccgggcgcggtggctcatgcccgtaatcccagcattttcggaggccgaggctggagtgcaatggtgtgatctcagctcactgcaacctctgcttcctgggtttaagtgattctcctgcctcagcctcccgagtagctgggattacaggcatcatggaccgatctaaagaaaactgcatttcaggacctgttaaggctacagctccagttggaggtccaaaacgtgttctcgtgactcagcaatttccttgtcagaatccattacctcctgtgctaggcatggtgtcttcacaggaggcaaatccagagcctggctgtggggaaagtgaccactctgccctgaccccgatcagttaaggagctgtgcaataaccttcctagtacctgagtgagtgtgtaacttattgggttggcgaagcctggtaaagctgttggaatgagtatgtgattctttttaagtatgaaaataaagatatatgtacagacttg

SEQ ID NO: 28645 - protein, 67 aa, Homo sapiens
MDRSKENCISGPVKATAPVGGPKRVLVTQQFPCQNPLPPVLGMVSSQEANPEPGCGESDHSALTPIS

SEQ ID NO: 28646 - DNA, 1087 bp, Homo sapiens
gaacccggaagtggtggagccaacggccagccagacctgtggcagtcccagccccagggtgctctccgcggtcggccatttatcggtgaagcaacagccccttgacgtcaagcttgacgcattggagataaagtccaaggaggtgaactaacctttgaacgtgccactggcagggaaactgtcttccttttctccaagatgtacagaaccaaagtgggcttgaaggaccgccagcagctctacaagctgatcattagccagctgctatatgacggctacatcagcatcgccaatggcctcatcaatgaaatcaagcctcagtctgtgtgtgcaccctcggagcagctcctgcatctcatcaaactcggtagattgtgaacacaaatccatacgtcccatggcaaggttttagatattttcatatggcagaatttttcaagattattcttgttttgtttcagtacctagtatgagccgggtacttcagtaagtaagtagttcagcatgagttcaggaagtagctcagtaagtaaggggtaaagcaaagttcagattatgaagaccttaagctggttctggcctgagggtctttgtacacattatctggaacactctgtcagacatattactgacttccttcagattttacatcaaatgtcatctgagttctcttaactcctcctaaaataatccgaccctttcgtgcattttcccggttaccctgccatagcgatcccatttgttttataacagttgttttgaaatttcctttatcatttgggctgtttcccatgggatccttacctccacacttcccacctactgctgcccccttgtcaaaaaagactacaagttgagtaaggatcaggaccttgtattattcagcagtatatcctggagcctacctggctaataatagaaagcactcaataaaatattgaattaccaaacatgttaataccctttgacttggcagtgccaattgtgagcatttctcctggggaaataaaatggacaaactgcaatgccaacaacatggaattagctgtaaatttttaaatatccataaaagtgaatactataacat

SEQ ID NO: 28647 - protein, 59 aa, Homo sapiens
MYRTKVGLKDRQQLYKLIISQLLYDGYISIANGLINEIKPQSVCAPSEQLLHLIKLGRL

SEQ ID NO: 28648 - DNA, 1845 bp, Homo sapiens
aactaacctttgaacgtgccagtaagtaagatggcgagaaaagcaagagagagtgggaccgatcgatagcgcagcggtcggcttggcgccctttcagcgtgcgcagtgaacgtgcgctcggagcggtagattgggcaggattcgcgcctccatttttccaggagagagcgggataccaagagaaccggaccagctgctggcagggaaactgtcttccttttctccaagatgtacagaaccaaagtgggcttgaaggaccgccagcagctctacaagctgatcattagccagctgctatatgacggctacatcagcatcgccaatggcctcatcaatgaaatcaagcctcagtctgtgtgtgcaccctcggagcagctcctgcatctcatcaaactcggaatggaaaacgatgacaccgcagttcagtatgcaattggtcgttcagatactgttgcccctggcacagggattgacctggaatttgatgcagatgttcagactatgtccccagaggcttctgagtacgaaacatgctatgtcacatcacataaaggaccatgccgtgtagctacctatagtagagatggacagttaatagctactgggtctgctgatgcttcgataaagatacttgacacagagaggatgttggccaaaagtgccatgccaatagaggtcatgatgaatgagaccgcacaacaaaatatggaaaaccacccagtgattcgaactctttatgaccatgtggatgaagtcacgtgccttgctttccacccaacagaacagatcctggcttctggttcaagggattatactcttaaattatttgattattccaaaccatcagcaaaaagagccttcaaatacattcaggaagctgaaatgttacgttccatctcttttcatccttctggagactttatacttgtcggaactcagcatcctactcttcgcctttatgatatcaacacctttcaatgttttgtctcttgcaatcctcaagatcaacacaccgatgctatatgttccgttaattacaattctagtgccaatatgtacgtaactggaagcaaggacggctgcatcaaattatgggatggtgtttcaaatcgatgcatcacaacttttgagaaagcacatgacggtgctgaagtttgttctgccattttttccaaaaattctaaatacattctctcaagtggaaaagactctgtagctaaactttgggaaatatcaacgggacgaacactggtcagatacacgggcgcgggtttaagtggacgccaggtgcaccggacacaggctgtgtttaaccacaccgaggactatgtgttgctgcccgacgagaggacgatcagtctttgctgctgggactcgaggacagccgagcggagaaacctgctgtcgttggggcacaacaatattgtacgctgcatagtgcactcccccaccaaccccgggttcatgacgtgcagcgatgacttcagagcgcggttttggtaccggagatcgaccactgactgagccaccctctccgtagggttctttctcgaggactctaccctcctcccccacgtcctgtctcagctgcagtcgtaagtccgtgcaccatccttgacgttttgctgccacctctgtccacattcttcttggatttgtataaaagaatctttttttaccttgatgtagaatcatggtggaaaaagttggaaacacagatctgtgcagttctacattcactgattattacagtgtgattttcatcggttttgtaagtacaggacttgccgtttcttttgatctcttgattgaaggaggatagggcattaaagtgcttttgacatg

SEQ ID NO: 28649 - protein, 431 aa, Homo sapiens; identical to SEQ ID NO: 3949

SEQ ID NO: 28650 - DNA, 2056 bp, Homo sapiens
aactaacctttgaacgtgccagtaagtaagatggcgagaaaagcaagagagagtgggaccgatcgatagcgcagcggtcggcttggcgccctttcagcgtgcgcagtgaacgtgcgctcggagcggtagattgggcaggattcgcgcctccatttttccaggagagagcgggataccaagagaaccggaccagctgctggcagggaaactgtcttccttttctccaagatgtacagaaccaaagtgggcttgaaggaccgccagcagctctacaagctgatcattagccagctgctatatgacggctacatcagcatcgccaatggcctcatcaatgaaatcaagcctcagtctgtgtgtgcaccctcggagcagctcctgcatctcatcaaactcggaatggaaaacgatgacaccgcagttcagtatgcaattggtcgttcagatactgttgcccctggcacagggattgacctggaatttgatgcagatgttcagactatgtccccagaggcttctgagtacgaaacatgctatgtcacatcacataaaggaccatgccgtgtagctacctatagtagagatggacagttaatagctactgggtctgctgatgcttcgataaagatacttgacacagagaggatgttggccaaaagtgccatgccaatagaggtcatgatgaatgagaccgcacaacaaaatatggaaaaccacccagtgattcgaactctttatgaccatgtggatgaagtcacgtgccttgctttccacccaacagaacagatcctggcttctggttcaagggattatactcttaaattatttgattattccaaaccatcagcaaaaagagccttcaaatacattcaggaagctgaaatgttacgttccatctcttttcatccttctggagactttatacttgtcggaactcagcatcctactcttcgcctttatgatatcaacacctttcaatgttttgtctcttgcaatcctcaagatcaacacaccgatgctatatgttccgttaattacaattctagtgccaatatgtacgtaactggaagcaaggacggctgcatcaaattatgggatggtgtttcaaatcgatgcatcacaacttttgagaaagcacatgacggtgctgaagtttgttctgccattttttccaaaaattctaaatacattctctcaagtggaaaagactctgtagctaaactttgggaaatatcaacgggacgaacactggtcagatacacgggcgcgggtttaagtggacgccaggtgcaccggacacaggctgtgtttaaccacaccgaggactatgtgttgctgcccgacgagaggacgatcagtctttgctgctgggactcgaggacagccgagcggagaaacctgctgtcgttggggcacaacaatattgtacgctgcatagtgcactcccccaccaaccccgggttcatgacgtgcagcgatgacttcagagcgcggttttggtaccggagatcgaccactgactgagccaccctctccgtagggttctttctcgaggactctaccctcctcccccacgtcctgtctcagctgcagtcgtaagtccgtgcaccatccttgacgttttgctgccacctctgtccacattcttcttggatttgtataaaagaatctttttttaccttgatgtagaatcatggtggaaaaagttggaaacacagatctgtgcagttctacattcactgattattacagtgtgattttcatcggttttgtaagtacaggacttgccgtttcttttgatctcttgattgaaggaggatagggcattaaagtgcttttgacatgaggaattttcatttggttcttctgtcaactttcttgcttattctgctgaaccctctgtgtatttcccttccaggtatatttgaacagataagcaggcatgcagctctgagactcctgagttttatgccattatcaaaagcattttcaagaatccctcaattctatcctgaaatgatgttattctgataataaagctcagatctgcaacttt

SEQ ID NO: 28651 - protein, 431 aa, Homo sapiens; identical to SEQ ID NO: 3949

SEQ ID NO: 28652 - DNA, 2616 bp, Homo sapiens
aactaacctttgaacgtgccagtaagtaagatggcgagaaaagcaagagagagtgggaccgatcgatagcgcagcggtcggcttggcgccctttcagcgtgcgcagtgaacgtgcgctcggagcggtagattgggcaggattcgcgcctccatttttccaggagagagcgggataccaagagaaccggaccagctgctggcagggaaactgtcttccttttctccaagatgtacagaaccaaagtgggcttgaaggaccgccagcagctctacaagctgatcattagccagctgctatatgacggctacatcagcatcgccaatggcctcatcaatgaaatcaagcctcagtctgtgtgtgcaccctcggagcagctcctgcatctcatcaaactcggaatggaaaacgatgacaccgcagttcagtatgcaattggtcgttcagatactgttgcccctggcacagggattgacctggaatttgatgcagatgttcagactatgtccccagaggcttctgagtacgaaacatgctatgtcacatcacataaaggaccatgccgtgtagctacctatagtagagatggacagttaatagctactgggtctgctgatgcttcgataaagatacttgacacagagaggatgttggccaaaagtgccatgccaatagaggtcatgatgaatgagaccgcacaacaaaatatggaaaaccacccagtgattcgaactctttatgaccatgtggatgaagtcacgtgccttgctttccacccaacagaacagatcctggcttctggttcaagggattatactcttaaattatttgattattccaaaccatcagcaaaaagagccttcaaatacattcaggaagctgaaatgttacgttccatctcttttcatccttctggagactttatacttgtcggaactcagcatcctactcttcgcctttatgatatcaacacctttcaatgttttgtctcttgcaatcctcaagatcaacacaccgatgctatatgttccgttaattacaattctagtgccaatatgtacgtaactggaagcaaggacggctgcatcaaattatgggatggtgtttcaaatcgatgcatcacaacttttgagaaagcacatgacggtgctgaagtttgttctgccattttttccaaaaattctaaatacattctctcaagtggaaaagactctgtagctaaactttgggaaatatcaacgggacgaacactggtcagatacacgggcgcgggtttaagtggacgccaggtgcaccggacacaggctgtgtttaaccacaccgaggactatgtgttgctgcccgacgagaggacgatcagtctttgctgctgggactcgaggacagccgagcggagaaacctgctgtcgttggggcacaacaatattgtacgctgcatagtgcactcccccaccaaccccgggttcatgacgtgcagcgatgacttcagagcgcggttttggtaccggagatcgaccactgactgagccaccctctccgtagggttctttctcgaggactctaccctcctcccccacgtcctgtctcagctgcagtcgtaagtccgtgcaccatccttgacgttttgctgccacctctgtccacattcttcttggatttgtataaaagaatctttttttaccttgatgtagaatcatggtggaaaaagttggaaacacagatctgtgcagttctacattcactgattattacagtgtgattttcatcggttttgtaagtacaggacttgccgtttcttttgatctcttgattgaaggaggatagggcattaaagtgcttttgacatgaggaattttcatttggttcttctgtcaactttcttgcttattctgctgaaccctctgtgtatttcccttccaggtatatttgaacagataagcaggcatgcagctctgagactcctgagttttatgccattatcaaaagcattttcaagaatccctcaattctatcctgaaatgatgttattctgataataaagctcagatctgcaactttattgttatatatttttcacttctgtaaaattaatggccagtttttcctgacaatttataggaacagtatctttcaacatactccctacattatccttcaatatctgcaatacttgtctttagtaactgtatttctggtaagattatgatttcatgagaaacaattgaaaatatatccgatctaattaaattaggtcagcctgctattgctctcaggtgttgcctgtcttcacgaatgattagtatcgattgacctctttcttaggtggttttaagtcttcagttctcgtcagcatgaactaacttctcatcatggaggcacatagtaactgcattctcagaagatttatgcagttaaccaattgatacaagttttctttttcttgaatttttttttttttaattgaggcacagtcttgctctgtcacccaggttggagtgcagtggcgtgatctcagctcactgcaagctccgcctcctggtttcacaccattttcctgcctcagcctcccaagtagctgggactacaggcacccaccaccacgcccggctaattttttt

SEQ ID NO: 28653 - protein, 431 aa, Homo sapiens; identical to SEQ ID NO: 3949

SEQ ID NO: 28654 - DNA, 435 bp, Homo sapiens
gcgcagtgaacgtgcgctcggagcggtagattgggcaggattcgcgcctccatttttccaggagagagcgggataccaagagaaccggaccagctgctggcagggaaactgtcttccttttctccaagatgtacagaaccaaagtgggcttgaaggaccgccagcagctctacaagctgatcattagccagctgctatatgacggctacatcagcatcgccaatggcctcatcaatgaaatcaagcctcagtctgtgtgtgcaccctcggagcagctcctgcatctcatcaaactcggtagattgtgaacacaaatccatacgtcccatggcaagtgttgcccctggcacagggattgacctggaatttgatgcagatgttcagactatgtccccagaggcttctgagtacgaaacatgctatgtcacatcacat

SEQ ID NO: 28655 - protein, 78 aa, Homo sapiens [sequence omitted]

SEQ ID NO: 28656 - DNA, 1396 bp, Homo sapiens
tactatgttcatgtactacttcatatacttgaatacattgaatgattttattcagtgaactgatgcttacaaagtacttagcatgacggtatctggcatgcaggaagtgcttaatgttattggttattattaacaccatcagtgtcatacagtgtgtaagaaatcaggctctgggccaggcgcagtggctcgcgcccgtaatcccagcattttgggattacaggcgtgagccaccgcgcccagccttcctgaagctttttagaacatgacagtacttctctggattcagcactagcagagtcagagaactctgaactccccttgtacaaacataaactttgctttatatttatcccaaaaaacaaataccttatgatctgcataggagtacctagaaatataatctgggatcatttgataaaaatagtaaatagattgaagtaaaagtcattgctttatattataggaagttttgttttgttttgttttgtttgttttgtttttgagacggagtttcgctcttgtcccccaggctttagtgcaatggcgcgatctcggctcaccgcagcctccgccacctgggttcaaacgattctcctgcctcaggctcccgagtaactaggattacaggcgtgcgccaccatgcccggctaattttgtattttttttagtagagacggggtttctccatgttggtcaggctggtctcgaactcccaacctcaggtaatccgcccgcctcagcctcccaaagtgctaggattacaggcgtgagccaccacgcgcggccccatcatacgaagttactgaagttattgcgtaaacattctgttttagtcatccttgaggatcgttttaactccttgatctgtaaaactgtcttaagcatcttaacatgttacatcacagggttttagctcagatttccaaagagccatattttttgatgcatatttccagttgaattccagtgtgaatttccagttgtactttgcattctgattctttgatatttgaacttggccatctgtgggtgctactctcgtaagactaaaaggcacctactaaatacgaacaaggataaccagttctaccaaaaacattaccaaccaaacctcccctgttcttttttcagactttccttttgctttcaacctcttaaactgtaaaggagagatttaatgtttccctattattctgctttgactcacatactaaaatgaccacatggcactccattgaatcttttcagttgttcacgaattaaaataatgcccatgttttacagtttttcgagtagtctcagcaatggatctgtagtttcaggacctgtttttaaaagatcaagatacttttatgtgtttcagaagtagctgttttttcattttttgtgggtt

SEQ ID NO: 28657 - protein, 51 aa, Homo sapiens
MLLVIINTISVIQCVRNQALGQAQWLAPVIPAFWDYRREPPRPAFLKLFRT

SEQ ID NO: 28658 - DNA, 851 bp, Homo sapiens
ggcgcgggtttaagtggacgccaggtgcaccggacacaggctgtgtttaaccacaccgaggactatgtgttgctgcccgacgagaggacgatcagtctttgctgctgggactcgaggacagccgagcggagaaacctgctgtcgttggggcacaacaatattgtacgctgcatagtgcactcccccaccaaccccgggttcatgacgtgcagcgatgacttcagagcgcggttttggtaccggagatcgaccactgactgagccaccctctccgtagggttctttctcgaggactctaccctcctcccccacgtcctgtctcagctgcagtcgtaagtccgtgcaccatccttgacgttttgctgccacctctgtccacattcttcttggatttgtataaaagaatctttttttaccttgatgtagaatcatggtggaaaaagttggaaacacagatctgtgcagttctacattcactgattattacagtgtgattttcatcggttttgtatatttgaacagataagcaggcatgcagctctgagactcctgagttttatgccattatcaaaagcattttcaagaatccctcaattctatcctgaaatgatgttattctgataataaagctcagatctgcaactttattgttatatatttttcacttctgtaaaattaatggccagtttttcctgacaatttataggaacagtatctttcaacatactccctacattatccttcaatatctgcaatacttgtctttagtaactgtatttctggtaagattatgatttcatgagaaacaattgaaaatatatccgatctaattaaattaggtcagcctgcta

SEQ ID NO: 28659 - protein, 31 aa, Homo sapiens
MVEKVGNTDLCSSTFTDYYSVIFIGFVYLNR

SEQ ID NO: 28660 - DNA, 675 bp, Homo sapiens
ggcgcgggtttaagtggacgccaggtgcaccggacacaggctgtgtttaaccacaccgaggactatgtgttgctgcccgacgagaggacgatcagtctttgctgctgggactcgaggacagccgagcggagaaacctgctgtcgttggggcacaacaatattgtacgctgcatagtgcactcccccaccaaccccgggttcatgacgtgcagcgatgacttcagagcgcggttttggtaccggagatcgaccactgactgagccaccctctccgtagggttctttctcgaggactctaccctcctcccccacgtcctgtctcagctgcagtcgtatatttgaacagataagcaggcatgcagctctgagactcctgagttttatgccattatcaaaagcattttcaagaatccctcaattctatcctgaaatgatgttattctgataataaagctcagatctgcaactttattgttatatatttttcacttctgtaaaattaatggccagtttttcctgacaatttataggaacagtatctttcaacatactccctacattatccttcaatatctgcaatacttgtctttagtaactgtatttctggtaagattatgatttcatgagaaacaattgaaaatatatccgatctaattaaattaggtcagcctgcta

SEQ ID NO: 28661 - protein, 36 aa, Homo sapiens
MCCCPTRGRSVFAAGTRGQPSGETCCRWGTTILYAA

SEQ ID NO: 28662 - DNA, 2619 bp, Homo sapiens
gaagagtggtgtttttttcttcttcttcttcttttgtggtttcacatagcaaatgagtgacagtctctacttacagacaaagtgagacgtcaggcattgagacatagctccatagaattcagtttctgagaaccagccagaagcatgcagtgacattgcacaatctgcctctgaagctggagatactagctgcagagctcaggggagctgctccacatcaccgacatgaagggaacaggcatcatggactgtgcgcccaaggcactcctggccagggcactttatgacaactgccctgactgctctgacgagctggctttcagcagaggggacatcctgaccattctggagcaacacgtgccagaaagcgagggttggtggaagtgtttgctccatgggaggcaaggcctggcccctgccaaccgcctccaaatcctcacggaggtcgctgcagacaggccgtgccccccattcctgagaggcctggaagaagctcctgccagctcagaggagacctatcaggtgcccactctaccccgccctcccactccaggccccgtttatgagcagatgaggagttgggcggaggggccccagccccctactgcccaagtctatgaattccccgaccctcccaccagtgccagaatcatctgtgaaaagactctcagctttccaaaacaggccatcctcacgcttcccagacctgtccgggcctcactgccgactctgccttcccaggtgtatgacgtgcctacccagcaccggggccccgtggtcctgaaggagccagagaagcagcagttatatgacataccagccagccccaagaaggcaggactccatcccccagacagccaagcaagtgggcagggtgttcccctgatatcagtgactaccttaagaagaggcggttacagcacattaccaaatcctcagaaatcggaatggatttatgacactccagtgtctccaggaaaggccagcgtcagaaacacgcctctcaccagctttgcggaagaatcaaggccccacgctctccccagttccagctccactttctacaatcctccaagtggcagatccaggtccctcactccacaactgaataacaatgtgcccatgcagaaaaaactcagccttccagaaattccttcttatggctttcttgtacccagaggcacatttcctttggatgaagatgtcagctacaaggttccttcaagctttctgattccccgagtggaacagcagaacaccaagcccaatatttatgacatccctaaagcaacgtcgagtgtttctcaggctgggaaggagctggagaaagccaaggaggtgtcagagaattccgcgggccataattcctcatggttctccagacggacaacttccccatctcctgaaccggacagattatcaggttccagttctgacagcagagctagcatcgtttcctcgtgctccaccacatccaccgacgactcctccagctcttcctcggaggagtcagcaaaggagctctccttggacctggatgtggccaaggagacagtgatggctctgcagcacaaggtggtcagctctgtcgctggcctgatgctctttgtcagcaggaagtggagattccgagactatctggaggccaacattgatgcaatccacaggtccactgatcacatagaagaatctgtaagagaatttctggattttgcccgaggagtccatgggactgcctgtaacctcactgacagtaaccttcagaacagaattcgggaccagatgcagaccatctccaactcctaccgcatcctgcttgaaacaaaggaaagcttggataatcgcaattggcctctggaagttcttgtgactgacagtgtccagaacagcccagatgaccttgagaggtttgtcatggtggcacggatgcttccagaagacatcaagaggtttgcctccattgtcattgccaatggaaggctcctttttaagcggaactgtgaaaaggaagagactgtgcagttgaccccaaatgcagaatttaagtgtgaaaaatacatccagcctccccaaagagaaactgaatcacaccaaaagagtaccccttccactaagcaaagggaagatgaacactcttctgaactattaaagaaaaatagggcaaatatctgtggacagaatcctggccctcttatacctcagccttcgagtcaacagactcctgagaggaaaccccgcttatctgaacactgccggctctactttggggcgctcttcaaagccatcagcgcatttcacggcagcctcagcagcagccagcccgcggagatcatcactcagagcaagctggtcatcatggtgggacagaagctggtggacacgctgtgcatggagacccaggagagggacgtgcgcaacgagatcctccgtggcagcagtcacctctgcagcctgctcaaggacgtagcgctggccactaagaatgccgtgctcacgtaccccagccctgccgcgctggggcacctccaggcggaggctgagaagctggagcaacacacgcggcagttcagagggacactgggatgaggactgtctacctcccttcctcctctgctcacc

SEQ ID NO: 28663 - protein, 786 aa, Homo sapiens; identical to SEQ ID NO: 3955

SEQ ID NO: 28664 - DNA, 2731 bp, Homo sapiens
actcttatcgtgctttccagaaagtttgcctgctgggagagtctttttgatcgtttcccatgtgttgtcagatagctccatagaattcagtttctgagaaccagccagaagcatgcagtgacattgcacaatctgcctctgaagctggagatactagctgcagagctcaggggagctgctccacatcaccgacatgaagggaacaggcatcatggactgtgcgcccaaggcactcctggccagggcactttatgacaactgccctgactgctctgacgagctggctttcagcagaggggacatcctgaccattctggagcaacacgtgccagaaagcgagggttggtggaagtgtttgctccatgggaggcaaggcctggcccctgccaaccgcctccaaatcctcacggaggtcgctgcagacaggccgtgccccccattcctgagaggcctggaagaagctcctgccagctcagaggagacctatcaggtgcccactctaccccgccctcccactccaggccccgtttatgagcagatgaggagttgggcggaggggccccagccccctactgcccaagtctatgaattccccgaccctcccaccagtgccagaatcatctgtgaaaagactctcagctttccaaaacaggccatcctcacgcttcccagacctgtccgggcctcactgccgactctgccttcccaggtgtatgacgtgcctacccagcaccggggccccgtggtcctgaaggagccagagaagcagcagttatatgacataccagccagccccaagaaggcaggactccatcccccagacagccaagcaagtaatcctggccctcttatacctcagccttcgagtcaacagactcctgagaggaaaccccgcttatctgaacactgccggctctactttggggcgctcttcaaagccatcagcgcatttcacggcagcctcagcagcagccagcccgcggagatcatcactcagagcaagctggtcatcatggtgggacagaagctggtggacacgctgtgcatggagacccaggagagggacgtgcgcaacgagatcctccgtggcagcagtcacctctgcagcctgctcaaggacgtagcgctggccactaagaatgccgtgctcacgtaccccagccctgccgcgctggggcacctccaggcggaggctgagaagctggagcaacacacgcggcagttcagagggacactgggatgaggactgtctacctcccttcctcctctgctcacctctcagcttcacacccacaacttgtgcaactctgccctatgggaaaagccagccggggcatacaccaatgagctgaaacagacctggtgcccaaagctggtagtaccaagtggctaagcaaccccagggcattgacttaccccgcagggggtcaggaaagagagtcaggtatgaggtaaagaccttgtgaagtttagcatatatggagtatgcagtatcagcttgaagtgacttcgcagaaataatattttatattgattaaatgtgtgcatgttttgtttgttttttgagacaaagtctcactctgtcacacaggctggagtgcagtggcgcgatctcagctcactgcaacctccgccttctgggttgaagcaattctcccgcctcagcctccagagtagctggtactacaggtgtgcgccaccatgcccagctaatttttgtatttttttttaatgaaaggtctcacatatttattactgaacccagccaaccaatgcattcataacagattcagaaagaaaaaatatattcccaataaaacatgtacaattctccagagagcggtgacattttcagcttgatgtggtaacatgactgtgaccttcagacagcataaatatgtgtgccctctcatgtgcaattccttatagggctagcttggttcttcttcaatgtctccttttggagttgtacctgattttattaccagttttcatctgaatccactggggagtggggcgattttgttttaatttctcggtcaggaatcacttaatcctggaagtcttatgagaagacatggcaagaagcagagtcaagcacacaccacaatggcagagaaaggaagagctaatttttgtatttttagtagagtcggggtttcaccatattagccaggctggtctggaactcctgacctcaggccatcccccgcctcggcctcccaaagtgctgggattacaggcctgagccaccattcctggcatgtacgtgttttaaattcactcatttaacacttatgtattggatgcctactacatgccaagttctaggtgctggagacatagcagtgtttcagagggcttgccctcttggaacttatgatctagtaggggagtcaggcagtaaagcggtgaagaaatacatacacagtatagcaggtgccaggaaaaacgtaagtaggggaagtgcaagagaacttatcttcaaatggttaatttttattgcatccattagataatagagtaagttttttgttgttttgaattgaattagttctgtgagattggtacaaattatgtatgtgtcttgcacccataaatatatatttttgctatgttactttaacctaaagatagatgttatatttacaacataacatgatctgttgggttctctattaatttatttcatacattatagattctgggttgataaattctgctcaatttg

SEQ ID NO: 28665 - protein, 349 aa, Homo sapiens
MKGTGIMDCAPKALLARALYDNCPDCSDELAFSRGDILTILEQHVPESEGWWKCLLHGRQGLAPANRLQILTEVAADRPCPPFLRGLEEAPASSEETYQVPTLPRPPTPGPVYEQMRSWAEGPQPPTAQVYEFPDPPTSARIICEKTLSFPKQAILTLPRPVRASLPTLPSQVYDVPTQHRGPVVLKEPEKQQLYDIPASPKKAGLHPPDSQASNPGPLIPQPSSQQTPERKPRLSEHCRLYFGALFKAISAFHGSLSSSQPAEIITQSKLVIMVGQKLVDTLCMETQERDVRNEILRGSSHLCSLLKDVALATKNAVLTYPSPAALGHLQAEAEKLEQHTRQFRGTLG

SEQ ID NO: 28666 - DNA, 2849 bp, Homo sapiens
ctttttgatcgtttcccatgtgttgtcagatagctccatagaattcagtttctgagaaccagccagaagcatgcagtgacattgcacaatctgcctctgaagctggagatactagctgcagagctcaggggagctgctccacatcaccgacatgaagggaacaggcatcatggactgtgcgcccaaggcactcctggccagggcactttatgacaactgccctgactgctctgacgagctggctttcagcagaggggacatcctgaccattctggagcaacacgtgccagaaagcgagggttggtggaagtgtttgctccatgggaggcaaggcctggcccctgccaaccgcctccaaatcctcacggaggtcgctgcagacaggccgtgccccccattcctgagaggcctggaagaagctcctgccagctcagaggagacctatcaggtgcccactctaccccgccctcccactccaggccccgtttatgagcagatgaggagttgggcggaggggccccagccccctactgcccaagtctatgaattccccgaccctcccaccagtgccagaatcatctgtgaaaagactctcagctttccaaaacaggccatcctcacgcttcccagacctgtccgggcctcactgccgactctgccttcccaggtgtatgacgtgcctacccagcaccggggccccgtggtcctgaaggagccagagaagcagcagttatatgacataccagccagccccaagaaggcaggactccatcccccagacagccaagcaagtgggcagggtgttcccctgatatcagtgactaccttaagaagaggcggttacagcacattaccaaatcctcagaaatcggaatggatttatgacactccagtgtctccaggaaaggccagcgtcagaaacacgcctctcaccagctttgcggaagaatcaaggccccacgctctccccagttccagctccactttctacaatcctccaagtggcagatccaggtccctcactccacaactgaataacaatgtgcccatgcagaaaaaactcagccttccagaaattccttcttatggctttcttgtacccagaggcacatttcctttggatgaagatgtcagctacaaggttccttcaagctttctgattccccgagtggaacagcagaacaccaagcccaatatttatgacatccctaaagcaacgtcgagtgtttctcaggctgggaaggagctggagaaagccaaggaggtgtcagagaattccgcgggccataattcctcatggttctccagacggacaacttccccatctcctgaaccggacagattatcaggttccagttctgacagcagagctagcatcgtttcctcgtgctccaccacatccaccgacgactcctccagctcttcctcggaggagtcagcaaaggagctctccttggacctggatgtggccaaggagacagtgatggctctgcagcacaaggtggtcagctctgtcgctggcctgatgctctttgtcagcaggaagtggagattccgagactatctggaggccaacattgatgcaatccacaggtccactgatcacatagaagaatctgtaagagaatttctggattttgcccgaggagtccatgggactgcctgtaacctcactgacagtaaccttcagaacagaattcgggaccagatgcagaccatctccaactcctaccgcatcctgcttgaaacaaaggaaagcttggataatcgcaattggcctctggaagttcttgtgactgacagtgtccagaacagcccagatgaccttgagaggtttgtcatggtggcacggatgcttccagaagacatcaagaggtttgcctccattgtcattgccaatggaaggctcctttttaagcggaactgtgaaaaggaagagactgtgcagttgaccccaaatgcagaatttaagtgtgaaaaatacatccagcctccccaaagagaaactgaatcacaccaaaagagtaccccttccactaagcaaagggaagatgaacactcttctgaactattaaagaaaaatagggcaaatatctgtggacaggtgagttcagagttccaagtgatcgaaaaaggggcttcaattgttacctggagtagtggctactaagatgctgagactctttccatagtgtataggctttggggagacactggttccattttctagaaaataaaatttatgaaagtaaaattcttgatgaaatcttattaacaagtcagataaagataggtcagcataggcagataggtcagttgatttggatttcttccgaaaacttttggcgttcaagtttaccatattagaattaaaagggatttttaaatttcttaaaaatttattatttgagtagatttttaaaacctcaccaccaagtctccttgcatttttgaaagttataaatttagtcattctcagtgtgtttcttagcaacgaaagaggaagtagaaacattctttcaaattgcccatggtctgatcagcccccagacttcagctactcttagaaatacttttctgaggctgggcctggtggcttatgcctgtaattccaacgctttgggaggccaacgcaggaggatcccttgaggcaggagtttgagaccaggctgggcaacatagtgagaccccagctgtacaaaatttatttttaaatatccaggtgtagtggctcatgcacttgggagtctgagtgggggtatcccttgagaccaggagtttggggttgcagagagctatgatggtgccactgcactccagccttggtgacagagcaagagctaatctct

SEQ ID NO: 28667 - protein, 672 aa, Homo sapiens
MKGTGIMDCAPKALLARALYDNCPDCSDELAFSRGDILTILEQHVPESEGWWKCLLHGRQGLAPANRLQILTEVAADRPCPPFLRGLEEAPASSEETYQVPTLPRPPTPGPVYEQMRSWAEGPQPPTAQVYEFPDPPTSARIICEKTLSFPKQAILTLPRPVRASLPTLPSQVYDVPTQHRGPVVLKEPEKQQLYDIPASPKKAGLHPPDSQASGQGVPLISVTTLRRGGYSTLPNPQKSEWIYDTPVSPGKASVRNTPLTSFAEESRPHALPSSSSTFYNPPSGRSRSLTPQLNNNVPMQKKLSLPEIPSYGFLVPRGTFPLDEDVSYKVPSSFLIPRVEQQNTKPNIYDIPKATSSVSQAGKELEKAKEVSENSAGHNSSWFSRRTTSPSPEPDRLSGSSSDSRASIVSSCSTTSTDDSSSSSSEESAKELSLDLDVAKETVMALQHKVVSSVAGLMLFVSRKWRFRDYLEANIDAIHRSTDHIEESVREFLDFARGVHGTACNLTDSNLQNRIRDQMQTISNSYRILLETKESLDNRNWPLEVLVTDSVQNSPDDLERFVMVARMLPEDIKRFASIVIANGRLLFKRNCEKEETVQLTPNAEFKCEKYIQPPQRETESHQKSTPSTKQREDEHSSELLKKNRANICGQVSSEFQVIEKGASIVTWSSGY

SEQ ID NO: 28668 - DNA, 1564 bp, Homo sapiens
gcgctcttcaaagccatcagcgcatttcacggcagcctcagcagcagccagcccgcggagatcatcactcagagcaagctggtcatcatggtgggacagaagctggtggacacgctgtgcatggagacccaggagagggacgtgcgcaacgagatcctccgtggcagcagtcacctctgcagcctgctcaaggacgtagcgctggccactaagaatgccgtgctcaccaaccccagggcattgacttaccccgcagggggtcaggaaagagagtcaggtatgaggtaaagaccttgtgaagtttagcatatatggagtatgcagtatcagcttgaagtgacttcgcagaaataatattttatattgattaaatgtgtgcatgttttgtttgttttttgagacaaagtctcactctgtcacacaggctggagtgcagtggcgcgatctcagctcactgcaacctccgccttctgggttgaagcaattctcccgcctcagcctccagagtagctggtactacaggtgtgcgccaccatgcccagctaatttttgtatttttttttaatgaaaggtctcacatatttattactgaacccagccaaccaatgcattcataacagattcagaaagaaaaaatatattcccaataaaacatgtacaattctccagagagcggtgacattttcagcttgatgtggtaacatgactgtgaccttcagacagcataaatatgtgtgccctctcatgtgcaattccttatagggctagcttggttcttcttcaatgtctccttttggagttgtacctgattttattaccagttttcatctgaatccactggggagtggggcgattttgttttaatttctcggtcaggaatcacttaatcctggaagtcttatgagaagacatggcaagaagcagagtcaagcacacaccacaatggcagagaaaggaagagctaatttttgtatttttagtagagtcggggtttcaccatattagccaggctggtctggaactcctgacctcaggccatcccccgcctcggcctcccaaagtgctgggattacaggcctgagccaccattcctggcatgtacgtgttttaaattcactcatttaacacttatgtattggatgcctactacatgccaagttctaggtgctggagacatagcagtgtttcagagggcttgccctcttggaacttatgatctagtaggggagtcaggcagtaaagcggtgaagaaatacatacacagtatagcaggtgccaggaaaaacgtaagtaggggaagtgcaagagaacttatcttcaaatggttaatttttattgcatccattagataatagagtaagttttttgttgttttgaattgaattagttctgtgagattggtacaaattatgtatgtgtcttgcacccataaatatatatttttgctatgttactttaacctaaagatagatgttatatttacaacataacatgatctgttgggttctctattaatttatttcatacattatagattctgggttgataaattctgctcaatttg

SEQ ID NO: 28669 - protein, 66 aa, Homo sapiens
MVGQKLVDTLCMETQERDVRNEILRGSSHLCSLLKDVALATKNAVLTNPRALTYPAGGQERESGMR

SEQ ID NO: 28670 - DNA, 726 bp, Homo sapiens
gcggatttcgccggaaatcccggaagtgacagctttgggggtttgctgctggctctgactcccgtcctgcgatgggttgcgacgggggaacaatccccaagaggcatgaactggtgaaggggccgaagaaggttgagaaggtcgacaaagatgctgaattagtggcccaatggaactattgtactctaagtcaggaaatattaagacgaccaatagttgcctgtgaacttggcagactttataacaaagatgccgtcattgaatttctcttggacaaatctgcagaaaaggctcttgggaaggcagcatctcacattaaaagcattaagaatgtgacagagctgaagctttctgataatcctgcctgggaaggggataaaggaaacactaaaggtgacaagcacgatgacctccagcgggcgcgtttcatctgccccgttgtgggcctggagatgaacggccgacacaggttctgcttccttcggtgctgcggctgtgtgttttctgagcgagccttgaaagagataaaagcggaagtttgccacacgtgtggggctgccttccaggaggatgatgtcatcatgctcaatggcaccaaggaggatgtggacgtgctgaagacaaggatggaggagagaaggctgagagcgaagctggaaaagaaaacaaagaaacccaaggcagcagagtctgtttcaaaaccagatgtcagtgaaggtaagatcc

SEQ ID NO: 28671 - protein, 217 aa, Homo sapiens
MGCDGGTIPKRHELVKGPKKVEKVDKDAELVAQWNYCTLSQEILRRPIVACELGRLYNKDAVIEFLLDKSAEKALGKAASHIKSIKNVTELKLSDNPAWEGDKGNTKGDKHDDLQRARFICPVVGLEMNGRHRFCFLRCCGCVFSERALKEIKAEVCHTCGAAFQEDDVIMLNGTKEDVDVLKTRMEERRLRAKLEKKTKKPKAAESVSKPDVSEGK

SEQ ID NO: 28672 - DNA, 1533 bp, Homo sapiens
gcggatttcgccggaaatcccggaagtgacagctttgggggtttgctgctggctctgactcccgtcctgcgatgggttgcgacgggggaacaatccccaagaggcatgaactggtgaaggggccgaagaaggttgagaaggtcgacaaagatgctgaattagtggcccaatggaactattgtactctaagtcaggaaatattaagacgaccaatagttgcctgtgaacttggcagactttataacaaagatgccgtcattgaatttctcttggacaaatctgcagaaaaggctcttgggaaggcagcatctcacattaaaagcattaagaatgtgacagagctgaagctttctgataatcctgcctgggaaggggataaaggaaacactaaaggtgacaagcacgatgacctccagcgggcgcgtttcatctgccccgttgtgggcctggagatgaacggccgacacaggttctgcttccttcggtgctgcggctgtgtgttttctgagcgagccttgaaagagataaaagcggaagtttgccacacgtgtggggctgccttccaggaggatgatgtcatcatgctcaatggcaccaaggaggatgtggacgtgctgaagacaaggatggaggagagaaggctgagagcgaagctggaaaagaaaacaaagaaacccaaggcagcagagtctgtttcaaaaccagatgtcagtgaagaagccccagggccatcaaaagttaagacagggaagcctgaagaagccagccttgattctagagagaagaaaaccaacttggctcccaaaagcacagcaatgaatgagagctcttctggaaaagctgggaagcctccgtgtggagccacaaagaggtccatcgctgacagtgaagaatcggaggcctacaagtccctctttaccactcacagctccgccaagcgctccaaggaggagtctgcccactgggtcacccacacgtcctactgcttctgaagcccgcactgccaccgctcctgccccagaaggttgtttagtttccacgtaggcaggtcgctttgtgcctctgagtgcgctgctgtgtgttctctctatagttctgtgtcataaagctgtcctggccagccttcaagctggtgtggccactcttgatgtgaggcgtgtcggttccaggggggacatgggaggggctgcacagtggcccgaggtcatgcttgcttccacctgcaggtgcatttggtcctttccatggccaggaagccctgtgggctgcactttttatgcttgcagtaacaagagactccagagtcctcaccggtgcagagttggcacatattaattaactaaaattctaatgatcttgctaccagcaataaatcaagtaggccaagtgaaactgggctttaaaaaggatccttgttggtctagctaaatactgttaggggagtgtgccccatctcatcatttcgaagatagcagagtcatagttgggcacccagtgattgggttcaaaaataaagctggtctgcctcttctc

SEQ ID NO: 28673 - protein, 306 aa, Homo sapiens
MGCDGGTIPKRHELVKGPKKVEKVDKDAELVAQWNYCTLSQEILRRPIVACELGRLYNKDAVIEFLLDKSAEKALGKAASHIKSIKNVTELKLSDNPAWEGDKGNTKGDKHDDLQRARFICPVVGLEMNGRHRFCFLRCCGCVFSERALKEIKAEVCHTCGAAFQEDDVIMLNGTKEDVDVLKTRMEERRLRAKLEKKTKKPKAAESVSKPDVSEEAPGPSKVKTGKPEEASLDSREKKTNLAPKSTAMNESSSGKAGKPPCGATKRSIADSEESEAYKSLFTTHSSAKRSKEESAHWVTHTSYCF

SEQ ID NO: 28674 - DNA, 1558 bp, Homo sapiens
gcggatttcgccggaaatcccggaagtgacagctttgggggtttgctgctggctctgactcccgtcctgcgatgggttgcgacgggggaacaatccccaagaggcatgaactggtgaaggggccgaagaaggttgagaaggtcgacaaagatgctgaattagtggcccaatggaactattgtactctaagtcaggaaatattaagacgaccaatagttgcctgtgaacttggcagactttataacaaagatgccgtcattgaatttctcttggacaaatctgcagaaaaggctcttgggaaggcagcatctcacattaaaagcattaagaatgtgacagagctgaagctttctgataatcctgcctgggaaggggataaaggaaacactaaaggtgacaagcacgatgacctccagcgggcgcgtttcatctgccccgttgtgggcctggagatgaacggccgacacaggttctgcttccttcggtgctgcggctgtgtgttttctgagcgagccttgaaagagataaaagcggaagtttgccacacgtgtggggctgccttccaggaggatgatgtcatcatgctcaatggcaccaaggaggatgtggacgtgctgaagacaaggatggaggagagaaggctgagagcgaagctggaaaagaagccccagggccatcaaaagttaagacagggaagcctgaagaagccagccttgattctagagagaagaaaaccaacttggctcccaaaagcacagcaatgaatgagagctcttctggaaaagctgggaagcctccgtgtggagccacaaagaggtccatcgctgacagtgaagaatcggaggcctacaagtccctctttaccactcacagctccgccaagcgctccaaggaggagtctgcccactgggtcacccacacgtcctactgcttctgaagcccgcactgccaccgctcctgccccagaaggttgtttagtttccacgtaggcaggtcgctttgtgcctctgagtgcgctgctgtgtgttctctctatagttctgtgtcataaagctgtcctggccagccttcaagctggtgtggccactcttgatgtgaggcgtgtcggttccaggggggacatgggaggggctgcacagtggcccgaggtcatgcttgcttccacctgcaggtgcatttggtcctttccatggccaggaagccctgtgggctgcactttttatgcttgcagtaacaagagactccagagtcctcaccggtgcagagttggcacatattaattaactaaaattctaatgatcttgctaccagcaataaatcaagtaggccaagtgaaactgggctttaaaaaggatggatttcaaatacactgtgcccactagaagcttcgaagggcctcgtccctctgctacagccctgggaggagccaggatccttgttggtctagctaaatactgttaggggagtgtgccccatctcatcatttcgaagatagcagagtcatagttgggcacccagtgattgggttcaaaaataaagctggtctgcctcttctctc

SEQ ID NO: 28675 - protein, 230 aa, Homo sapiens
MGCDGGTIPKRHELVKGPKKVEKVDKDAELVAQWNYCTLSQEILRRPIVACELGRLYNKDAVIEFLLDKSAEKALGKAASHIKSIKNVTELKLSDNPAWEGDKGNTKGDKHDDLQRARFICPVVGLEMNGRHRFCFLRCCGCVFSERALKEIKAEVCHTCGAAFQEDDVIMLNGTKEDVDVLKTRMEERRLRAKLEKKPQGHQKLRQGSLKKPALILERRKPTWLPKAQQ

SEQ ID NO: 28676 - DNA, 1613 bp, Homo sapiens
gcggatttcgccggaaatcccggaagtgacagctttgggggtttgctgctggctctgactcccgtcctgcgatgggttgcgacgggggaacaatccccaagaggcatgaactggtgaaggggccgaagaaggttgagaaggtcgacaaagatgctgaattagtggcccaatggaactattgtactctaagtcaggaaatattaagacgaccaatagttgcctgtgaacttggcagactttataacaaagatgccgtcattgaatttctcttggacaaatctgcagaaaaggctcttgggaaggcagcatctcacattaaaagcattaagaatgtgacagagctgaagctttctgataatcctgcctgggaaggggataaaggaaacactaaaggtgacaagcacgatgacctccagcgggcgcgtttcatctgccccgttgtgggcctggagatgaacggccgacacaggttctgcttccttcggtgctgcggctgtgtgttttctgagcgagccttgaaagagataaaagcggaagtttgccacacgtgtggggctgccttccaggaggatgatgtcatcatgctcaatggcaccaaggaggatgtggacgtgctgaagacaaggatggaggagagaaggctgagagcgaagctggaaaagaaaacaaagaaacccaaggcagcagagtctgtttcaaaaccagatgtcagtgaagaagccccagggccatcaaaagttaagacagggaagcctgaagaagccagccttgattctagagagaagaaaaccaacttggctcccaaaagcacagcaatgaatgagagctcttctggaaaagctgggaagcctccgtgtggagccacaaagaggtccatcgctgacagtgaagaatcggaggcctacaagtccctctttaccactcacagctccgccaagcgctccaaggaggagtctgcccactgggtcacccacacgtcctactgcttctgaagcccgcactgccaccgctcctgccccagaaggttgtttagtttccacgtaggcaggtcgctttgtgcctctgagtgcgctgctgtgtgttctctctatagttctgtgtcataaagctgtcctggccagccttcaagctggtgtggccactcttgatgtgaggcgtgtcggttccaggggggacatgggaggggctgcacagtggcccgaggtcatgcttgcttccacctgcaggtgcatttggtcctttccatggccaggaagccctgtgggctgcactttttatgcttgcagtaacaagagactccagagtcctcaccggtgcagagttggcacatattaattaactaaaattctaatgatcttgctaccagcaataaatcaagtaggccaagtgaaactgggctttaaaaaggatggatttcaaatacactgtgcccactagaagcttcgaagggcctcgtccctctgctacagccctgggaggagccaggatccttgttggtctagctaaatactgttaggggagtgtgccccatctcatcatttcgaagatagcagagtcatagttgggcacccagtgattgggttcaaaaataaagctggtctgcctcttctctc

SEQ ID NO: 28677 - protein, 306 aa, Homo sapiens; identical to SEQ ID NO: 28673

SEQ ID NO: 28678 - DNA, 2122 bp, Homo sapiens
gcggatttcgccggaaatcccggaagtgacagctttgggggtttgctgctggctctgactcccgtcctgcgatgggttgcgacgggggaacaatccccaagaggcatgaactggtgaaggggccgaagaaggttgagaaggtcgacaaagatgctgaattagtggcccaatggaactattgtactctaagtcaggaaatattaagacgaccaatagttgcctgtgaacttggcagactttataacaaagatgccgtcattgaatttctcttggacaaatctgcagaaaaggctcttgggaaggcagcatctcacattaaaagcattaagaatgtgacagagctgaagctttctgataatcctgcctgggaaggggataaaggaaacactaaaggtgacaagcacgatgacctccagcgggcgcgtttcatctgccccgttgtgggcctggagatgaacggccgacacaggttctgcttccttcggtgctgcggctgtgtgttttctgagcgagccttgaaagagataaaagcggaagtttgccacacgtgtggggctgccttccaggaggatgatgtcatcatgctcaatggcaccaaggaggatgtggacgtgctgaagacaaggatggaggagagaaggctgagagcgaagctggaaaagaagccccagggccatcaaaagttaagacagggaagcctgaagaagccagccttgattctagagagaagaaaaccaacttggctcccaaaagcacagcaatgaatgagagctcttctggaaaagctgggaagcctccgtgtggagccacaaagaggtccatcgctgacagtgaagaatcggaggcctacaagtccctctttaccactcacagctccgccaagcgctccaaggaggagtctgcccactgggtcacccacacgtcctactgcttctgaagcccgcactgccaccgctcctgccccagaaggttgtttagtttccacgtaggcaggtcgctttgtgcctctgagtgcgctgctgtgtgttctctctatagttctgtgtcataaagctgtcctggccagccttcaagctggtgtggccactcttgatgtgaggcgtgtcggttccaggggggacatgggaggggctgcacagtggcccgaggtcatgcttgcttccacctgcaggtgcatttggtcctttccatggccaggaagccctgtgggctgcactttttatgcttgcagtaacaagagactccagagtcctcaccggtgcagagttggcacatattaattaactaaaattctaatgatcttgctaccagcaataaatcaagtaggccaagtgaaactgggctttaaaaaggatggatttcaaatacactgtgcccactagaagcttcgaagggcctcgtccctctgctacagccctgggaggagccaggatccttgttggtctagctaaatactgttaggggagtgtgccccatctcatcatttcgaagatagcagagtcatagttgggcacccagtgattgggttcaaaaataaagctggtctgcctcttctctcctctgtgtttttatcttttctaccttctgctcatgcttgggtaagaacattgcagccgttgcattggtgattacaggagtcattccatgaagtcagaagaacccacccttctctcctccagcagatggtaaagggagaatcgtacccaaaaagaggtgcattttatctgcctataagttgtgttgacgtcaatagctagtgaaacttctcatgagactcctaatgaagaaccaagagccacaggcctctgcgtggctttctgcacacggtggtatgactgagatagtgactggttctctatacagaccccggggccctgggtttccttcagaagcagaaggagctgtgggaggtgaatggtgggaggtgaacaggcaggttctgtgggagacacagacacgtgggcagaactccagggagaggccagcaagggagaaccatgtgtggccctgctttttctcaaaccctgtgtggttcccggcttcacagttgatgggaaggtttggccccaaggatattttgacattgtgagtatagagcattttaataaaaattaagtgatgc

SEQ ID NO: 28679 - protein, 230 aa, Homo sapiens; identical to SEQ ID NO: 28675

SEQ ID NO: 28680 - DNA, 1131 bp, Homo sapiens
cggaagtgacagctttgggggtttgctgctggctctgactcccgtcctgcgatgggttgcgacgggggaacaatccccaagaggcatgaactggtgaaggggccgaagaaggttgagaaggatgtggacgtgctgaagacaaggatggaggagagaaggctgagagcgaagctggaaaagaaaacaaagaaacccaaggcagcagagtctgtttcaaaaccagatgtcagtgaagaagccccagggccatcaaaagttaagacagggaagcctgaagaagccagccttgattctagagagaagaaaaccaacttggctcccaaaagcacagcaatgaatgagagctcttctggaaaagctgggaagcctccgtgtggagccacaaagaggtccatcgctgacagtgaagaatcggaggcctacaagtccctctttaccactcacagctccgccaagcgctccaaggaggagtctgcccactgggtcacccacacgtcctactgcttctgaagcccgcactgccaccgctcctgccccagaaggttgtttagtttccacgtaggcaggtcgctttgtgcctctgagtgcgctgctgtgtgttctctctatagttctgtgtcataaagctgtcctggccagccttcaagctggtgtggccactcttgatgtgaggcgtgtcggttccaggggggacatgggaggggctgcacagtggcccgaggtcatgcttgcttccacctgcaggtgcatttggtcctttccatggccaggaagccctgtgggctgcactttttatgcttgcagtaacaagagactccagagtcctcaccggtgcagagttggcacatattaattaactaaaattctaatgatcttgctaccagcaataaatcaagtaggccaagtgaaactgggctttaaaaaggatggatttcaaatacactgtgcccactagaagcttcgaagggcctcgtccctctgctacagccctgggaggagccaggatccttgttggtctagctaaatactgttaggggagtgtgccccatctcatcatttcgaagatagcagagtcatagttgggcacccagtgattgggttcaaaaataaagctggtctgcctcttctctc

SEQ ID NO: 28681 - protein, 152 aa, Homo sapiens
MGCDGGTIPKRHELVKGPKKVEKDVDVLKTRMEERRLRAKLEKKTKKPKAAESVSKPDVSEEAPGPSKVKTGKPEEASLDSREKKTNLAPKSTAMNESSSGKAGKPPCGATKRSIADSEESEAYKSLFTTHSSAKRSKEESAHWVTHTSYCF

SEQ ID NO: 28682 - DNA, 1695 bp, Homo sapiens
cggaagtgacagctttgggggtttgctgctggctctgactcccgtcctgcgatgggttgcgacgggggaacaatccccaagaggcatgaactggtgaaggggccgaagaaggttgagaaggatgtggacgtgctgaagacaaggatggaggagagaaggctgagagcgaagctggaaaagaaaacaaagaaacccaaggcagcagagtctgtttcaaaaccagatgtcagtgaagaagccccagggccatcaaaagttaagacagggaagcctgaagaagccagccttgattctagagagaagaaaaccaacttggctcccaaaagcacagcaatgaatgagagctcttctggaaaagctgggaagcctccgtgtggagccacaaagaggtccatcgctgacagtgaagaatcggaggcctacaagtccctctttaccactcacagctccgccaagcgctccaaggaggagtctgcccactgggtcacccacacgtcctactgcttctgaagcccgcactgccaccgctcctgccccagaaggttgtttagtttccacgtaggcaggtcgctttgtgcctctgagtgcgctgctgtgtgttctctctatagttctgtgtcataaagctgtcctggccagccttcaagctggtgtggccactcttgatgtgaggcgtgtcggttccaggggggacatgggaggggctgcacagtggcccgaggtcatgcttgcttccacctgcaggtgcatttggtcctttccatggccaggaagccctgtgggctgcactttttatgcttgcagtaacaagagactccagagtcctcaccggtgcagagttggcacatattaattaactaaaattctaatgatcttgctaccagcaataaatcaagtaggccaagtgaaactgggctttaaaaaggatggatttcaaatacactgtgcccactagaagcttcgaagggcctcgtccctctgctacagccctgggaggagccaggatccttgttggtctagctaaatactgttaggggagtgtgccccatctcatcatttcgaagatagcagagtcatagttgggcacccagtgattgggttcaaaaataaagctggtctgcctcttctctcctctgtgtttttatcttttctaccttctgctcatgcttgggtaagaacattgcagccgttgcattggtgattacaggagtcattccatgaagtcagaagaacccacccttctctcctccagcagatggtaaagggagaatcgtacccaaaaagaggtgcattttatctgcctataagttgtgttgacgtcaatagctagtgaaacttctcatgagactcctaatgaagaaccaagagccacaggcctctgcgtggctttctgcacacggtggtatgactgagatagtgactggttctctatacagaccccggggccctgggtttccttcagaagcagaaggagctgtgggaggtgaatggtgggaggtgaacaggcaggttctgtgggagacacagacacgtgggcagaactccagggagaggccagcaagggagaaccatgtgtggccctgctttttctcaaaccctgtgtggttcccggcttcacagttgatgggaaggtttggccccaaggatattttgacattgtgagtatagagcattttaataaaaattaagtgatgc

SEQ ID NO: 28683 - protein, 152 aa, Homo sapiens; identical to SEQ ID NO: 28681

SEQ ID NO: 28684 - DNA, 411 bp, Homo sapiens
ctctgactcccgtcctgcgatgggttgcgacgggggaacaatccccaagaggcatgaactggtgaaggggccgaagaaggttgagaagtacagatatgtaaaaacttaaaagaagaaagaccctaggaaagaagagagaccctgatttggcatttgaagaatgggaaagagtggtgcagtctacacagtgaaggaaaaaacaagaacgggaaggagtgggacatggaatatgatgtcgacaaagatgctgaattagtggcccaatggaactattgtactctaagtcaggaaatattaagacgaccaatagttgcctgtgaacttggcagactttataacaaagatgccgtcattgaatttctcttggacaaatctgcagaaaaggctcttgggaaggcagcatctcacatt

SEQ ID NO: 28685 - protein, 62 aa, Homo sapiens
MEYDVDKDAELVAQWNYCTLSQEILRRPIVACELGRLYNKDAVIEFLLDKSAEKALGKAASH

SEQ ID NO: 28686 - DNA, 1064 bp, Homo sapiens
gcagactttataacaaagatgccgtcattgaatttctcaatggcaccaaggaggatgtggacgtgctgaagacaaggatggaggagagaaggctgagagcgaagctggaaaagaaaacaaagaaacccaaggcagcagagtctgtttcaaaaccagatgtcagtgaagaagccccagggccatcaaaagttaagacagggaagcctgaagaagccagccttgattctagagagaagaaaaccaacttggctcccaaaagcacagcaatgaatgagagctcttctggaaaagctgggaagcctccgtgtggagccacaaagaggtccatcgctgacagtgaagaatcggaggcctacaagtccctctttaccactcacagctccgccaagcgctccaaggaggagtctgcccactgggtcacccacacgtcctactgcttctgaagcccgcactgccaccgctcctgccccagaaggttgtttagtttccacgtaggcaggtcgctttgtgcctctgagtgcgctgctgtgtgttctctctatagttctgtgtcataaagctgtcctggccagccttcaagctggtgtggccactcttgatgtgaggcgtgtcggttccaggggggacatgggaggggctgcacagtggcccgaggtcatgcttgcttccacctgcaggtgcatttggtcctttccatggccaggaagccctgtgggctgcactttttatgcttgcagtaacaagagactccagagtcctcaccggtgcagagttggcacatattaattaactaaaattctaatgatcttgctaccagcaataaatcaagtaggccaagtgaaactgggctttaaaaaggatggatttcaaatacactgtgcccactagaagcttcgaagggcctcgtccctctgctacagccctgggaggagccaggatccttgttggtctagctaaatactgttaggggagtgtgccccatctcatcatttcgaagatagcagagtcatagttgggcacccagtgattgggttcaaaaataaagctggtctgcctcttctctc

SEQ ID NO: 28687 - protein, 121 aa, Homo sapiens
MEERRLRAKLEKKTKKPKAAESVSKPDVSEEAPGPSKVKTGKPEEASLDSREKKTNLAPKSTAMNESSSGKAGKPPCGATKRSIADSEESEAYKSLFTTHSSAKRSKEESAHWVTHTSYCF

SEQ ID NO: 28688 - DNA, 1628 bp, Homo sapiens
gcagactttataacaaagatgccgtcattgaatttctcaatggcaccaaggaggatgtggacgtgctgaagacaaggatggaggagagaaggctgagagcgaagctggaaaagaaaacaaagaaacccaaggcagcagagtctgtttcaaaaccagatgtcagtgaagaagccccagggccatcaaaagttaagacagggaagcctgaagaagccagccttgattctagagagaagaaaaccaacttggctcccaaaagcacagcaatgaatgagagctcttctggaaaagctgggaagcctccgtgtggagccacaaagaggtccatcgctgacagtgaagaatcggaggcctacaagtccctctttaccactcacagctccgccaagcgctccaaggaggagtctgcccactgggtcacccacacgtcctactgcttctgaagcccgcactgccaccgctcctgccccagaaggttgtttagtttccacgtaggcaggtcgctttgtgcctctgagtgcgctgctgtgtgttctctctatagttctgtgtcataaagctgtcctggccagccttcaagctggtgtggccactcttgatgtgaggcgtgtcggttccaggggggacatgggaggggctgcacagtggcccgaggtcatgcttgcttccacctgcaggtgcatttggtcctttccatggccaggaagccctgtgggctgcactttttatgcttgcagtaacaagagactccagagtcctcaccggtgcagagttggcacatattaattaactaaaattctaatgatcttgctaccagcaataaatcaagtaggccaagtgaaactgggctttaaaaaggatggatttcaaatacactgtgcccactagaagcttcgaagggcctcgtccctctgctacagccctgggaggagccaggatccttgttggtctagctaaatactgttaggggagtgtgccccatctcatcatttcgaagatagcagagtcatagttgggcacccagtgattgggttcaaaaataaagctggtctgcctcttctctcctctgtgtttttatcttttctaccttctgctcatgcttgggtaagaacattgcagccgttgcattggtgattacaggagtcattccatgaagtcagaagaacccacccttctctcctccagcagatggtaaagggagaatcgtacccaaaaagaggtgcattttatctgcctataagttgtgttgacgtcaatagctagtgaaacttctcatgagactcctaatgaagaaccaagagccacaggcctctgcgtggctttctgcacacggtggtatgactgagatagtgactggttctctatacagaccccggggccctgggtttccttcagaagcagaaggagctgtgggaggtgaatggtgggaggtgaacaggcaggttctgtgggagacacagacacgtgggcagaactccagggagaggccagcaagggagaaccatgtgtggccctgctttttctcaaaccctgtgtggttcccggcttcacagttgatgggaaggtttggccccaaggatattttgacattgtgagtatagagcattttaataaaaattaagtgatgc

SEQ ID NO: 28689 - protein, 121 aa, Homo sapiens; identical to SEQ ID NO: 28687

SEQ ID NO: 28690 - DNA, 1019 bp, Homo sapiens
ccaaggaggatgtggacgtgctgaagacaaggatggaggagagaaggctgagagcgaagctggaaaagaaaacaaagaaacccaaggcagcagagtctgtttcaaaaccagatgtcagtgaagaagccccagggccatcaaaagttaagacagggaagcctgaagaagccagccttgattctagagagaagaaaaccaacttggctcccaaaagcacagcaatgaatgagagctcttctggaaaagctgggaagcctccgtgtggagccacaaagaggtccatcgctgacagtgaagaatcggaggcctacaagtccctctttaccactcacagctccgccaagcgctccaaggaggagtctgcccactgggtcacccacacgtcctactgcttctgaagcccgcactgccaccgctcctgccccagaaggttgtttagtttccacgtaggcaggtcgctttgtgcctctgagtgcgctgctgtgtgttctctctatagttctgtgtcataaagctgtcctggccagccttcaagctggtgtggccactcttgatgtgaggcgtgtcggttccaggggggacatgggaggggctgcacagtggcccgaggtcatgcttgcttccacctgcaggtgcatttggtcctttccatggccaggaagccctgtgggctgcactttttatgcttgcagtaacaagagactccagagtcctcaccggtgcagagttggcacatattaattaactaaaattctaatgatcttgctaccagcaataaatcaagtaggccaagtgaaactgggctttaaaaaggatggatttcaaatacactgtgcccactagaagcttcgaagggcctcgtccctctgctacagccctgggaggagccaggatccttgttggtctagctaaatactgttaggggagtgtgccccatctcatcatttcgaagatagcagagtcatagttgggcacccagtgattgggttcaaaaataaagctggtctgcctcttctctc

SEQ ID NO: 28691 - protein, 121 aa, Homo sapiens; identical to SEQ ID NO: 28687

SEQ ID NO: 28692 - DNA, 1583 bp, Homo sapiens
ccaaggaggatgtggacgtgctgaagacaaggatggaggagagaaggctgagagcgaagctggaaaagaaaacaaagaaacccaaggcagcagagtctgtttcaaaaccagatgtcagtgaagaagccccagggccatcaaaagttaagacagggaagcctgaagaagccagccttgattctagagagaagaaaaccaacttggctcccaaaagcacagcaatgaatgagagctcttctggaaaagctgggaagcctccgtgtggagccacaaagaggtccatcgctgacagtgaagaatcggaggcctacaagtccctctttaccactcacagctccgccaagcgctccaaggaggagtctgcccactgggtcacccacacgtcctactgcttctgaagcccgcactgccaccgctcctgccccagaaggttgtttagtttccacgtaggcaggtcgctttgtgcctctgagtgcgctgctgtgtgttctctctatagttctgtgtcataaagctgtcctggccagccttcaagctggtgtggccactcttgatgtgaggcgtgtcggttccaggggggacatgggaggggctgcacagtggcccgaggtcatgcttgcttccacctgcaggtgcatttggtcctttccatggccaggaagccctgtgggctgcactttttatgcttgcagtaacaagagactccagagtcctcaccggtgcagagttggcacatattaattaactaaaattctaatgatcttgctaccagcaataaatcaagtaggccaagtgaaactgggctttaaaaaggatggatttcaaatacactgtgcccactagaagcttcgaagggcctcgtccctctgctacagccctgggaggagccaggatccttgttggtctagctaaatactgttaggggagtgtgccccatctcatcatttcgaagatagcagagtcatagttgggcacccagtgattgggttcaaaaataaagctggtctgcctcttctctcctctgtgtttttatcttttctaccttctgctcatgcttgggtaagaacattgcagccgttgcattggtgattacaggagtcattccatgaagtcagaagaacccacccttctctcctccagcagatggtaaagggagaatcgtacccaaaaagaggtgcattttatctgcctataagttgtgttgacgtcaatagctagtgaaacttctcatgagactcctaatgaagaaccaagagccacaggcctctgcgtggctttctgcacacggtggtatgactgagatagtgactggttctctatacagaccccggggccctgggtttccttcagaagcagaaggagctgtgggaggtgaatggtgggaggtgaacaggcaggttctgtgggagacacagacacgtgggcagaactccagggagaggccagcaagggagaaccatgtgtggccctgctttttctcaaaccctgtgtggttcccggcttcacagttgatgggaaggtttggccccaaggatattttgacattgtgagtatagagcattttaataaaaattaagtgatgc

SEQ ID NO: 28693 - protein, 121 aa, Homo sapiens; identical to SEQ ID NO: 28687

SEQ ID NO: 28694 - DNA, 924 bp, Homo sapiens
gagaaggctgagagcgaagctggaaaagaagccccagggccatcaaaagttaagacagggaagcctgaagaagccagccttgattctagagagaagaaaaccaacttggctcccaaaagcacagcaatgaatgagagctcttctggaaaagctgggaagcctccgtgtggagccacaaagaggtccatcgctgacagtgaagaatcggaggcctacaagtccctctttaccactcacagctccgccaagcgctccaaggaggagtctgcccactgggtcacccacacgtcctactgcttctgaagcccgcactgccaccgctcctgccccagaaggttgtttagtttccacgtaggcaggtcgctttgtgcctctgagtgcgctgctgtgtgttctctctatagttctgtgtcataaagctgtcctggccagccttcaagctggtgtggccactcttgatgtgaggcgtgtcggttccaggggggacatgggaggggctgcacagtggcccgaggtcatgcttgcttccacctgcaggtgcatttggtcctttccatggccaggaagccctgtgggctgcactttttatgcttgcagtaacaagagactccagagtcctcaccggtgcagagttggcacatattaattaactaaaattctaatgatcttgctaccagcaataaatcaagtaggccaagtgaaactgggctttaaaaaggatggatttcaaatacactgtgcccactagaagcttcgaagggcctcgtccctctgctacagccctgggaggagccaggatccttgttggtctagctaaatactgttaggggagtgtgccccatctcatcatttcgaagatagcagagtcatagttgggcacccagtgattgggttcaaaaataaagctggtctgcctcttctctc

SEQ ID NO: 28695 - protein, 74 aa, Homo sapiens
MRALLEKLGSLRVEPQRGPSLTVKNRRPTSPSLPLTAPPSAPRRSLPTGSPTRPTASEARTATAPAPEGCLVST

SEQ ID NO: 28696 - DNA, 1488 bp, Homo sapiens
gagaaggctgagagcgaagctggaaaagaagccccagggccatcaaaagttaagacagggaagcctgaagaagccagccttgattctagagagaagaaaaccaacttggctcccaaaagcacagcaatgaatgagagctcttctggaaaagctgggaagcctccgtgtggagccacaaagaggtccatcgctgacagtgaagaatcggaggcctacaagtccctctttaccactcacagctccgccaagcgctccaaggaggagtctgcccactgggtcacccacacgtcctactgcttctgaagcccgcactgccaccgctcctgccccagaaggttgtttagtttccacgtaggcaggtcgctttgtgcctctgagtgcgctgctgtgtgttctctctatagttctgtgtcataaagctgtcctggccagccttcaagctggtgtggccactcttgatgtgaggcgtgtcggttccaggggggacatgggaggggctgcacagtggcccgaggtcatgcttgcttccacctgcaggtgcatttggtcctttccatggccaggaagccctgtgggctgcactttttatgcttgcagtaacaagagactccagagtcctcaccggtgcagagttggcacatattaattaactaaaattctaatgatcttgctaccagcaataaatcaagtaggccaagtgaaactgggctttaaaaaggatggatttcaaatacactgtgcccactagaagcttcgaagggcctcgtccctctgctacagccctgggaggagccaggatccttgttggtctagctaaatactgttaggggagtgtgccccatctcatcatttcgaagatagcagagtcatagttgggcacccagtgattgggttcaaaaataaagctggtctgcctcttctctcctctgtgtttttatcttttctaccttctgctcatgcttgggtaagaacattgcagccgttgcattggtgattacaggagtcattccatgaagtcagaagaacccacccttctctcctccagcagatggtaaagggagaatcgtacccaaaaagaggtgcattttatctgcctataagttgtgttgacgtcaatagctagtgaaacttctcatgagactcctaatgaagaaccaagagccacaggcctctgcgtggctttctgcacacggtggtatgactgagatagtgactggttctctatacagaccccggggccctgggtttccttcagaagcagaaggagctgtgggaggtgaatggtgggaggtgaacaggcaggttctgtgggagacacagacacgtgggcagaactccagggagaggccagcaagggagaaccatgtgtggccctgctttttctcaaaccctgtgtggttcccggcttcacagttgatgggaaggtttggccccaaggatattttgacattgtgagtatagagcattttaataaaaattaagtgatgc

SEQ ID NO: 28697 - protein, 106 aa, Homo sapiens
MRLLMKNQEPQASAWLSAHGGMTEIVTGSLYRPRGPGFPSEAEGAVGGEWWEVNRQVLWETQTRGQNSRERPARENHVWPCFFSNPVWFPASQLMGRFGPKDILTL

SEQ ID NO: 28698 - DNA, 1155 bp, Homo sapiens
cagaagtgcatgactggtgtcacatgcagagggtgaaggctttaggagttacggaacatcaaaagccttcttcagagtgactgtctgtctcatgtgactagcatcggtcagtcagacagggcacccgggacaatgggcagccacactgacgctgaagtggagtgaatctgagcacagcctccaacattctctatctttttgtagaaaacaaagaaacccaaggcagcagagtctgtttcaaaaccagatgtcagtgaagaagccccagggccatcaaaagttaagacagggaagcctgaagaagccagccttgattctagagagaagaaaaccaacttggctcccaaaagcacagcaatgaatgagagctcttctggaaaagctgggaagcctccgtgtggagccacaaagaggtccatcgctgacagtgaagaatcggaggcctacaagtccctctttaccactcacagctccgccaagcgctccaaggaggagtctgcccactgggtcacccacacgtcctactgcttctgaagcccgcactgccaccgctcctgccccagaaggttgtttagtttccacgtaggcaggtcgctttgtgcctctgagtgcgctgctgtgtgttctctctatagttctgtgtcataaagctgtcctggccagccttcaagctggtgtggccactcttgatgtgaggcgtgtcggttccaggggggacatgggaggggctgcacagtggcccgaggtcatgcttgcttccacctgcaggtgcatttggtcctttccatggccaggaagccctgtgggctgcactttttatgcttgcagtaacaagagactccagagtcctcaccggtgcagagttggcacatattaattaactaaaattctaatgatcttgctaccagcaataaatcaagtaggccaagtgaaactgggctttaaaaaggatggatttcaaatacactgtgcccactagaagcttcgaagggcctcgtccctctgctacagccctgggaggagccaggatccttgttggtctagctaaatactgttaggggagtgtgccccatctcatcatttcgaagatagcagagtcatagttgggcacccagtgattgggttcaaaaataaagctggtctgcctcttctctc

SEQ ID NO: 28699 - protein, 37 aa, Homo sapiens
MSVKKPQGHQKLRQGSLKKPALILERRKPTWLPKAQQ

SEQ ID NO: 28700 - DNA, 1719 bp, Homo sapiens
cagaagtgcatgactggtgtcacatgcagagggtgaaggctttaggagttacggaacatcaaaagccttcttcagagtgactgtctgtctcatgtgactagcatcggtcagtcagacagggcacccgggacaatgggcagccacactgacgctgaagtggagtgaatctgagcacagcctccaacattctctatctttttgtagaaaacaaagaaacccaaggcagcagagtctgtttcaaaaccagatgtcagtgaagaagccccagggccatcaaaagttaagacagggaagcctgaagaagccagccttgattctagagagaagaaaaccaacttggctcccaaaagcacagcaatgaatgagagctcttctggaaaagctgggaagcctccgtgtggagccacaaagaggtccatcgctgacagtgaagaatcggaggcctacaagtccctctttaccactcacagctccgccaagcgctccaaggaggagtctgcccactgggtcacccacacgtcctactgcttctgaagcccgcactgccaccgctcctgccccagaaggttgtttagtttccacgtaggcaggtcgctttgtgcctctgagtgcgctgctgtgtgttctctctatagttctgtgtcataaagctgtcctggccagccttcaagctggtgtggccactcttgatgtgaggcgtgtcggttccaggggggacatgggaggggctgcacagtggcccgaggtcatgcttgcttccacctgcaggtgcatttggtcctttccatggccaggaagccctgtgggctgcactttttatgcttgcagtaacaagagactccagagtcctcaccggtgcagagttggcacatattaattaactaaaattctaatgatcttgctaccagcaataaatcaagtaggccaagtgaaactgggctttaaaaaggatggatttcaaatacactgtgcccactagaagcttcgaagggcctcgtccctctgctacagccctgggaggagccaggatccttgttggtctagctaaatactgttaggggagtgtgccccatctcatcatttcgaagatagcagagtcatagttgggcacccagtgattgggttcaaaaataaagctggtctgcctcttctctcctctgtgtttttatcttttctaccttctgctcatgcttgggtaagaacattgcagccgttgcattggtgattacaggagtcattccatgaagtcagaagaacccacccttctctcctccagcagatggtaaagggagaatcgtacccaaaaagaggtgcattttatctgcctataagttgtgttgacgtcaatagctagtgaaacttctcatgagactcctaatgaagaaccaagagccacaggcctctgcgtggctttctgcacacggtggtatgactgagatagtgactggttctctatacagaccccggggccctgggtttccttcagaagcagaaggagctgtgggaggtgaatggtgggaggtgaacaggcaggttctgtgggagacacagacacgtgggcagaactccagggagaggccagcaagggagaaccatgtgtggccctgctttttctcaaaccctgtgtggttcccggcttcacagttgatgggaaggtttggccccaaggatattttgacattgtgagtatagagcattttaataaaaattaagtgatgc

SEQ ID NO: 28701 - protein, 37 aa, Homo sapiens; identical to SEQ ID NO: 28699

SEQ ID NO: 28702 - DNA, 898 bp, Homo sapiens
agaagccccagggccatcaaaagttaagacagggaagcctgaagaagccagccttgattctagagagaagaaaaccaacttggctcccaaaagcacagcaatgaatgagagctcttctggaaaagctgggaagcctccgtgtggagccacaaagaggtccatcgctgacagtgaagaatcggaggcctacaagtccctctttaccactcacagctccgccaagcgctccaaggaggagtctgcccactgggtcacccacacgtcctactgcttctgaagcccgcactgccaccgctcctgccccagaaggttgtttagtttccacgtaggcaggtcgctttgtgcctctgagtgcgctgctgtgtgttctctctatagttctgtgtcataaagctgtcctggccagccttcaagctggtgtggccactcttgatgtgaggcgtgtcggttccaggggggacatgggaggggctgcacagtggcccgaggtcatgcttgcttccacctgcaggtgcatttggtcctttccatggccaggaagccctgtgggctgcactttttatgcttgcagtaacaagagactccagagtcctcaccggtgcagagttggcacatattaattaactaaaattctaatgatcttgctaccagcaataaatcaagtaggccaagtgaaactgggctttaaaaaggatggatttcaaatacactgtgcccactagaagcttcgaagggcctcgtccctctgctacagccctgggaggagccaggatccttgttggtctagctaaatactgttaggggagtgtgccccatctcatcatttcgaagatagcagagtcatagttgggcacccagtgattgggttcaaaaataaagctggtctgcctcttctctc

SEQ ID NO: 28703 - protein, 74 aa, Homo sapiens; identical to SEQ ID NO: 28695

SEQ ID NO: 28704 - DNA, 1462 bp, Homo sapiens
agaagccccagggccatcaaaagttaagacagggaagcctgaagaagccagccttgattctagagagaagaaaaccaacttggctcccaaaagcacagcaatgaatgagagctcttctggaaaagctgggaagcctccgtgtggagccacaaagaggtccatcgctgacagtgaagaatcggaggcctacaagtccctctttaccactcacagctccgccaagcgctccaaggaggagtctgcccactgggtcacccacacgtcctactgcttctgaagcccgcactgccaccgctcctgccccagaaggttgtttagtttccacgtaggcaggtcgctttgtgcctctgagtgcgctgctgtgtgttctctctatagttctgtgtcataaagctgtcctggccagccttcaagctggtgtggccactcttgatgtgaggcgtgtcggttccaggggggacatgggaggggctgcacagtggcccgaggtcatgcttgcttccacctgcaggtgcatttggtcctttccatggccaggaagccctgtgggctgcactttttatgcttgcagtaacaagagactccagagtcctcaccggtgcagagttggcacatattaattaactaaaattctaatgatcttgctaccagcaataaatcaagtaggccaagtgaaactgggctttaaaaaggatggatttcaaatacactgtgcccactagaagcttcgaagggcctcgtccctctgctacagccctgggaggagccaggatccttgttggtctagctaaatactgttaggggagtgtgccccatctcatcatttcgaagatagcagagtcatagttgggcacccagtgattgggttcaaaaataaagctggtctgcctcttctctcctctgtgtttttatcttttctaccttctgctcatgcttgggtaagaacattgcagccgttgcattggtgattacaggagtcattccatgaagtcagaagaacccacccttctctcctccagcagatggtaaagggagaatcgtacccaaaaagaggtgcattttatctgcctataagttgtgttgacgtcaatagctagtgaaacttctcatgagactcctaatgaagaaccaagagccacaggcctctgcgtggctttctgcacacggtggtatgactgagatagtgactggttctctatacagaccccggggccctgggtttccttcagaagcagaaggagctgtgggaggtgaatggtgggaggtgaacaggcaggttctgtgggagacacagacacgtgggcagaactccagggagaggccagcaagggagaaccatgtgtggccctgctttttctcaaaccctgtgtggttcccggcttcacagttgatgggaaggtttggccccaaggatattttgacattgtgagtatagagcattttaataaaaattaagtgatgc

SEQ ID NO: 28705 - protein, 106 aa, Homo sapiens; identical to SEQ ID NO: 28697

SEQ ID NO: 28706 - DNA, 606 bp, Homo sapiens
ccaatcactgggtgcccaactatgactctgctatcttcgaaatgatgagatggggcacactcccctaacagtatttagttaattaatatgtgccaactctgcaccggtgaggactctggagtctcttgttactgcaagcataaaaagtgcagcccacagggcttcctggccatggaaaggaccaaatgcacctgcaggtggaagcaagcatgacctcgggccactgtgcagcccctcccatgtcccccctggaaccgacacgcctcacatcaagagtggccacaccagcttgaaggctggccaggacagctttatgacacagaactatagagagaacacacagcagcgcactcagaggcacaaagcgacctgcctacgtggaaactaaacaaccttctggggcaggagcggtggcagtgcgggcttcagaagcagtaggacgtgtgggtgacccagtgggcagactcctccttggagcgcttggcggagctgtgagtggtaaagagggacttgtaggcctccgattcttcactgtcagcgatggacctctttgtggctccacacggaggcttcccagcttttccagaagagctctcattcattgct

SEQ ID NO: 28707 - protein, 41 aa, Homo sapiens
MCQLCTGEDSGVSCYCKHKKCSPQGFLAMERTKCTCRWKQA

SEQ ID NO: 28708 - DNA, 724 bp, Homo sapiens
agcaatgaatgagagctcttctggaaaagctgggaagcctccgtgtggagccacaaagaggtccatcgctgacagtgaagaatcggaggcctacaagtccctctttaccactcacagctccgccaagcgctccaaggaggagtctgcccactgggtcacccacacgtcctactgcttctgaagcccgcactgccaccgctcctgccccagaaggttgtttagtttccacgtaggcaggtcgctttgtgcctctgagtgcgctgctgtgtgttctctctatagttctgtgtcataaagctgtcctggccagccttcaagctggtgtggccactcttgatgtgaggcgtgtcgttccatggccaggaagccctgtgggctgcactttttatgcttgcagtaacaagagactccagagtcctcaccggtgcagagttggcacatattaattaactaaaattctaatgatcttgctaccagcaataaatcaagtaggccaagtgaaactgggctttaaaaaggatggatttcaaatacactgtgcccactagaagcttcgaagggcctcgtccctctgctacagccctgggaggagccaggatccttgttggtctagctaaatactgttaggggagtgtgccccatctcatcatttcgaagatagcagagtcatagttgggcacccagtgattgggttcaaaaataaagctggtctgcctcttctctc

SEQ ID NO: 28709 - protein, 74 aa, Homo sapiens; identical to SEQ ID NO: 28695

SEQ ID NO: 28710 - DNA, 1288 bp, Homo sapiens
agcaatgaatgagagctcttctggaaaagctgggaagcctccgtgtggagccacaaagaggtccatcgctgacagtgaagaatcggaggcctacaagtccctctttaccactcacagctccgccaagcgctccaaggaggagtctgcccactgggtcacccacacgtcctactgcttctgaagcccgcactgccaccgctcctgccccagaaggttgtttagtttccacgtaggcaggtcgctttgtgcctctgagtgcgctgctgtgtgttctctctatagttctgtgtcataaagctgtcctggccagccttcaagctggtgtggccactcttgatgtgaggcgtgtcgttccatggccaggaagccctgtgggctgcactttttatgcttgcagtaacaagagactccagagtcctcaccggtgcagagttggcacatattaattaactaaaattctaatgatcttgctaccagcaataaatcaagtaggccaagtgaaactgggctttaaaaaggatggatttcaaatacactgtgcccactagaagcttcgaagggcctcgtccctctgctacagccctgggaggagccaggatccttgttggtctagctaaatactgttaggggagtgtgccccatctcatcatttcgaagatagcagagtcatagttgggcacccagtgattgggttcaaaaataaagctggtctgcctcttctctcctctgtgtttttatcttttctaccttctgctcatgcttgggtaagaacattgcagccgttgcattggtgattacaggagtcattccatgaagtcagaagaacccacccttctctcctccagcagatggtaaagggagaatcgtacccaaaaagaggtgcattttatctgcctataagttgtgttgacgtcaatagctagtgaaacttctcatgagactcctaatgaagaaccaagagccacaggcctctgcgtggctttctgcacacggtggtatgactgagatagtgactggttctctatacagaccccggggccctgggtttccttcagaagcagaaggagctgtgggaggtgaatggtgggaggtgaacaggcaggttctgtgggagacacagacacgtgggcagaactccagggagaggccagcaagggagaaccatgtgtggccctgctttttctcaaaccctgtgtggttcccggcttcacagttgatgggaaggtttggccccaaggatattttgacattgtgagtatagagcattttaataaaaattaagtgatgc

SEQ ID NO: 28711 - protein, 106 aa, Homo sapiens; identical to SEQ ID NO: 28697

SEQ ID NO: 28712 - DNA, 1271 bp, Homo sapiens
agcaatgaatgagagctcttctggaaaagctgggaagcctccgtgtggagccacaaagaggtccatcgctgacagtgaagaatcggaggcctacaagtccctctttaccactcacagctccgccaagcgctccaaggaggagtctgcccactgggtcacccacacgtcctactgcttctgaagcccgcactgccaccgctcctgccccagaaggttgtttagtttccacgtaggcaggtcgctttgtgcctctgagtgcgctgctgtgtgttctctctatagttctgtgtcataaagctgtcctggccagccttcaagctggtgtggccactcttgatgtgaggcgtgtcggttccaggggggacatgggaggggctgcacagtggcccgaggtcatgcttgcttccacctgcaggtgcatttggtcctttccatggccaggaagccctgtgggctgcactttttatgcttgcagtaacaagagactccagagtcctcaccggtgcagagttggcacatattaattaactaaaattctaatgatcttgctaccagcaataaatcaagtaggccaagtgaaactgggctttaaaaaggatggatttcaaatacacttgtgccccatctcatcatttcgaagatagcagagtcatagttgggcacccagtgattgggttcaaaaataaagctggtctgcctcttctctcctctgtgtttttatcttttctaccttctgctcatgcttgggtaagaacattgcagccgttgcattggtgattacaggagtcattccatgaagtcagaagaacccacccttctctcctccagcagatggtaaagggagaatcgtacccaaaaagaggtgcattttatctgcctataagttgtgttgacgtcaatagctagtgaaacttctcatgagactcctaatgaagaaccaagagccacaggcctctgcgtggctttctgcacacggtggtatgactgagatagtgactggttctctatacagaccccggggccctgggtttccttcagaagcagaaggagctgtgggaggtgaatggtgggaggtgaacaggcaggttctgtgggagacacagacacgtgggcagaactccagggagaggccagcaagggagaaccatgtgtggccctgctttttctcaaaccctgtgtggttcccggcttcacagttgatgggaaggtttggccccaaggatattttgacattgtgagtatagagcattttaataaaaattaagtgatgc

SEQ ID NO: 28713 - protein, 59 aa, Homo sapiens [sequence omitted]

SEQ ID NO: 28714 - DNA, 723 bp, Homo sapiens
agcaatgaatgagagctcttctggaaaagctgggaagcctccgtgtggagccacaaagaggtccatcgctgacagtgaagaatcggaggcctacaagtccctctttaccactcacagctccgccaagcgctccaaggaggagtctgcccactgggtcacccacacgtcctactgcttctgaagcccgcactgccaccgctcctgccccagaagaaaactagcgaaccccaggggaaggtgcaatacggagagcactttcggattcggcagaatctaccagagcacacccaaggctggcttgggagcaaatggctctggcttctttttgttgttgtgccgtttgtgatactgcagtgtcaaagagacagtgagaagaataaggagcagagtcctcctggccttcgaggcggccaacttcactctccattaaagaaaaaaagaaatgcttcccccaacaaagactgtgcattcaataccttaatggaactcgaggtggagcttatgaaatttgtgtccaaagtgcggaatcttaaacgtgccatggcaacaggtagtggcagtaacctcaggcttcgaaagtcagagatgcctgcagatccataccatgtcacgatctgtgaaatatggggagaagaaagctctagctgaatggatttgtgtgtcaggagagaaaaaagttgagtgttgacaaactgtatgcaaactaataaaactattctgaag

SEQ ID NO: 28715 - protein, 70 aa, Homo sapiens
MRALLEKLGSLRVEPQRGPSLTVKNRRPTSPSLPLTAPPSAPRRSLPTGSPTRPTASEARTATAPAPEEN

SEQ ID NO: 28716 - DNA, 415 bp, Homo sapiens
ccctttacagaaaaagtttgccaatccttcctctaatcagtttgggcacaggatcatgaaatgctgggtctttctaggggagaatacgctttctttccctttctccttctacttgaaagaattgtttatggtcactttgaggcccagctgttactactttacaccttcatctcttttttttgtttgtttttttgagacacagtttcactctgtcacccagaaaagaaaaaagagtatagttcgattaaaattgtggtaagaggccgggcacggtggctcatgcctgtaatcccagcaccttgggagggtgaggtgggtggatcacctaagcccaggaggtcaaggctatggtgagccatgatcatgccactgcactccagcctggatgacagagtgagaccctgtttcaaaattt

SEQ ID NO: 28717 - protein, 67 aa, Homo sapiens
MKCWVFLGENTLSFPFSFYLKELFMVTLRPSCYYFTPSSLFFVCFFETQFHSVTQKRKKSIVRLKLW

SEQ ID NO: 28718 - DNA, 1827 bp, Homo sapiens
tctcaaagaaaagacacaggctgtgtatggacatgggggcctctgaaaataattagccatccctcaaagctgctggaatggggaacactggggacagggagccgcatgatgccaaggacaggcctccaaactgaggtcacagggtggcccaaggccctggaaatcagggcagctgcctctacagtgggtgtaattccaggcagtagctgccaagctgagtgggcccctgcaagaagagaagtgcccgtcttctggtcaacctggagatttgcatctctccatcgtgcccagtctctggcaggaagccccactccccagccgacactgcaccatgctcatggaggaagaagctgtgcagcacagcccaacagcgttttcccctttcggttttctagagtagtcttgcagaactattttttggtttttttttttttgagagagtctcactctgttgcccaggctggagtgcagtggcaccacctcagctcactgcaaccaccgcctcctggattcaagcgattctcctgcctcagctccagagtagctgagattacaggtgtgcaccaaaacacctggctaatttgtttttattttcagtggagacaaggtttcaccatgttggtcaggctggcctcaaactctttgacctcaggtgatctgcatgccttggcctcccaaagtgctgggattacaggcatgagccactgcccctggccatagtcttgcagaactactttgtcactccacagagatcagtagtttaaggcacagcgaaggtgcccagctgaactttgattatttcctgtgcagcataaagttctgctcctcgggagtaaatctgcaaatcagagccttcctcaggaagatagctctacagatgacccaggggaacaagtacaagccgtgcgttccagcacccaggatttcttgtttcatgtcattttaaagaacacatggtttcgagtatactatggagtcctaggtttattcccagccttggcctcagttgtcaagctagctgttcctttttacttgggggattcagccccttcccattttacccaccaactcttaatcatctcccctgctctactcaaccatctttttctggacactcttcctgcttcctgcataacctagtttagagcagtccccttatgctagtctctaaagcttcctgttcttatcacaattttaatcaaagtatactctctctcttttttttttaagtgctgggactacaggtgtgagccaccacacccagcccaaagtatactcttaacccagggtgggcacacactgctacgatcaatgatggtgtgaggtaatagtgagtggtggggactgtggagggaatatggccaccgaaaggacggtttcacttggctgcagcagagagactggttccatgagggtgtgcactcattgtttctggacctcccatattttcaaaggaagccagaatgtggagttttaaagtgaaatgccccccaatatttaagtactgacaatttttaaaaacaatgtaggccaaacaaaacacataggtgggccgggcgcagtggctcatgcccgtaatcccaacactttaggaggccgaggcaggtggatcacctaaggtcggaagttagagaccagcctgaccaacatggagataccctgtctctactaaaaatacaaaattagccaagcgtgatggtggatgcctgtaatcgcagctactcaggaggctgaggcaggagaatggcttgaactgggaggcggaggttgcggtgagctaagatcattgcactccagtctgggcaacaagagcaaaattccgtcccc

SEQ ID NO: 28719 - protein, 204 aa, Homo sapiens
MMPRTGLQTEVTGWPKALEIRAAASTVGVIPGSSCQAEWAPARREVPVFWSTWRFASLHRAQSLAGSPTPQPTLHHAHGGRSCAAQPNSVFPFRFSRVVLQNYFLVFFFLRESHSVAQAGVQWHHLSSLQPPPPGFKRFSCLSSRVAEITGVHQNTWLICFYFQWRQGFTMLVRLASNSLTSGDLHALASQSAGITGMSHCPWP

SEQ ID NO: 28720 - DNA, 1074 bp, Homo sapiens
acaaaaacaaattttttgtttgtttagtttgagccacataggtggctccaaatttgtaggtagcctgtggtttaatatctttctctcccgtttaactcagctccacggggcacatggcatctccctctgctcatcacaatgtctggatcaaacaaatgaaaaacaaaaacatgatggcctctcccagcaaagctccagggttggaaagagtcccctggcagggaattggcaccccgtcgtgcccatcctctctctctgactgcctgctggaaatgcccccatctccctttgagtcctcctcccgggcaacccctgtgacctgtaacctctgtcctgaaatcatcacaatggccagagtggcctcagctcagggcctctgtgacatcaccaagggcctggcaccaggtgcccagtctcccagttgcgagggcaagcaaacccgtcatgagcaactcccttccccatctctgctcaccatgtggacgctgaaatcgtccctggtcctgcttctgtgcctcacctgcagctatgcctttatgttctcttctctgagacagaaaactagcgaaccccaggggaaggtgcaatacggagagcactttcggattcggcagaatctaccagagcacacccaaggctggcttgggagcaaatggctctggcttctttttgttgttgtgccgtttgtgatactgcagtgtcaaagagacagtgagaagaataaggagcagagtcctcctggccttcgaggcggccaacttcactctccattaaagaaaaaaagaaatgcttcccccaacaaagactgtgcattcaataccttaatggaactcgaggtggagcttatgaaatttgtgtccaaagtgcggaatcttaaacgtgccatggcaacaggtagtggcagtaacctcaggcttcgaaagtcagagatgcctgcagatccataccatgtcacgatctgtgaaatatggggagaagaaagctctagctgaatggatttgtgtgtcaggagagaaaaaagttgagtgttgacaaactgtatgcaaactaataaaactattctgaagaaaagaa

SEQ ID NO: 28721 - protein, 292 aa, Homo sapiens
MASPSAHHNVWIKQMKNKNMMASPSKAPGLERVPWQGIGTPSCPSSLSDCLLEMPPSPFESSSRATPVTCNLCPEIITMARVASAQGLCDITKGLAPGAQSPSCEGKQTRHEQLPSPSLLTMWTLKSSLVLLLCLTCSYAFMFSSLRQKTSEPQGKVQYGEHFRIRQNLPEHTQGWLGSKWLWLLFVVVPFVILQCQRDSEKNKEQSPPGLRGGQLHSPLKKKRNASPNKDCAFNTLMELEVELMKFVSKVRNLKRAMATGSGSNLRLRKSEMPADPYHVTICEIWGEESSS

SEQ ID NO: 28722 - DNA, 890 bp, Homo sapiens
accagcaaaagctcgagggttggaaagagtcccctggcagggaattggcaccccgtcgtgcctatcctctctctctgactgcctgctggaaatgcccccatctccctttgagtcctcctcccgggcgactcctgtgacctgtaacctctgtcctgaaatcatcacaatggccagggtggcctcagctcagggcctctgtgacatcaccaagggcctggcaccaggtgcccagtcttccagttgcgagggcaagcaaacccgtcatgagcaactcccttccccatctctgctcaccatgtggacgctgaaatcgtccctggtcctgcttctgtgcctcacctgcagctatgcctttatgttctcttctctgagacagaaaactagcgaaccccaggggaaggtgccgtgtggagagcactttcggattcggcagaacctaccagagcacacccaaggctggcttgggagcaaatggctctggcttttgtttgctgttgtgccgtttgtgatactgcagtgtcaaagagacagtgagaagaataaggagcagagtcctcctggccttcgaggcttcccatttcgcactccactaaagaaaaatcaaaatgcttctctttacaaagactgtgtattcaataccttaaacgaacttgaagtggagcttttgaaatttgtgtccgaagtgcagaatcttaaaggtgccatggcaacaggcagtggcagtaacctcaagcttcgaaggtcagagatgcctgcagatccataccatgtcacaatctgtaaaatatggggagaagaaagctctagctgaatggatttgtgtgtcaggagagaaaaaagttgagtgttgacaaactgtatgcaaactaataaaactattctgaagaaaa

SEQ ID NO: 28723 - protein, 239 aa, Homo sapiens
MPPSPFESSSRATPVTCNLCPEIITMARVASAQGLCDITKGLAPGAQSSSCEGKQTRHEQLPSPSLLTMWTLKSSLVLLLCLTCSYAFMFSSLRQKTSEPQGKVPCGEHFRIRQNLPEHTQGWLGSKWLWLLFAVVPFVILQCQRDSEKNKEQSPPGLRGFPFRTPLKKNQNASLYKDCVFNTLNELEVELLKFVSEVQNLKGAMATGSGSNLKLRRSEMPADPYHVTICKIWGEESSS

SEQ ID NO: 28724 - DNA, 437 bp, Homo sapiens
ctttatttacaaaaacaggtggagggccaaatttggccatagtctgccagtgcctgcactcgagcactgctagaaccatcttttcttaaatgagcccaactgtcttggaactgtgtcaaaaccagcaaagtccatgatattattgaccttgaatatctttcttgacaggagcagagtcctcctggccttcgaggcttcccatttcgcactccactaaagaaaaatcaaaatgcttctctttacaaagactgtgtattcaataccttaaacgaacttgaagtggagcttttgaaatttgtgtccgaagtgcagaatcttaaaggtgccatggcaacaggcagtggcagtaacctcaagcttcgaaggtcagagatgcctgcagatccataccatgtcacaatcttttgtaatctttcccttgagtgtggtgggagctg

SEQ ID NO: 28725 - protein, 35 aa, Homo sapiens
MATGSGSNLKLRRSEMPADPYHVTIFCNLSLECGG

SEQ ID NO: 28726 - DNA, 2332 bp, Homo sapiens
actcctgcccctgccacgagaacacaccctttccagtttgctggagaaatataagagaagtccagtgaaagagagctgagtttccccaatgatgccatcaagatgaactaactacagttaaccagccagctgatagcagatgcatgagtgagcccagctgagagcaggtgaaactgaaattggctgtatcatctgaaacttcatctgtgaagtccctggtggtttcctagatgactacacagttgagttgcctctgattggaaaagcagtgttttggtttttcagtttgtacaagaggaagaagacgcatgatatgtgtttggctcatgtgcctgaatatggctccacagggaagacttgatacagctgaagctattgctttttagagactttttattttgagcagctgccttaacagccttcgtcttgttacatcacatgagatatatctctggaataggaagagaaaaaagacatgactgagcaataatttttgactaaaacttaaaattacaaaaccaaaaccagagatagatgtccctgaagttgtatttttatagtatgtgagaacacaattttcttatcctagttttaaggcattcctctggacccaggatttttgtttagtttcattcacataatcaaactcttttttttttttttgccatagactaatgcattttggtgtaatgatctgagcccttatccagaaggcatctaagactcatgtacaaaaatagatttcagggctaaacattctaaaagacaattgagtgcttcttttttctccggcccctagatgtaaatgaataacctctgttcactaactcttaatgtaatataagggataaattatgcttgtttatttaattgtgcttaaccagagtactaggttggagtcaaaccacagatatatttgtgagatgtgacaaaatgtagcttttagcccgtaatacccaagtcatctgggaacataactgatgacagtgtcaacacctttcaggaattctggaggtgcctttgagtttagaaattcgtaggttctctagaagcaacagtagcatactaaattaacacataacatttcaagctacatttacataattgcagtggttatgattaatacaaattatattaactgcctgttttactccttatagctgattggctgaatttaccagtgggtttggtatgttcaacaaatgatccaaattaccttttcatttcagttaagaaactaatcaaagcaaatacactttgatttgttgagaggcagagattctccctaagtggcaatgtccttggccttctaagctaaaacctaaatggaactataatatatattttgatgctttatctcacttgagttttttattctttaactgaagggcagccatggaccataaatacatagaagataaaaatatattgagcttaggagtttggtctgttcaatggatgagaactttatattttcccttataaacacaattttcaaagaatagcctgtaatagtcgtgaaaatggaaaccaatactggggaaatgtggactgcaactctgaaaaggtatcaaaatgcccgatagttcaacacaagggctaagcaatatttcagggatgtggcctgtctttggtggctcggtcactctagtgagatgaatttggaaaaggataggcatacagaatcccccctctggcagggtttgcctttggggtctgcttaaagccatgtttgctagtagaaatcttgagtaaccagatatgttttataatgctgtgtcatatttaaattctgatgagattgacatctttaaataagcttggacacagattggatttgtacagggaactggactgaagaataatcgtaggtcagtaatagatttagatatactatttttatattgtaagcagttacttctcaggattagtattctaattcatttgatttaatatgtaataggtaatattaaaaataaagattttatgctttgaaactccttaactgaatattttcataggaataagcatagtttttgtgtttagtaattttagttagtgagtaatgattagcagacaacatggtaattatattgaaatattacgtgagtgccaataacaaagctttctgatcaaatgctaagaaatatgttgtgtaaagggatctcacattttttattgcggctttctttctacaatgtgacaaatttctgggatatttcattatcttctttttgaatttttttcaagcaagactgttcagtattatgttagcattgatataaaaagaagcagaccattgttaacattaaaatgttactgagatttcaaa

SEQ ID NO: 28727 - protein, 33 aa, Homo sapiens
MLRNMLCKGISHFLLRLSFYNVTNFWDISLSSF

SEQ ID NO: 28728 - DNA, 938 bp, Homo sapiens
gtatacagagagaaggtatgatccatggatcaggaaaccagccttccctagacatggaatctgctggcaccttgattttgaacttcccagactccagaactactcctgcccctgccacgagaacacaccctttccagtttgctggagaaatataagagaagtccagtgaaagagagctgagtttccccaatgatgccatcaagatgaactaactacagttaaccagccagctgatagcagatgcatgagtgagcccagctgagagcaggttgtgcaagcatggcacgtgcatctgtttggcttgtggtgaggcctcaggaagcttacagtcatggtggaaggcaaagagggagccagtacatcacgtgaactcgtagagtgagaactcattcactaccatgaagacaacaccaagccattcctgagtgcctacaatagttcctggtatgtagaaggtatacaataaatattggcggagtgaaggaacaaatgggatttgcttgattctgctgcagaagactaagaaaaagacataaatgaataaataactagtagaatgttaacacaatcagaaaaaggaccatttcttttcatttggatgtctcaaatctatttgttgtttttgttgttgttgtttttctggctgggcttgaaatgtaggcatgcagccaggaggctccatgctgactaatgagatagaggtacccatttagcccagcaatattcatacattgtatatgcattcatttttctctagtgactttttaatatattttggtgaagatattcccaagataatgaagatatgttgagtgggcattaaaagtgatgagtctttttttccattatcaaagacaaatacaggtgtgtgatgtatgcagagaattagaagtagggaaaaaaatgagggaatccaaaataatgaaaagaaattaaag

SEQ ID NO: 28729 - protein, 45 aa, Homo sapiens
MIHGSGNQPSLDMESAGTLILNFPDSRTTPAPATRTHPFQFAGEI

SEQ ID NO: 28730 - DNA, 770 bp, Homo sapiens
aaggtatgatccatggatcaggaaaccagccttccctagacatggaatctgctggcaccttgattttgaacttcccagactccagaactactcctgcccctgccacgagaacacaccctttccagtttgctggagaaatataagagaagtccagtgaaagagagctgagtttccccaatgatgccatcaagatgaactaactacagttaaccagccagctgatagcagatgcatgagtgagcccagctgagagcaggttgtgcaagcatggcacgtgcatctgtttggcttgtggtgaggcctcaggaagcttacagtcatggtggaaggcaaagagggagccagtacatcacgtgaactcgtagagtgagaactcattcactaccatgaagacaacaccaagccattcctgaggtatcagctcccatgacctgaacatctcccactaggcccacctccaacactgggggtcaaacttcaacatgaaatttggaggggacaaacatccacgtcatatcagatatcattatttaacctaccatatccttggaattaggggttgatgtgttactgcagcatagtttaatgtatgctgaggaatatggaagccatagtaagttaatactaaaatctcactggacattaactatagaagtatgcccaaggtaactatttagtagacataatcagcctcaactttttgttgtcttcatgaggttgcaaattatagaacttgcttatgaaagttaatacaaaatgcacaaaactga

SEQ ID NO: 28731 - protein, 45 aa, Homo sapiens; identical to SEQ ID NO: 28729

SEQ ID NO: 28732 - DNA, 293 bp, Homo sapiens
gttactggacctcagatactaaaaggacaaagaaaagggacagatgagaacagctacgaagcgatagtgaaaacatatggtgtccatcttgtaagcataaggctccctggtattgctgccactctccctgtgctcgggaaagctggaagaagccagtaggcaatctggtgtctcgtcagaagagtgccagaaacaggtgttgctgacctaaccctttcctcctaccacagattctcttggtggccaggcgcagtggctcacgcttgtaatcccagcactttggaagatggaga

SEQ ID NO: 28733 - protein, 43 aa, Homo sapiens
AIWCLVRRVPETGVADLTLSSYHRFSWWPGAVAHACNPSTLED

SEQ ID NO: 28734 - DNA, 1325 bp, Homo sapiens
agggaggcttcatctgctgaaagtgtctcacaggtcacagccaaagaagagttacttcctactgcagaaacgaaagcttctttctttaatttaagaagcccttacaatagccatatgggaaataatgcttctcgcccacacagcgcaaatggagaagtttatggacttctgggaagcgtgctaacgataaagaaagaatcagaataaaatgtacctgccatccagttttggatctttttaaaactaatgagtatgaacttgagatctgtataaataagagcatgatttgaaaaaaagcatggtataattgaaacttttttcattttgaaaagtattggttactggtgatgttgaaatatgcatactaatttttgcttaacattagatgtcatgaggaaactactgaactagcaattggttgtttaacacttctgtatgcatcagataacaactgtgagtagcctatgaatgaaattcttttataaatattaggcataaattaaaatgtaaaactccattcatagtggattaatgcattttgctgcctttattagggtactttattttgcttttcagaagtcagcctacataacacatttttaaagtctaaactgttaaacaactctttaaaggataattatccaataaaaaaaaacctagtgctgattcacagcttattatccaattcaaaaataaattagaaaaatatatgcttacatttttcacttttgctaaaaagaaaaaaaaaaggtgtttatttttaactcttggaagaggttttgtggttcccaatgtgtctgtcccaccctgatccttttcaatatatatttctttaaaccctgtgcatctgtgcatttggcaaaatgtcttaacaaatcagatcagatgttcatcctaacatgacagtattccatttctggacatgacgtctgtggtttaagctttgtgaaagaatgtgctttgattcgaagggtcttaaagaatttttttaatcgtcaaccacttttaaacataaagaattcacacaactactttcatgaattttttaatcccattgcaaacattattccaagagtatcccagtattagcaatactggaatataggcacattaccattcatagtaagaattctggtgtttacacaaccaaatttgatgcgatctgctcagtaatataatttgccatttttattagaaatttaatttcttcatgtgatgtcatgaaactgtacatactgcagtgtgaatttttttgttttgttttttaatcttttagtgtttacttcctgcagtgaatttgaataaatgagaaaaaatgcattgtc

SEQ ID NO: 28735 - protein, 33 aa, Homo sapiens
MLTFFTFAKKKKKRCLFLTLGRGFVVPNVSVPP

SEQ ID NO: 28736 - DNA, 7483 bp, Homo sapiens
agttgtggttatctcagcagaagacataccgccctcctccttgtattggtcgggacctgggcattagggagtcaaggcaaaggagaaagaaaagagattttacattagtattctatgaaagccttacggtctgcagaacaaattgattactccggtgtacctgtgcttggcaccactgctgtgagagaaagaacactgatatttgcatttaatggggaacaaaagatgaagaaggaaaaggaatatattcactaaggattctatctgcttactgctacagacctatgtgttaaggaattcttctcctcctccttgcgtagaagttgatcagcactgtggtcagactgcatttatcttgtcattgccagaagaaatcttggacagaatgtaacagtacgtctctctctgattgcgatggaaggtgataaactgatactcctttattaaagttacatcgcactcaccacagaaaaccattctttaaagtgaatagaaaccaagcccttgtgaacacttctattgaacatgactcatggagaagagcttggctctgatgtgcaccaggattctattgttttaacttacctagaaggattactaatgcatcaggcagcagggggatcaggtactgccgttgacaaaaagtctgctgggcataatgaagaggatcagaactttaacatttctggcagtgcatttcccacctgtcaaagtaatggtccagttctcaatacacatacatatcaggggtctggcatgctgcacctcaaaaaagccagactgttgcagtcttctgaggactggaatgcagcaaagcggaagaggctgtctgattctatcatgaatttaaacgtaaagaaggaagctttgctagctggcatggttgacagtgtgcctaaaggcaaacaggatagcacattactggcctctttgcttcagtcattcagctctaggctgcagactgttgctctgtcacaacaaatcaggcagagcctcaaggagcaaggatatgccctcagtcatgattctttaaaagtggagaaggatttaaggtgctatggtgttgcatcaagtcacttaaaaactttgttgaagaaaagtaaagttaaagatcaaaagcctgatacgaatcttcctgatgtgactaaaaacctcatcagagataggtttgcagagtctcctcatcatgttggacaaagtggaacaaaggtcatgagtgaaccgttgtcatgtgctgcaagattacaggctgttgcaagcatggtggaaaaaagggctagtcctgccacctcacctaaacctagtgttgcttgtagccagttagcattacttctgtcaagcgaagcccatttgcagcagtattctcgagaacacgctttaaaaacgcaaaatgcaaatcaagcagcaagtgaaagacttgctgctatggccagattgcaagaaaatggccagaaggatgttggcagttaccagctcccaaaaggaatgtcaagccatcttaatggtcaggcaagaacatcatcaagcaaactgatggctagcaaaagtagtgctacagtgtttcaaaatccaatgggtatcattccttcttcccctaaaaatgcaggttataagaactcactggaaagaaacaatataaaacaagctgctaacaatagtttgcttttacatcttcttaaaagccagactatacctaagccaatgaatggacacagtcacagtgagagaggaagcatttttgaggaaagtagtacacctacaactattgatgaatattcagataacaatcctagttttacagatgacagcagtggtgatgaaagttcttattccaactgtgttcccatagacttgtcttgcaaacaccgaactgaaaaatcagaatctgaccaacctgtttccctggataacttcactcaatccttgctaaacacttgggatccaaaagtcccagatgtagatatcaaagaagatcaagatacctcaaagaattctaagctaaactcacaccagaaagtaacacttcttcaattgctacttggccataagaatgaagaaaatgtagaaaaaaacaccagccctcagggagtacacaatgatgtgagcaagttcaatacacaaaattatgcaaggacttctgtgatagaaagccccagtacaaatcggactactccagtgagcactccacctttacttacatcaagcaaagcagggtctcccatcaatctctctcaacactctctggtcatcaaatggaattccccaccatatgtctgcagtactcagtctgaaaagctaacaaatactgcatctaaccactcaatggaccttacaaaaagcaaagacccaccaggagagaaaccagcccaaaatgaaggtgcacagaactctgcaacgtttagtgccagtaagctgttacaaaatttagcacaatgtggaatgcagtcatccatgtcagtggaagagcagagacccagcaaacagctgttaactggaaacacagataaaccgataggtatgattgatagattaaatagccctttgctctcaaataaaacaaatgcagttgaagaaaataaagcatttagtagtcaaccaacaggtcctgaaccagggctttctggttctgaaatagaaaatctgcttgaaagacgtactgtcctccagttgctcctggggaaccccaacaaagggaagagtgaaaaaaaagagaaaactcccttaagagatgaaagtactcaggaacactcagagagagctttaagtgaacaaatactgatggtgaaaataaaatctgagccttgtgatgacttacaaattcctaacacaaatgtgcacttgagccatgatgctaagagtgccccattcttgggtatggctcctgctgtgcagagaagcgcacctgccttaccagtgtccgaagactttaaatcggagcctgtttcacctcaggatttttctttctccaagaatggtctgctaagtcgattgctaagacaaaatcaagatagttacctggcagatgattcagacaggagtcacagaaataatgaaatggcacttctagaatcaaagaatctttgcatggtccctaagaaaaggaagctttatactgagccattagaaaatccatttaaaaagatgaaaaacaacattgttgatgctgcaaacaatcacagtgccccagaagtactgtatgggtccttgcttaaccaggaagagctgaaatttagcagaaatgatcttgaatttaaatatcctgctggtcatggctcagccagcgaaagtgaacacaggagttgggccagagagagcaaaagctttaatgttctgaaacagctgcttctctcagaaaactgtgtgcgagatttgtccccgcacagaagtaactctgtggctgacagtaaaaagaaaggacacaaaaataatgtgaccaacagcaaacctgaatttagcatttcttctttaaatggactgatgtacagttccactcagcccagcagttgcatggataacaggacattttcatacccaggtgtagtaaaaactcctgtgagtcctactttccctgagcacttgggctgtgcagggtctagaccagaatctgggcttttgaatgggtgttccatgcccagtgagaaaggacccattaagtgggttatcactgatgcggagaagaatgagtatgaaaaagactctccaagattgaccaaaaccaacccaatactatattacatgcttcaaaaaggaggcaattctgttaccagtcgagaaacacaagacaaggacatttggagggaggcttcatctgctgaaagtgtctcacaggtcacagccaaagaagagttacttcctactgcagaaacgaaagcttctttctttaatttaagaagcccttacaatagccatatgggaaataatgcttctcgcccacacagcgcaaatggagaagtttatggacttctgggaagcgtgctaacgataaagaaagaatcagaataaaatgtacctgccatccagttttggatctttttaaaactaatgagtatgaacttgagatctgtataaataagagcatgatttgaaaaaaagcatggtataattgaaacttttttcattttgaaaagtattggttactggtgatgttgaaatatgcatactaatttttgcttaacattagatgtcatgaggaaactactgaactagcaattggttgtttaacacttctgtatgcatcagataacaactgtgagtagcctatgaatgaaattcttttataaatattaggcataaattaaaatgtaaaactccattcatagtggattaatgcattttgctgcctttattagggtactttattttgcttttcagaagtcagcctacataacacatttttaaagtctaaactgttaaacaactctttaaaggataattatccaataaaaaaaaacctagtgctgattcacagcttattatccaattcaaaaataaattagaaaaatatatgcttacatttttcacttttgctaaaaagaaaaaaaaaaggtgtttatttttaactcttggaagaggttttgtggttcccaatgtgtctgtcccaccctgatccttttcaatatatatttctttaaaccttgtgctacttagtaaaaattgattacaattgagggaagtttgatagatcctttaaaaaaaaggcagatttccattttttgtattttaactactttactaaattaatactcctccttttacagaattagaaaagttaacatttatctttaggtggtttcctgaaaagttgaatatttaagaaattgtttttaacagaagcaaaatggcttttctttggacagttttcaccatctcttgtaaaagttaattctcaccattcctgtggtacctgcgagtgttatgaccaggattccttaaacctgaactcagaccacttgcattagaaccatctggagcacttgttttaaaatgcagattcataggcagcatctcagatctacagaacaagaatctctgctaagtggacctggaatcttccatctgcatcttaacatgctctctaggtgtttcttgtgtttgagaaccatgacttatgactttcctcagaacatgagactgtaaaacaaaaacaaaaaactatgtgatgcctctattttccccaatacagtcacacatcagctcaaaatttgcaatattgtagttcatatattaccgttatgtctttggaaatcgggttcagaacactttttatgacaaaaattgggtggaggggataactttcatatctggctcaacatctcaggaaaatctgtgattatttgtgtgttctaatgagtaacatctacttagttagccttagggatggaaaaacagggccacttaccaaactcaggtgattccaggatggtttggaaacttctcctgaatgcatccttaacctttattaaaaccattgtcctaagaacaatgccaacaaagcttacaacatttagtttaaacccaagaagggcactaaactcagattgactaaataaaaagtacaaagggcacatatacgtgacagaattgtacacaatcactccattggatcttttactttaaagtagtgatgaaaagtacatgttgatactgtcttagaagaaattaatatattagtgaagccacatggggtttcagttgcgaaacaggtctgtttttatgttcagtttgtacaatccacaattcattcaccagatattttgttcttaattgtgaaccaggttagcaaatgacctatcaaaaattattctataatcactactagttaggatattgatttaaaattgttctacttgaagtggtttctaagatttttatattaaaaataggtgtgatttcctaatatgatctaaaaccctaaatggttatttttcctcagaatgatttgtaaatagctactggaaatattatacagtaataggagtgggtattatgcaacatcatggagaagtgaaggcataggcttattctgacataaaattccactggccagttgaatatattctattccatgtccatactatgacaatcttattgtcaacactatataaataagcttttaaacaagtcatttttcttgatcgttgtggaaggtttggagccttagaggtatgtcagaaaaaatatgttggtattctcccttgggtagggggaaatgacctttttacaagagagtgaaatttaggtcagggaaaagaccaagggccagcattgctacttttgtgtgtgtgtgtgtgggttttgttttgtttttttggttggctggttgttttcgttgttgttaacaaaggaatgagaatatgtaatacttaaataaacatgaccacgaagaatgctgttctgatttactagagaatgttcccaatttgaatttagggtgattttaaagaacagtgagaaagggcatacatccacagattcactttgtttatgcatatgtagatacaaggatgcacatatacacattttcaaggactattttagatatctagacaatttcttctaataaagtcatttgtgaaagggtactacagcttattgacatcagtaaggtagcattcattacctgtttattctctgctgcatcttacagaagagtaaactggtgagagtatatattttatatatatatatatatatatatatataatatgtatatatatatatattgacttgttacatgaagatgttaaaatcggtttttaaaggtgatgtaaatagtgatttccttaatgaaaaatacatattttgtattgttctaatgcaacagaaaagccttttaatctctttggttcctgtatattccatgtataagtgtaaatataatcagacaggtttaaaagttgtgcatgtatgtatacagttgcaagtctggacaaatgtatagaataaaccttttatttaagttgtgattacctgctgcatgaaaagtgcatgggggaccctgtgcatctgtgcatttggcaaaatgtcttaacaaatcagatcagatgttcatcctaacatgacagtattccatttctggacatgacgtctgtggtttaagctttgtgaaagaatgtgctttgattcgaagggtcttaaagaatttttttaatcgtcaaccacttttaaacataaagaattcacacaactactttcatgaattttttaatcccattgcaaacattattccaagagtatcccagtattagcaatactggaatataggcacattaccattcatagtaagaattctggtgtttacacaaccaaatttgatgcgatctgctcagtaatataatttgccatttttattagaaatttaatttcttcatgtgatgtcatgaaactgtacatactgcagtgtgaatttttttgttttgttttttaatcttttagtgtttacttcctgcagtgaatttgaataaatgagaaaaaatgcattgtc

SEQ ID NO: 28737 - protein, 46 aa, Homo sapiens
MKALRSAEQIDYSGVPVLGTTAVRERTLIFAFNGEQKMKKEKEYIH

SEQ ID NO: 28738 - DNA, 7562 bp, Homo sapiens
cgacccggccccacgcccgcccgccacccgcgcgcgcccgtccgcccgtggcctcgcgtccgccgctgcgccgtgagcgccgctggtcggagggaagagctcgccggggcgccgggccaggacggggcggcaggcgccttcgcggaccgagcctgacggagccggaggctgggagccgcggcggcctggggaagtgtttggattgtgagctatttcagaactgttctcaggactcattattttaacatttgggagaaacacagccagaagaacactgatatttgcatttaatggggaacaaaagatgaagaaggaaaaggaatatattcactaaggattctatctgcttactgctacagacctatgtgttaaggaattcttctcctcctccttgcgtagaagttgatcagcactgtggtcagactgcatttatcttgtcattgccagaagaaatcttggacagaatgtaacagtacgtctctctctgattgcgatggaaggtgataaactgatactcctttattaaagttacatcgcactcaccacagaaaaccattctttaaagtgaatagaaaccaagcccttgtgaacacttctattgaacatgactcatggagaagagcttggctctgatgtgcaccaggattctattgttttaacttacctagaaggattactaatgcatcaggcagcagggggatcaggtactgccgttgacaaaaagtctgctgggcataatgaagaggatcagaactttaacatttctggcagtgcatttcccacctgtcaaagtaatggtccagttctcaatacacatacatatcaggggtctggcatgctgcacctcaaaaaagccagactgttgcagtcttctgaggactggaatgcagcaaagcggaagaggctgtctgattctatcatgaatttaaacgtaaagaaggaagctttgctagctggcatggttgacagtgtgcctaaaggcaaacaggatagcacattactggcctctttgcttcagtcattcagctctaggctgcagactgttgctctgtcacaacaaatcaggcagagcctcaaggagcaaggatatgccctcagtcatgattctttaaaagtggagaaggatttaaggtgctatggtgttgcatcaagtcacttaaaaactttgttgaagaaaagtaaagttaaagatcaaaagcctgatacgaatcttcctgatgtgactaaaaacctcatcagagataggtttgcagagtctcctcatcatgttggacaaagtggaacaaaggtcatgagtgaaccgttgtcatgtgctgcaagattacaggctgttgcaagcatggtggaaaaaagggctagtcctgccacctcacctaaacctagtgttgcttgtagccagttagcattacttctgtcaagcgaagcccatttgcagcagtattctcgagaacacgctttaaaaacgcaaaatgcaaatcaagcagcaagtgaaagacttgctgctatggccagattgcaagaaaatggccagaaggatgttggcagttaccagctcccaaaaggaatgtcaagccatcttaatggtcaggcaagaacatcatcaagcaaactgatggctagcaaaagtagtgctacagtgtttcaaaatccaatgggtatcattccttcttcccctaaaaatgcaggttataagaactcactggaaagaaacaatataaaacaagctgctaacaatagtttgcttttacatcttcttaaaagccagactatacctaagccaatgaatggacacagtcacagtgagagaggaagcatttttgaggaaagtagtacacctacaactattgatgaatattcagataacaatcctagttttacagatgacagcagtggtgatgaaagttcttattccaactgtgttcccatagacttgtcttgcaaacaccgaactgaaaaatcagaatctgaccaacctgtttccctggataacttcactcaatccttgctaaacacttgggatccaaaagtcccagatgtagatatcaaagaagatcaagatacctcaaagaattctaagctaaactcacaccagaaagtaacacttcttcaattgctacttggccataagaatgaagaaaatgtagaaaaaaacaccagccctcagggagtacacaatgatgtgagcaagttcaatacacaaaattatgcaaggacttctgtgatagaaagccccagtacaaatcggactactccagtgagcactccacctttacttacatcaagcaaagcagggtctcccatcaatctctctcaacactctctggtcatcaaatggaattccccaccatatgtctgcagtactcagtctgaaaagctaacaaatactgcatctaaccactcaatggaccttacaaaaagcaaagacccaccaggagagaaaccagcccaaaatgaaggtgcacagaactctgcaacgtttagtgccagtaagctgttacaaaatttagcacaatgtggaatgcagtcatccatgtcagtggaagagcagagacccagcaaacagctgttaactggaaacacagataaaccgataggtatgattgatagattaaatagccctttgctctcaaataaaacaaatgcagttgaagaaaataaagcatttagtagtcaaccaacaggtcctgaaccagggctttctggttctgaaatagaaaatctgcttgaaagacgtactgtcctccagttgctcctggggaaccccaacaaagggaagagtgaaaaaaaagagaaaactcccttaagagatgaaagtactcaggaacactcagagagagctttaagtgaacaaatactgatggtgaaaataaaatctgagccttgtgatgacttacaaattcctaacacaaatgtgcacttgagccatgatgctaagagtgccccattcttgggtatggctcctgctgtgcagagaagcgcacctgccttaccagtgtccgaagactttaaatcggagcctgtttcacctcaggatttttctttctccaagaatggtctgctaagtcgattgctaagacaaaatcaagatagttacctggcagatgattcagacaggagtcacagaaataatgaaatggcacttctagaatcaaagaatctttgcatggtccctaagaaaaggaagctttatactgagccattagaaaatccatttaaaaagatgaaaaacaacattgttgatgctgcaaacaatcacagtgccccagaagtactgtatgggtccttgcttaaccaggaagagctgaaatttagcagaaatgatcttgaatttaaatatcctgctggtcatggctcagccagcgaaagtgaacacaggagttgggccagagagagcaaaagctttaatgttctgaaacagctgcttctctcagaaaactgtgtgcgagatttgtccccgcacagaagtaactctgtggctgacagtaaaaagaaaggacacaaaaataatgtgaccaacagcaaacctgaatttagcatttcttctttaaatggactgatgtacagttccactcagcccagcagttgcatggataacaggacattttcatacccaggtgtagtaaaaactcctgtgagtcctactttccctgagcacttgggctgtgcagggtctagaccagaatctgggcttttgaatgggtgttccatgcccagtgagaaaggacccattaagtgggttatcactgatgcggagaagaatgagtatgaaaaagactctccaagattgaccaaaaccaacccaatactatattacatgcttcaaaaaggaggcaattctgttaccagtcgagaaacacaagacaaggacatttggagggaggcttcatctgctgaaagtgtctcacaggtcacagccaaagaagagttacttcctactgcagaaacgaaagcttctttctttaatttaagaagcccttacaatagccatatgggaaataatgcttctcgcccacacagcgcaaatggagaagtttatggacttctgggaagcgtgctaacgataaagaaagaatcagaataaaatgtacctgccatccagttttggatctttttaaaactaatgagtatgaacttgagatctgtataaataagagcatgatttgaaaaaaagcatggtataattgaaacttttttcattttgaaaagtattggttactggtgatgttgaaatatgcatactaatttttgcttaacattagatgtcatgaggaaactactgaactagcaattggttgtttaacacttctgtatgcatcagataacaactgtgagtagcctatgaatgaaattcttttataaatattaggcataaattaaaatgtaaaactccattcatagtggattaatgcattttgctgcctttattagggtactttattttgcttttcagaagtcagcctacataacacatttttaaagtctaaactgttaaacaactctttaaaggataattatccaataaaaaaaaacctagtgctgattcacagcttattatccaattcaaaaataaattagaaaaatatatgcttacatttttcacttttgctaaaaagaaaaaaaaaaggtgtttatttttaactcttggaagaggttttgtggttcccaatgtgtctgtcccaccctgatccttttcaatatatatttctttaaaccttgtgctacttagtaaaaattgattacaattgagggaagtttgatagatcctttaaaaaaaaggcagatttccattttttgtattttaactactttactaaattaatactcctccttttacagaattagaaaagttaacatttatctttaggtggtttcctgaaaagttgaatatttaagaaattgtttttaacagaagcaaaatggcttttctttggacagttttcaccatctcttgtaaaagttaattctcaccattcctgtggtacctgcgagtgttatgaccaggattccttaaacctgaactcagaccacttgcattagaaccatctggagcacttgttttaaaatgcagattcataggcagcatctcagatctacagaacaagaatctctgctaagtggacctggaatcttccatctgcatcttaacatgctctctaggtgtttcttgtgtttgagaaccatgacttatgactttcctcagaacatgagactgtaaaacaaaaacaaaaaactatgtgatgcctctattttccccaatacagtcacacatcagctcaaaatttgcaatattgtagttcatatattaccgttatgtctttggaaatcgggttcagaacactttttatgacaaaaattgggtggaggggataactttcatatctggctcaacatctcaggaaaatctgtgattatttgtgtgttctaatgagtaacatctacttagttagccttagggatggaaaaacagggccacttaccaaactcaggtgattccaggatggtttggaaacttctcctgaatgcatccttaacctttattaaaaccattgtcctaagaacaatgccaacaaagcttacaacatttagtttaaacccaagaagggcactaaactcagattgactaaataaaaagtacaaagggcacatatacgtgacagaattgtacacaatcactccattggatcttttactttaaagtagtgatgaaaagtacatgttgatactgtcttagaagaaattaatatattagtgaagccacatggggtttcagttgcgaaacaggtctgtttttatgttcagtttgtacaatccacaattcattcaccagatattttgttcttaattgtgaaccaggttagcaaatgacctatcaaaaattattctataatcactactagttaggatattgatttaaaattgttctacttgaagtggtttctaagatttttatattaaaaataggtgtgatttcctaatatgatctaaaaccctaaatggttatttttcctcagaatgatttgtaaatagctactggaaatattatacagtaataggagtgggtattatgcaacatcatggagaagtgaaggcataggcttattctgacataaaattccactggccagttgaatatattctattccatgtccatactatgacaatcttattgtcaacactatataaataagcttttaaacaagtcatttttcttgatcgttgtggaaggtttggagccttagaggtatgtcagaaaaaatatgttggtattctcccttgggtagggggaaatgacctttttacaagagagtgaaatttaggtcagggaaaagaccaagggccagcattgctacttttgtgtgtgtgtgtgtgggttttgttttgtttttttggttggctggttgttttcgttgttgttaacaaaggaatgagaatatgtaatacttaaataaacatgaccacgaagaatgctgttctgatttactagagaatgttcccaatttgaatttagggtgattttaaagaacagtgagaaagggcatacatccacagattcactttgtttatgcatatgtagatacaaggatgcacatatacacattttcaaggactattttagatatctagacaatttcttctaataaagtcatttgtgaaagggtactacagcttattgacatcagtaaggtagcattcattacctgtttattctctgctgcatcttacagaagagtaaactggtgagagtatatattttatatatatatatatatatatatatataatatgtatatatatatatattgacttgttacatgaagatgttaaaatcggtttttaaaggtgatgtaaatagtgatttccttaatgaaaaatacatattttgtattgttctaatgcaacagaaaagccttttaatctctttggttcctgtatattccatgtataagtgtaaatataatcagacaggtttaaaagttgtgcatgtatgtatacagttgcaagtctggacaaatgtatagaataaaccttttatttaagttgtgattacctgctgcatgaaaagtgcatgggggaccctgtgcatctgtgcatttggcaaaatgtcttaacaaatcagatcagatgttcatcctaacatgacagtattccatttctggacatgacgtctgtggtttaagctttgtgaaagaatgtgctttgattcgaagggtcttaaagaatttttttaatcgtcaaccacttttaaacataaagaattcacacaactactttcatgaattttttaatcccattgcaaacattattccaagagtatcccagtattagcaatactggaatataggcacattaccattcatagtaagaattctggtgtttacacaaccaaatttgatgcgatctgctcagtaatataatttgccatttttattagaaatttaatttcttcatgtgatgtcatgaaactgtacatactgcagtgtgaatttttttgttttgttttttaatcttttagtgtttacttcctgcagtgaatttgaataaatgagaaaaaatgcattgtc

SEQ ID NO: 28739 - protein, 1158 aa, Homo sapiens; identical to SEQ ID NO: 3963

SEQ ID NO: 28740 - DNA, 172 bp, Homo sapiens
tgcatatgtagatacaaggatgcacatatacacatttttattagaaatttaatttcttcatgtgatgtcatgaaactgtacatactgcagtgtgaatttttttgttttgttttttaatcttttagtgtttacttcctgcagtgaatttgaataaatgagaaaaaatgcattg

SEQ ID NO: 28741 - DNA, 7245 bp, Homo sapiens
ggaaaaggaatatattcactaaggattctatctgcttactgctacagacctatgtgttaaggaattcttctcctcctccttgcgtagaagttgatcagcactgtggtcagactgcatttatcttgtcattgccagaagaaatcttggacagaatgtaacagtacgtctctctctgattgcgatggaaggtgataaactgatactcctttattaaagttacatcgcactcaccacagaaaaccattctttaaagtgaatagaaaccaagcccttgtgaacacttctattgaacatgactcatggagaagagcttggctctgatgtgcaccaggattctattgttttaacttacctagaaggattactaatgcatcaggcagcagggggatcaggtactgccgttgacaaaaagtctgctgggcataatgaagaggatcagaactttaacatttctggcagtgcatttcccacctgtcaaagtaatggtccagttctcaatacacatacatatcaggggtctggcatgctgcacctcaaaaaagccagactgttgcagtcttctgaggactggaatgcagcaaagcggaagaggctgtctgattctatcatgaatttaaacgtaaagaaggaagctttgctagctggcatggttgacagtgtgcctaaaggcaaacaggatagcacattactggcctctttgcttcagtcattcagctctaggctgcagactgttgctctgtcacaacaaatcaggcagagcctcaaggagcaaggatatgccctcagtcatgattctttaaaagtggagaaggatttaaggtgctatggtgttgcatcaagtcacttaaaaactttgttgaagaaaagtaaagttaaagatcaaaagcctgatacgaatcttcctgatgtgactaaaaacctcatcagagataggtttgcagagtctcctcatcatgttggacaaagtggaacaaaggtcatgagtgaaccgttgtcatgtgctgcaagattacaggctgttgcaagcatggtggaaaaaagggctagtcctgccacctcacctaaacctagtgttgcttgtagccagttagcattacttctgtcaagcgaagcccatttgcagcagtattctcgagaacacgctttaaaaacgcaaaatgcaaatcaagcagcaagtgaaagacttgctgctatggccagattgcaagaaaatggccagaaggatgttggcagttaccagctcccaaaaggaatgtcaagccatcttaatggtcaggcaagaacatcatcaagcaaactgatggctagcaaaagtagtgctacagtgtttcaaaatccaatgggtatcattccttcttcccctaaaaatgcaggttataagaactcactggaaagaaacaatataaaacaagctgctaacaatagtttgcttttacatcttcttaaaagccagactatacctaagccaatgaatggacacagtcacagtgagagaggaagcatttttgaggaaagtagtacacctacaactattgatgaatattcagataacaatcctagttttacagatgacagcagtggtgatgaaagttcttattccaactgtgttcccatagacttgtcttgcaaacaccgaactgaaaaatcagaatctgaccaacctgtttccctggataacttcactcaatccttgctaaacacttgggatccaaaagtcccagatgtagatatcaaagaagatcaagatacctcaaagaattctaagctaaactcacaccagaaagtaacacttcttcaattgctacttggccataagaatgaagaaaatgtagaaaaaaacaccagccctcagggagtacacaatgatgtgagcaagttcaatacacaaaattatgcaaggacttctgtgatagaaagccccagtacaaatcggactactccagtgagcactccacctttacttacatcaagcaaagcagggtctcccatcaatctctctcaacactctctggtcatcaaatggaattccccaccatatgtctgcagtactcagtctgaaaagctaacaaatactgcatctaaccactcaatggaccttacaaaaagcaaagacccaccaggagagaaaccagcccaaaatgaaggtgcacagaactctgcaacgtttagtgccagtaagctgttacaaaatttagcacaatgtggaatgcagtcatccatgtcagtggaagagcagagacccagcaaacagctgttaactggaaacacagataaaccgataggtatgattgatagattaaatagccctttgctctcaaataaaacaaatgcagttgaagaaaataaagcatttagtagtcaaccaacaggtcctgaaccagggctttctggttctgaaatagaaaatctgcttgaaagacgtactgtcctccagttgctcctggggaaccccaacaaagggaagagtgaaaaaaaagagaaaactcccttaagagatgaaagtactcaggaacactcagagagagctttaagtgaacaaatactgatggtgaaaataaaatctgagccttgtgatgacttacaaattcctaacacaaatgtgcacttgagccatgatgctaagagtgccccattcttgggtatggctcctgctgtgcagagaagcgcacctgccttaccagtgtccgaagactttaaatcggagcctgtttcacctcaggatttttctttctccaagaatggtctgctaagtcgattgctaagacaaaatcaagatagttacctggcagatgattcagacaggagtcacagaaataatgaaatggcacttctagaatcaaagaatctttgcatggtccctaagaaaaggaagctttatactgagccattagaaaatccatttaaaaagatgaaaaacaacattgttgatgctgcaaacaatcacagtgccccagaagtactgtatgggtccttgcttaaccaggaagagctgaaatttagcagaaatgatcttgaatttaaatatcctgctggtcatggctcagccagcgaaagtgaacacaggagttgggccagagagagcaaaagctttaatgttctgaaacagctgcttctctcagaaaactgtgtgcgagatttgtccccgcacagaagtaactctgtggctgacagtaaaaagaaaggacacaaaaataatgtgaccaacagcaaacctgaatttagcatttcttctttaaatggactgatgtacagttccactcagcccagcagttgcatggataacaggacattttcatacccaggtgtagtaaaaactcctgtgagtcctactttccctgagcacttgggctgtgcagggtctagaccagaatctgggcttttgaatgggtgttccatgcccagtgagaaaggacccattaagtgggttatcactgatgcggagaagaatgagtatgaaaaagactctccaagattgaccaaaaccaacccaatactatattacatgcttcaaaaaggaggcaattctgttaccagtcgagaaacacaagacaaggacatttggagggaggcttcatctgctgaaagtgtctcacaggtcacagccaaagaagagttacttcctactgcagaaacgaaagcttctttctttaatttaagaagcccttacaatagccatatgggaaataatgcttctcgcccacacagcgcaaatggagaagtttatggacttctgggaagcgtgctaacgataaagaaagaatcagaataaaatgtacctgccatccagttttggatctttttaaaactaatgagtatgaacttgagatctgtataaataagagcatgatttgaaaaaaagcatggtataattgaaacttttttcattttgaaaagtattggttactggtgatgttgaaatatgcatactaatttttgcttaacattagatgtcatgaggaaactactgaactagcaattggttgtttaacacttctgtatgcatcagataacaactgtgagtagcctatgaatgaaattcttttataaatattaggcataaattaaaatgtaaaactccattcatagtggattaatgcattttgctgcctttattagggtactttattttgcttttcagaagtcagcctacataacacatttttaaagtctaaactgttaaacaactctttaaaggataattatccaataaaaaaaaacctagtgctgattcacagcttattatccaattcaaaaataaattagaaaaatatatgcttacatttttcacttttgctaaaaagaaaaaaaaaaggtgtttatttttaactcttggaagaggttttgtggttcccaatgtgtctgtcccaccctgatccttttcaatatatatttctttaaaccttgtgctacttagtaaaaattgattacaattgagggaagtttgatagatcctttaaaaaaaaggcagatttccattttttgtattttaactactttactaaattaatactcctccttttacagaattagaaaagttaacatttatctttaggtggtttcctgaaaagttgaatatttaagaaattgtttttaacagaagcaaaatggcttttctttggacagttttcaccatctcttgtaaaagttaattctcaccattcctgtggtacctgcgagtgttatgaccaggattccttaaacctgaactcagaccacttgcattagaaccatctggagcacttgttttaaaatgcagattcataggcagcatctcagatctacagaacaagaatctctgctaagtggacctggaatcttccatctgcatcttaacatgctctctaggtgtttcttgtgtttgagaaccatgacttatgactttcctcagaacatgagactgtaaaacaaaaacaaaaaactatgtgatgcctctattttccccaatacagtcacacatcagctcaaaatttgcaatattgtagttcatatattaccgttatgtctttggaaatcgggttcagaacactttttatgacaaaaattgggtggaggggataactttcatatctggctcaacatctcaggaaaatctgtgattatttgtgtgttctaatgagtaacatctacttagttagccttagggatggaaaaacagggccacttaccaaactcaggtgattccaggatggtttggaaacttctcctgaatgcatccttaacctttattaaaaccattgtcctaagaacaatgccaacaaagcttacaacatttagtttaaacccaagaagggcactaaactcagattgactaaataaaaagtacaaagggcacatatacgtgacagaattgtacacaatcactccattggatcttttactttaaagtagtgatgaaaagtacatgttgatactgtcttagaagaaattaatatattagtgaagccacatggggtttcagttgcgaaacaggtctgtttttatgttcagtttgtacaatccacaattcattcaccagatattttgttcttaattgtgaaccaggttagcaaatgacctatcaaaaattattctataatcactactagttaggatattgatttaaaattgttctacttgaagtggtttctaagatttttatattaaaaataggtgtgatttcctaatatgatctaaaaccctaaatggttatttttcctcagaatgatttgtaaatagctactggaaatattatacagtaataggagtgggtattatgcaacatcatggagaagtgaaggcataggcttattctgacataaaattccactggccagttgaatatattctattccatgtccatactatgacaatcttattgtcaacactatataaataagcttttaaacaagtcatttttcttgatcgttgtggaaggtttggagccttagaggtatgtcagaaaaaatatgttggtattctcccttgggtagggggaaatgacctttttacaagagagtgaaatttaggtcagggaaaagaccaagggccagcattgctacttttgtgtgtgtgtgtgtgggttttgttttgtttttttggttggctggttgttttcgttgttgttaacaaaggaatgagaatatgtaatacttaaataaacatgaccacgaagaatgctgttctgatttactagagaatgttcccaatttgaatttagggtgattttaaagaacagtgagaaagggcatacatccacagattcactttgtttatgcatatgtagatacaaggatgcacatatacacattttcaaggactattttagatatctagacaatttcttctaataaagtcatttgtgaaagggtactacagcttattgacatcagtaaggtagcattcattacctgtttattctctgctgcatcttacagaagagtaaactggtgagagtatatattttatatatatatatatatatatatatataatatgtatatatatatatattgacttgttacatgaagatgttaaaatcggtttttaaaggtgatgtaaatagtgatttccttaatgaaaaatacatattttgtattgttctaatgcaacagaaaagccttttaatctctttggttcctgtatattccatgtataagtgtaaatataatcagacaggtttaaaagttgtgcatgtatgtatacagttgcaagtctggacaaatgtatagaataaaccttttatttaagttgtgattacctgctgcatgaaaagtgcatgggggaccctgtgcatctgtgcatttggcaaaatgtcttaacaaatcagatcagatgttcatcctaacatgacagtattccatttctggacatgacgtctgtggtttaagctttgtgaaagaatgtgctttgattcgaagggtcttaaagaatttttttaatcgtcaaccacttttaaacataaagaattcacacaactactttcatgaattttttaatcccattgcaaacattattccaagagtatcccagtattagcaatactggaatataggcacattaccattcatagtaagaattctggtgtttacacaaccaaatttgatgcgatctgctcagtaatataatttgccatttttattagaaatttaatttcttcatgtgatgtcatgaaactgtacatactgcagtgtgaatttttttgttttgttttttaatcttttagtgtttacttcctgcagtgaatttgaataaatgagaaaaaatgca

SEQ ID NO: 28742 - protein, 1158 aa, Homo sapiens; identical to SEQ ID NO: 3963

SEQ ID NO: 28743 - DNA, 751 bp, Homo sapiens
actgaactcccaatctgcttcaagatctgtcttaggattggtgaattatgttcatttttaaaaagggatgtgatagacaacatctagagaaacaggcaaggagtatatatctgaaaaggacaaggcgctttgaaactgacagctcatcaacaggttcatggatgaacctggaaatatttataaatattgattccagatttcagagacggggtttcgaaatgttgcccaggttggtctagaactcccggactcaagtgatcccccgaccaggcctcccaaagtgctgggattatcggtgtgagccaccaacccctgcagagtctacatctgaaataaaccacagaagcaaggatatcacttaaacaatgtaacttaccaattcagtctgagtgagttttgtagtttataacatattgatgaaaacagttaagtgtccacattccgtttacataagagaatgctattcaagcttttaaaataaaaaacttaaactattcccctcaccccccaaaaagtctaactataaagatgggtttgctacaaaataattagcaaaactgatttaccaagtaagatgtcctcccgctcactgccccccagaaatacgtatactgtaggaatactcctaggaagtgacacaagtgaaagaaagaatattctttcaatatgctaaaaacatctacagtgcactaaaaaaaagtccctaaatttggcaatacatttcttccaaaaatgttattcaataacataa

SEQ ID NO: 28744 - protein, 63 aa, Homo sapiens
MFIFKKGCDRQHLEKQARSIYLKRTRRFETDSSSTGSWMNLEIFINIDSRFQRRGFEMLPRLV

SEQ ID NO: 28745 - DNA, 446 bp, Homo sapiens
agtaattattgtagtaggttgtagcggattcagtaaatatatccagttcctattctatattctttctaggtgttaggaatgctcccaggaggtacaaaagctatcagtcgctgcaccgaaggactctaggatgctatgacttagttttggaccatggagattgcccagcaagccgagaatattccagccctccaacattgttgttaaaaagtccactgctgtatgttaggtgacttcccaaagctgctcactacttcttcttattctgttttctcaaccccacaaaaatccaatcactgaaatcctgaactcttttgatagtggcatgagtgttaagtaaattgcacacctcttgtggaattcattttcacttaatcatgctaattatgtggagacttgtttgttgttgttctttgtttttttaagtaaatcaatacctaaatttc

SEQ ID NO: 28746 - protein, 71 aa, Homo sapiens
VVADSVNISSSYSIFFLGVRNAPRRYKSYQSLHRRTLGCYDLVLDHGDCPASREYSSPPTLLLKSPLLYVR

SEQ ID NO: 28747 - DNA, 790 bp, Homo sapiens
ccatatcctgttctgttgttggatttcattcttatactggttgcctcattataagggacaatttggacacagagacagaacacatagaggcaacacgatgtgaagaggcacagggagaaaattgccatctacaagtctgcaccatatccttccctcacagccttcagaaggaaacaagtctgtggacaccttgatgctggacttagaggcctccagaactgtgagacagtaaaattatactcttcaagccaattcaagccaatctctctgatgatttctgctcaggtctctttgtccggaataagtttgtataatcaccccaagatgctaataaaggtgtggtggtgatgggagacaagaaaagatagcccattcttatttttgccttttaaaatttcagtactgggacatttcttccttgaaaaaataaacttttttgttgacccatacaaaatggaatgatagcagtgcccaccgtaacagagacttcatttatttcaccacttgtacacattttcacttcatgtagacatctgattgttctatgagagattctatgattgttctatgagacccagctatatttatgaagatgaatattatttaaacagatagataagattaaaagagaagatagactgggaaaaggatacatttagtatagatttcggggagtttgaagcaaggcaactatgatataattctagatgtattatttacattttataactttttctttccaaccattctccacacttcatctcacaggtttttaaaaaactaatctatt

SEQ ID NO: 28748 - protein, 63 aa, Homo sapiens
ISCSVVGFHSYTGCLIIRDNLDTETEHIEATRCEEAQGENCHLQVCTISFPHSLQKETSLWTP

SEQ ID NO: 28749 - DNA, 2602 bp, Homo sapiens
gcccactcacacacatagagtagcatgttatggcacttacactaataaagccactgctatcaaagttctggacttgatttccagcagtattagctctgttttaccctcaagcttctgggttagtgggttattgctcaccaaagaagttctggttggaagaagaggtaagatatctccagagccgctgagaagaatgagtaaggtaaaactggtggcattcctgactgaatacccttcactcacaggaggcagtgtggaacagtgggaatgaggagtgctatgggactttgtatatctggtctggaagcctgtttctggtacgtacagctagggatttgtagaagacttcaggactccagatgactctgaaatacttagcaacagtagaagataactacataagaggagcttggaactttggctcaccatggggaagagcaccactgaaggctgactatatctgcactgaacttgatggagcaagaataaattttactctccactaacatctagggggttgtattttacagcaattgccaccatcatcaatatagctgatactgtgagacagaaggtaaagtctgaacaagtttatagcctcagtgcaagtagctgaagaacaaaaccactaactctgtgtgaagaaggatatcaaggttttttaaaaacaataaaaaatgatagtgttgtagacctagttacgcatcatataaaatcctcccatacctaccagcttatgtattcatcctgtctttgatcctggcccttgcctattttctaagggacagacgtaacgataactcagggacttcccaggtccagactactccccctgctctaccaccaacagaagtttggcaccctcatgcgatgcattggctgacaaggaaagacttaccttcacatggtcatgctggacccacgggtatctgcttctctctacccagaggggccaaattacacatcctctatgtgaaatgtgaatgagtcaatgctccatggggcacacttataccaatgagaaaccaacgagaaacagaatatgagattttctctttctacaaaattttagaaataaaataagaaaaaaatagttcacctaaattaagcaaatattttcctataaagcacccacattttcttgcaataaatacattaacctggagaaatgtcactaacatgtcaaattaacttctcaattaataaaggccaattttgatgtatttctagcactttcaagctagaaataatgtgaatagttttaaactgaagtgttttacactttagttttacagttttacagttctggtaaatatttggcttctgtgcttttaagttactgttgtaactctgaagccatattttgatttaatcctgaaaggtttcagaaagaaatcatggactacaaaacttgtatagagtaactcttttgttttaagcaaataaatacaacgttaaaaaattctgcattggacaaaagtaaagcagtttagcttactcaaataaaacacagctgaatgatgatcagtgtattcttctatatgttattgtatcttcaacctcaccagacttttggctggtagtcccaacaatgtgtcctaaacttcatattacctgttttgatgttgattttcactgcaactgaccataaacacttcaagttagagactgttattgatattatttctctttttaattattaatgttatgtgaagtaacaagcatatagtagggaatcaataaggattagagaaattaacttaagaggaaaaatacacatctgaagctgaaataaaatactcagaagggaagtattacgggagatattttaaggacttgacatttcattgattaagatttctttttttcctcattgtgtagtatcaaagatctttcaaaaattacagggatatcaacatagaagaacatatttagaaacatcacataatgattccaaaatattgtctttacttttaagattttttagaaatctctctaacataaacttccttgggaatgggatcacttaaggataaggaactttggattgctgcagagccataaattacaaattccaaccagctgacagattgaactttgaaaataaagaaaaatgcaaacccacaagtttaaaatgtaaacatgttgcccaaaaccattaaaaagtcagtttgcatgatactctcaaggttgttttttaaaaagcctgtctgttaagtaaagacagtattgttcaccctttgaagctgattctcaagaaggggtgcccttctgctactctctatgaaaataaaaatgaaaataaaatataaggttttatttcctgcttagagttgtcctaggcctgtgctaatgctttctactgctttatttctaaaattttgtatatgaagctattgctacaggaaatcttttttttcttaagactttaatacctggtaatcacactactgtagaattacttctctataaggaccttatcagtaggatttagtaggcaattcaagaagataacaagccatgaaaagatttggaatttttctggctatgagataatcaatgatgttctataaaattctgggaattatatcattttggaact

SEQ ID NO: 28750 - protein, 31 aa, Homo sapiens
MRSAMGLCISGLEACFWYVQLGICRRLQDSR

SEQ ID NO: 28751 - DNA, 953 bp, Homo sapiens
atttggacatcaaacaagagaagaaggacctttaatgaaataacttacattttttctaccaatatcccatcagccgaaactactctctctccccactcctccaacactctggaatataaaacagatttatgagtaaccaccactctgttaggtgcactttgaatttagttctttcaaagagaaacgggaatgggactgtagccacctcaagaaatgatactggcaaaagacacatttggtattcctattttattgccacaatatgctgaattttgtctatattaaggaaaaggtttcagccaacaacctgcgtcaacaaccacacatgtgaggaaagatgtcttctgaagattccagcctccagccagcaagcctttccaagtataaccctaggacacaaatcaaaattactcagaatttgaagagccaggaaaatatcaacttgagtgggaaaaggcaatcaacatatgccctttattgtgcaaaactcgggtaacaggtaaacaagattaacagggaccgctaggatcaagaaatggaagatgcctccctacatacatctgagatgaatccacaaagatatcaatgcctcaagagccttgccgaattccacctgctgtcctgggatctccgccttccccatagaaccaagcgtgggctagtcccctggaggatgagatctcacatagtccataatcaaatgggtctccttcctagccagtaatactgcagacaaacgagagttccagcaaacgtcatcgtaatgaagagatcccatccttcatggtcacactcacagcaatatttcatctactcctctctccttcatctgttgtctgtcttttccgtgacttttccttcaaccttcctgtttttgaatgcattttgatgttatcatatagcataatagctctatgtctccttcactctatataaagctcttcagcaacggg

SEQ ID NO: 28752 - protein, 62 aa, Homo sapiens
MEDASLHTSEMNPQRYQCLKSLAEFHLLSWDLRLPHRTKRGLVPWRMRSHIVHNQMGLLPSQ

SEQ ID NO: 28753 - DNA, 1105 bp, Homo sapiens
ctctttttgcctgctgccatccacgtaagatgtgacttgcacctccttgtcttctgccacgattgtgaggcttccccagccatgtggaactacatctacccctggagaaagagcccaatgagaagtaatctctgaagcccagatttcctaaggatgaagcttcaggagaggccttatcaatcctgacaacaaacttttctcgtcaatttagtttcatttaatggaagttttaaatgtgtaaagttcagaaggctattaaaattggttccagctatctaagatacacacacaaccacacacgcgcacacacggtagagataaatatgttcgaaaatccagctcaatgttactagaaaatttgatcagaatctggtgaaataaatagtaaacttactaaaaatgccaaatatcccagaagctgcttaacatttgatcaaaagctctgtccagtcaattcctgcttctttcaaaaatactctgctgaaaagccaaaggagaaatggggctggtaccttcaatatagagaattccaagtaagattagatcccagaaggcttagtgtggctttctaggactctcactattaggcagtaacctaccattcacctctgtttcccagattcaccttgttataccttataacttaaaatataaattccaacaatgtactgcactcaaaaaaattatttctcaatttgtttgctcatactattgatttttttctagaatctaaataattgtgaattaactatgatagcagtatgcacaaacagtaagtgaaatcagacctattaattctgagaggaaggaggtgtcaggattttcacagaagaagagcactaaggccaggcgcagtggctcatgcctgtaatcccagcactttgggaggctgaggcaggcggatcaggaggtcaggagttctagaccagccagacaaacatggtgaaaccccgtctctactaaaaatacaaaaattacacgcctgtaatcccagctactcaggaggctgaggcagaagaatcgcttaaacccgggaggcggaggttgcagtgagctgagatcgcgcgactgcactccagcttgggcgacagagcaagactccatc

SEQ ID NO: 28754 - protein, 39 aa, Homo sapiens
MCKVQKAIKIGSSYLRYTHNHTRAHTVEINMFENPAQCY

SEQ ID NO: 28755 - DNA, 828 bp, Homo sapiens
gccctgttcaaatggttacaaagttcagctagagaattccttctccctgtagagttttaccccctgctcctctggccgccctccggatggatctttgtgttgccaggcaggaatgggctgcttggggacccagtgagctccgagggcctttctgctgcttcctgtacccctgtatttcgctcagctctctgacttgactcagctccagacatctacccctggagaaagagcccaatgagaagtaatctctgaagcccagatttcctaaggatgaagcttcaggagaggccttatcaatcctgacaacaaacttttctcgtcaatttagtttcatttaatggaagttttaaatgtgtaaagttcagaaggctattaaaattggttccagctatctaagatacacacacaaccacacacgcgcacacacggtagagataaatatgttcgaaaatccagctcaatgttactagaaaatttgatcagaatctggtgaaataaatagtaaacttactaaaaatgccaaatatcccagaagctgcttaacatttgatcaaaagctctgtccagtcaattcctgcttctttcaaaaatactctgctgaaaagccaaaggagaaatggggctggtaccttcaatatagagaattccaagtaagattagatcccagaaggcttagtgtggctttctaggactctcactattaggcagtaacctaccattcacctctgtttcccagattcaccttgttataccttataacttaaaatataaattccaacaatgtactgcactcaaaaaaattatttctcaatttgtttgctcatacta

SEQ ID NO: 28756 - protein, 39 aa, Homo sapiens; identical to SEQ ID NO: 28754

SEQ ID NO: 28757 - DNA, 864 bp, Homo sapiens
gatctttgtgttgccaggcaggaatgggctgcttggggacccagtgagctccgagggcctttctgctgcttcctgtacccctgtatttcgctcagctctctgacttgactcagctccagaaatattctttcattaatattacatgcttatggaactttacctattgattaaagacatctacccctggagaaagagcccaatgagaagtaatctctgaagcccagatttcctaaggatgaagcttcaggagaggccttatcaatcctgacaacaaacttttctcgtcaatttagtttcatttaatggaagttttaaatgtgtaaagttcagaaggctattaaaattggttccagctatctaagatacacacacaaccacacacgcgcacacacggtagagataaatatgttcgaaaatccagctcaatgttactagaaaatttgatcagaatctggtgaaataaatagtaaacttactaaaaatgccaaatatcccagaagctgcttaacatttgatcaaaagctctgtccagtcaattcctgcttctttcaaaaatactctgctgaaaagccaaaggagaaatggggctggtaccttcaatatagagaattccaagtaagattagatcccagaaggcttagtgtggctttctaggactctcactattaggcagtaacctaccattcacctctgtttcccagattcaccttgttataccttataacttaaaatataaattccaacaatgtactgcactcaaaaaaattatttctcaatttgtttgctcatactattgatttttttctagaatctaaataattgtgaattaactatgatagcagtatgcacaaacagtaagtgaaa

SEQ ID NO: 28758 - protein, 39 aa, Homo sapiens; identical to SEQ ID NO: 28754

SEQ ID NO: 28759 - DNA, 4486 bp, Homo sapiens
tcaagataggttgaaaggggagttcgtagtcatctcttctaatcaggagatccctgaaagccgaacatttaaatgttctcttcttgaaataaaaataccatagttttagttaggaatgtgctatgttgaaaataacagaaaaactgacctctgtggcttaaacaagtaaggatttattttccttccgtagctggaggaagggaggtgcagctttggctcagctcttaacagtgcaacatctagtgcctctatagttctcttggacacagatggctgctttcgaagaagaaagaagtggaaagtgatggagtttctatgctccagctctctttgcctgctgccatccacgtaagatgtgacttgctcctctttgccttctgccataattgtgagcccccctcagccatgtggaatggcccacagccaagccattgagagacaagtccatgggagacaaattagctcatgcagctgagatgtcctggagattttccacagcaccacttggccagtgcctagacaagaggccatctttgaagaagtaaacaagtaccatacactaaagggatgacagaacaacgaaacaaaaggcttccgaggcgatccggcaacatcagtcttcagccgctaagccaagaagatctgggaaggagtcaatcagagagccttgggccagagttccaggggctgtggaagtggctgccagggtgtggtgacgcaacctgtagtcccagcacttcgggaggccgaggtggcagatcactcgagctcaggagttcaagagcagcctggcaaaatcccgtgactccagaagtatgaaaattagccgggcgtggtggcgcacacctgtagtcctagctacttgggaggctgaggtgggaggattgcgtgagctcgggaggttaaggctgcagtgagctgagatcgcaccaccacactgcggtctgggtgacagagtgagatcctgtctcaaaaaacaaaataaaatataacaaaactggtatagacattcatatgtaggtttttgtatggatttggtatgatttttattgttaaagtttagtttttatgttttagagttatatatatatatgaatcatttaatttgtatgcttatgtgtttggctccttttcctcagcataatgttttaagattcctctatgaatcagttgcatatatcaggagttttttcttatagttcagtaatattccattatgtgaatatagtataatttctttatctcttcagctgttaatggacatttagggtgttcagtttggggatatttgaaatgttatgaacatttttgtacagatcttatgatacatacatttttatttttcttatcagaatgatattactgagtcatgtgatatttttatttttaacattatgtaaactgttttaaatagaacaattgttttccaaagtagctgtgctatttataccttcagtcaaaatatacaaaagtttcttgttactgcacataatctccaacagaaaggacttatggtaaatctttaacaaattttagtcattctactccctgttggtggtatctttttgtggtatttttgaaagaaattgacttttattgagatatgatttacatataattaaatgaccacattaagagtacactttgataagttttgctaactgtacatatcaatgtaaccaccacaattgaaaattagatcttttttatcttctcaaagtgttcctttatgctcttctgtagacaatcttccccagtcctcaacacaggcaccaatggatatgaattcagtcattgtcgactggtgttctgcctgtcctagatgtcacgtaaatggattcaaatagatgtgtgctcttgtgtctgactccttttgttcagcgtggtgcttttgagatttatctgtgtcatttggggtatcagtaattcatatcttttatttccaactagggttgtgtgattataccacaatgtcttttgcaaattagttgtttcattttatatattttatatgtatcagcagtttatgagttataaataacttttctttataaattacccagtttcaggtagttctttggtggtgttttcctgttgctctccgttctaacacctgatattgttggtcttacttttagccattttagtactagatgctccccgactcacgatggggttatgccccaataaatccattgttaagttgaaaatatcacaagttgaaaatgcatttttaatacactttaactatcaaacgtcatagcttagcctagcctaccttaaacaggctcacaacacttacattattctacacttgagcaaaatcatctggcaacacagcaaactgtagagtatctcttgtttactctggtgatcttgtggctgactggaagccttagctccctgccactgtccaacatcccaagagggttttctactgctttctactgaatgtgtattgcttttgcaccattttaaagtaaaaaaagttatatgtcaaatcatcaaaagttgttttgatgagattttctgtttgtgtagtaatatttcactttagttataatttctgtatacctgacagccaattatattgtgtatgtttatatttatttacttatttcataccttcttgtatgaaattgttgtccaaattttttgtccagtttctaaatcacagtttactttctcattattaatatgttttttatttttattttttattatttttgtttttagacggagtctcttctctgtcgcccaggctcgagtgcagtggcgcaatctctgctcactgcaagctccgcctcctgggttcacgccattctcctgcctcagcctcccgagtagctgggactacaggcgcccgccaccacacctggctaagttttgtatttttttagtagagacggggtttcaccgtggtctacatctcctgacctcgtgatctgcccgcctcggcctcccaaagtgctgggattacaggcgtgagccaccgcacccggccaagttttttcttttgtaaaatttgaatatataagtcccatataaggtcaatttattcttttttctcgcatggtcagtgctatacaagatgataaagatatatgcctaccttttcttttgttaagtttatatttcagctcatatgttaaatctataatccattttgagttaattttgtagatggggtgaggtaagaatagatacacaacttttaggctgatattcagttgtcctagcactagtttattgaagatacttttttccccattaaatgtccttgaactttttcaaaaaagcaattgactatatgtgtttgggtgttgatacagtttgagtctgtgtccccacccaaatcatgtcaaattgaaatccccaatgttggaggtggggcctggtggggagtgattggttcatggggacagattttccctttggtgttgttgttatgacagcgagtgagttatgagatctggttgttcaaaagtgtgtaacacctccccactctctcttcctcctgctctggccatgtaagacgtgactgcttgcccttcaccttccgtcatggttgaaagtttcctgaggtctccccaaacatgcttcccatacagcttcccaactgtgaacaaatgaaatctcttttctttataaattacccagtttcaggtagttctttacagtagtgagggaacagactaatacagttatatcctgttccatcttttttctaatgctttgctgcattgtcttataacacagctttataatcttaaaatcataacctgtaggccctcaaaatcttttctttttaaaaattattttggctattgaaggtcctttgtgtttccgtataaatttgacaattgtctggttgatttcctcaaaaattcttttggcttccaaaatttgaaagcagcctaagtgttatcaagaattgaatggataaataaaatgcagtacagatacacaatggagtactattcagcaatagaaagaatgaaatcctgtcatttgcaacaacatggatggaactggaggtcattatgttaagtgaaataagccatacacagaaagacaaacttcatatattctcacttttttgcgagagctaaaaattaaaacaattgaactcatggagatggagaatagattgatggttaccagaggcttggaaggatagtgggagtggggaatgtggatggttaatgggtacaaaaatacaggtttatagggttaatacctgttgatacaacaacatggtagctacagccaacaataatttatcatacatttaaaaataaccaaaacagtataattgaaatatttgtaacacaaggaaaatgataagtacctgaggtgacgggtaccctatttaccctgatgtgattattacacattgtatgtctgtatcaaaatatctcaggtactgataaatgcatacacctactatgtacccataaaaatcaaaaattaaaaattaaacaac

SEQ ID NO: 28760 - protein, 83 aa, Homo sapiens
MTEQRNKRLPRRSGNISLQPLSQEDLGRSQSESLGPEFQGLWKWLPGCGDATCSPSTSGGRGGRSLELRSSRAAWQNPVTPEV

SEQ ID NO: 28761 - DNA, 422 bp, Homo sapiens
cccgcagcggacgctccccacgaggtagagccccgtttccacacctggagcagctgcacctggaggtggggctcatctccagacctggagcagctgcctgccccagggcagaagccactgcccgcagctagggagcattgaggaggtctccccaggtccgcgcgggttttctccaggtcctccagtttcctcccacatcccaagtatacacctcagcctcacggcatgtctacatgggcctagtccgagtgagtgtgggtgtcccatggaggcctgtcctatccagggcgggtgcccaccttggcactgagcctccaggatgggccctggtcacctgccactctgaactggagaaagcaagttggaaaatgaatgaatacatgaatataaattatcaaataaaaattataaagcctacggta

SEQ ID NO: 28762 - protein, 62 aa, Homo sapiens
MGLVRVSVGVPWRPVLSRAGAHLGTEPPGWALVTCHSELEKASWKMNEYMNINYQIKIIKPT

SEQ ID NO: 28763 - DNA, 980 bp, Homo sapiens
cctctgacagccctccaagtgtgagcagaccgaggctgtttcgggaggcctggagccctttggcgctgccctcagtctgcctctgagccaaaacctgcagccggcctcgtcgccagcaatgctgggaccccaaggttgaaatgatataggaaacaagggtaccccccaggatgtctgaagggtgagatgcagagaccgcacaggcggcagagtcagatggacgcagcttccacacgggccccacctaggccatctgcgccccagcaagggagacgccagcccagcatgcctggctcagcgcagtgccaccacaggcccgaccctcacccccccgccccggggaagaaaaaatcgagccctgtcgggaggtttttcccggcctctgcgatggctcctccgtggctccccggcattgtttccgcggcccagcttaagcctgtcctcagcgatttgccgccccactgcacccgagctcaatgccagcccctcacacaaaggccacattcacttcatctacaggattcccgtaacgccagcagtctgccccacaaaggctggcgctgcaattttccactccagggccccgcggggctcacacacaaatccgcctgtgtagggcggatggggcattgttgtggctcagcggggaatgtgcctgagctaagccctcgccctgcttctcctcgaggtcagcaggttacacaggatggtcccctgcagacccccgagctgccctcagagtgcaacgtggggccggtcatgtcccgccagccctttccagaacaaagccagcagggagagtgtgccatagacccccgaggccctccgaggctggagttaagttggggagaggatcctctttcgggggtttagagataattctgtcccacagcacacactgggcgctcaccactgccaggacgtgcaggtcatgggtgacggggacagagccagtgacgtcccgccctccccctgcgggc

SEQ ID NO: 28764 - protein, 228 aa, Homo sapiens
MQRPHRRQSQMDAASTRAPPRPSAPQQGRRQPSMPGSAQCHHRPDPHPPAPGKKKSSPVGRFFPASAMAPPWLPGIVSAAQLKPVLSDLPPHCTRAQCQPLTQRPHSLHLQDSRNASSLPHKGWRCNFPLQGPAGLTHKSACVGRMGHCCGSAGNVPELSPRPASPRGQQVTQDGPLQTPELPSECNVGPVMSRQPFPEQSQQGECAIDPRGPPRLELSWGEDPLSGV

SEQ ID NO: 28765 - DNA, 739 bp, Homo sapiens
agggagggctcggccttggctccacactgcgctgcccagaggccccgctgactcctgccagcctccaggtccccgtggtaccaaagctgaacatggacgtgaccatccagcacccctggttcaagcgcaccctggggcccttctaccccagccggctgttcgaccagtttttcggcgagggcctttttgagtatgacctgctgcccttcctgtcgtccaccatcagcccctactaccgccagtccctcttccgcaccgtgctggactccggcatctctgaggttcgatccgaccgggacaagttcgtcatcttcctcgatgtgaagcacttctccccggaggacctcaccgtgaaggtgcaggacgactttgtggagatccacggaaagcacaacgagcgccaggacgaccacggctacatttcccgtgagttccaccgccgctaccgcctgccgtccaacgtggaccagtcggccctctcttgctccctgtctgccgatggcatgctgaccttctgtggccccaagatccagactggcctggatgccacccacgccgagcgagccatccccgtgtcgcgggaggagaagcccacctcggctccctcgtcctaagcaggcattgcctcggctggctcccctgcagccctggcccatcatggggggagcaccctgagggcggggtgtctgtcttcctttgcttcccttttttcctttccaccttctcacatggaatgagg

SEQ ID NO: 28766 - protein, 173 aa, Homo sapiens; identical to SEQ ID NO: 3965

SEQ ID NO: 28767 - DNA, 941 bp, Homo sapiens
agggagggctcggccttggctccacactgcgctgcccagaggccccgctgactcctgccagcctccaggtccccgtggtaccaaagctgaacatggacgtgaccatccagcacccctggttcaagcgcaccctggggcccttctaccccagccggctgttcgaccagtttttcggcgagggcctttttgagtatgacctgctgcccttcctgtcgtccaccatcagcccctactaccgccagtccctcttccgcaccgtgctggactccggcatctctgaggttcgatccgaccgggacaagttcgtcatcttcctcgatgtgaagcacttctccccggaggacctcaccgtgaaggtgcaggacgactttgtggagatccacggaaagcacaacgagcgccaggacgaccacggctacatttcccgtgagttccaccgccgctaccgcctgccgtccaacgtggaccagtcggccctctcttgctccctgtcttcctttgcttcccttttttcctttccaccttctcacatggaatgagggtttgagagagcagccaggagagcttagggtctcagggtgtcccagaccccgacaccggccagtggcggaagtgaccgcacctcacactcctttagatagcagcctggctcccctggggtgcaggcgcctcaactctgctgagggtccagaaggagggggtgacctccggccaggtgcctcctgacacacctgcagcctccctccgcggcgggccctgcccacacctcctggggcgcgtgaggcccgtggggccggggcttctgtgcacctgggctctcgcggcctcttctctcagaccgtcttcctccaacccctctatgtagtgccgctcttggggacatgggtcgcccatgagagcgcagcccgcggcaatcaataaacagcaggtgatacaagcaa

SEQ ID NO: 28768 - protein, 148 aa, Homo sapiens
MDVTIQHPWFKRTLGPFYPSRLFDQFFGEGLFEYDLLPFLSSTISPYYRQSLFRTVLDSGISEVRSDRDKFVIFLDVKHFSPEDLTVKVQDDFVEIHGKHNERQDDHGYISREFHRRYRLPSNVDQSALSCSLSSFASLFSFPPSHME

SEQ ID NO: 28769 - DNA, 1144 bp, Homo sapiens
agggagggctcggccttggctccacactgcgctgcccagaggccccgctgactcctgccagcctccaggtccccgtggtaccaaagctgaacatggacgtgaccatccagcacccctggttcaagcgcaccctggggcccttctaccccagccggctgttcgaccagtttttcggcgagggcctttttgagtatgacctgctgcccttcctgtcgtccaccatcagcccctactaccgccagtccctcttccgcaccgtgctggactccggcatctctgaggttcgatccgaccgggacaagttcgtcatcttcctcgatgtgaagcacttctccccggaggacctcaccgtgaaggtgcaggacgactttgtggagatccacggaaagcacaacgagcgccaggacgaccacggctacatttcccgtgagttccaccgccgctaccgcctgccgtccaacgtggaccagtcggccctctcttgctccctgtctgccgatggcatgctgaccttctgtggccccaagatccagactggcctggatgccacccacgccgagcgagccatccccgtgtcgcgggaggagaagcccacctcggctccctcgtcctaagcaggcattgcctcggctggctcccctgcagccctggcccatcatggggggagcaccctgagggcggggtgtctgtcttcctttgcttcccttttttcctttccaccttctcacatggaatgagggtttgagagagcagccaggagagcttagggtctcagggtgtcccagaccccgacaccggccagtggcggaagtgaccgcacctcacactcctttagatagcagcctggctcccctggggtgcaggcgcctcaactctgctgagggtccagaaggagggggtgacctccggccaggtgcctcctgacacacctgcagcctccctccgcggcgggccctgcccacacctcctggggcgcgtgaggcccgtggggccggggcttctgtgcacctgggctctcgcggcctcttctctcagaccgtcttcctccaacccctctatgtagtgccgctcttggggacatgggtcgcccatgagagcgcagcccgcggcaatcaataaacagcaggtgatacaagcaacccgc

SEQ ID NO: 28770 - protein, 173 aa, Homo sapiens; identical to SEQ ID NO: 3965

SEQ ID NO: 28771 - DNA, 1213 bp, Homo sapiens
catggacgtgaccatccagcacccctggttcaagcgcaccctggggcccttctaccccagccggctgttcgaccagtttttcggcgagggcctttttgagtatgacctgctgcccttcctgtcgtccaccatcagcccctactaccgccagtccctcttccgcaccgtgctggactccggcatctctgaggtaagacgtggcccgtggtgctggcctctcctcgctgctcagagggtggtggcctcggtgggtggagagcgatggactctggtcttgctccgtcaggcaggtggcctcgtcccacttcatccccttgcagaggctgggcgagagcctgtgtccccactgcagccacgtggcagagcttcccctggcactggggagagggtggacaagggagcagcctgaatccacctttgctttcctccatcagctcatgacccatgtgtgctttgtaaggcaccagccacatactggaaaccccaagagcagcccatccaggcatgcgtggtggcgaatgccagctcccgggttcctctggtctcctgagtcccggagacctgggagcaggtgggggtcatagtcctgaaagccagagagcagggcgttcctagcacctcctccaatgagctcggcctgcccacggctagcaaagctcttggcaagtttacttaggtgccctgccaaggctaaaaggacaggcaatggacgcccccccccccacccaaccacaggcctcctctctgagccacgggttcgatccgaccgggacaagttcgtcatcttcctcgatgtgaagcacttctccccggaggacctcaccgtgaaggtgcaggacgactttgtggagatccacggaaagcacaacgagcgccaggacgaccacggctacatttcccgtgagttccaccgccgctaccgcctgccgtccaacgtggaccagtcggccctctcttgctccctgtctgccgatggcatgctgaccttctgtggccccaagatccagactggcctggatgccacccacgccgagcgagccatccccgtgtcgcgggaggagaagcccacctcggctccctcgtcctaagcaggcattgcctcggctggctcccctgcagccctggcccatcatggggggagcaccctgagggcggggtgtctgtcttcctttgcttcccttttttcctttccaccttctcacatggaatgagg

SEQ ID NO: 28772 - protein, 153 aa, Homo sapiens
MSSACPRLAKLLASLLRCPAKAKRTGNGRPPPHPTTGLLSEPRVRSDRDKFVIFLDVKHFSPEDLTVKVQDDFVEIHGKHNERQDDHGYISREFHRRYRLPSNVDQSALSCSLSADGMLTFCGPKIQTGLDATHAERAIPVSREEKPTSAPSS

SEQ ID NO: 28773 - DNA, 1618 bp, Homo sapiens
catggacgtgaccatccagcacccctggttcaagcgcaccctggggcccttctaccccagccggctgttcgaccagtttttcggcgagggcctttttgagtatgacctgctgcccttcctgtcgtccaccatcagcccctactaccgccagtccctcttccgcaccgtgctggactccggcatctctgaggtaagacgtggcccgtggtgctggcctctcctcgctgctcagagggtggtggcctcggtgggtggagagcgatggactctggtcttgctccgtcaggcaggtggcctcgtcccacttcatccccttgcagaggctgggcgagagcctgtgtccccactgcagccacgtggcagagcttcccctggcactggggagagggtggacaagggagcagcctgaatccacctttgctttcctccatcagctcatgacccatgtgtgctttgtaaggcaccagccacatactggaaaccccaagagcagcccatccaggcatgcgtggtggcgaatgccagctcccgggttcctctggtctcctgagtcccggagacctgggagcaggtgggggtcatagtcctgaaagccagagagcagggcgttcctagcacctcctccaatgagctcggcctgcccacggctagcaaagctcttggcaagtttacttaggtgccctgccaaggctaaaaggacaggcaatggacgcccccccccccacccaaccacaggcctcctctctgagccacgggttcgatccgaccgggacaagttcgtcatcttcctcgatgtgaagcacttctccccggaggacctcaccgtgaaggtgcaggacgactttgtggagatccacggaaagcacaacgagcgccaggacgaccacggctacatttcccgtgagttccaccgccgctaccgcctgccgtccaacgtggaccagtcggccctctcttgctccctgtctgccgatggcatgctgaccttctgtggccccaagatccagactggcctggatgccacccacgccgagcgagccatccccgtgtcgcgggaggagaagcccacctcggctccctcgtcctaagcaggcattgcctcggctggctcccctgcagccctggcccatcatggggggagcaccctgagggcggggtgtctgtcttcctttgcttcccttttttcctttccaccttctcacatggaatgagggtttgagagagcagccaggagagcttagggtctcagggtgtcccagaccccgacaccggccagtggcggaagtgaccgcacctcacactcctttagatagcagcctggctcccctggggtgcaggcgcctcaactctgctgagggtccagaaggagggggtgacctccggccaggtgcctcctgacacacctgcagcctccctccgcggcgggccctgcccacacctcctggggcgcgtgaggcccgtggggccggggcttctgtgcacctgggctctcgcggcctcttctctcagaccgtcttcctccaacccctctatgtagtgccgctcttggggacatgggtcgcccatgagagcgcagcccgcggcaatcaataaacagcaggtgatacaagcaacccgc

SEQ ID NO: 28774 - protein, 153 aa, Homo sapiens; identical to SEQ ID NO: 28772

SEQ ID NO: 28775 - DNA, 712 bp, Homo sapiens
ctaacggaccaaccaacccgtaacgacccctcctaccataaccagtagccagccagcccataaccagccaacttatctataaccagccacctgaccatagccaaacaaccagccggcccaccagtagcattcagcccctcagctggccctgagggtttggagacaggtcgagggtcatgcctgtctgtccaggagacagtcacaggcccccgaaagctctgccccacttggtgtgtgggagaagaggccggcaggttcgatccgaccgggacaagttcgtcatcttcctcgatgtgaagcacttctccccggaggacctcaccgtgaaggtgcaggacgactttgtggagatccacggaaagcacaacgagcgccaggacgaccacggctacatttcccgtgagttccaccgccgctaccgcctgccgtccaacgtggaccagtcggccctctcttgctccctgtctgccgatggcatgctgaccttctgtggccccaagatccagactggcctggatgccacccacgccgagcgagccatccccgtgtcgcgggaggagaagcccacctcggctccctcgtcctaagcaggcattgcctcggctggctcccctgcagccctggcccatcatggggggagcaccctgagggcggggtgtctgtcttcctttgcttcccttttttcctttccaccttctcacatggaatgagg

SEQ ID NO: 28776 - protein, 136 aa, Homo sapiens
MPVCPGDSHRPPKALPHLVCGRRGRQVRSDRDKFVIFLDVKHFSPEDLTVKVQDDFVEIHGKHNERQDDHGYISREFHRRYRLPSNVDQSALSCSLSADGMLTFCGPKIQTGLDATHAERAIPVSREEKPTSAPSS

SEQ ID NO: 28777 - DNA, 1117 bp, Homo sapiens
ctaacggaccaaccaacccgtaacgacccctcctaccataaccagtagccagccagcccataaccagccaacttatctataaccagccacctgaccatagccaaacaaccagccggcccaccagtagcattcagcccctcagctggccctgagggtttggagacaggtcgagggtcatgcctgtctgtccaggagacagtcacaggcccccgaaagctctgccccacttggtgtgtgggagaagaggccggcaggttcgatccgaccgggacaagttcgtcatcttcctcgatgtgaagcacttctccccggaggacctcaccgtgaaggtgcaggacgactttgtggagatccacggaaagcacaacgagcgccaggacgaccacggctacatttcccgtgagttccaccgccgctaccgcctgccgtccaacgtggaccagtcggccctctcttgctccctgtctgccgatggcatgctgaccttctgtggccccaagatccagactggcctggatgccacccacgccgagcgagccatccccgtgtcgcgggaggagaagcccacctcggctccctcgtcctaagcaggcattgcctcggctggctcccctgcagccctggcccatcatggggggagcaccctgagggcggggtgtctgtcttcctttgcttcccttttttcctttccaccttctcacatggaatgagggtttgagagagcagccaggagagcttagggtctcagggtgtcccagaccccgacaccggccagtggcggaagtgaccgcacctcacactcctttagatagcagcctggctcccctggggtgcaggcgcctcaactctgctgagggtccagaaggagggggtgacctccggccaggtgcctcctgacacacctgcagcctccctccgcggcgggccctgcccacacctcctggggcgcgtgaggcccgtggggccggggcttctgtgcacctgggctctcgcggcctcttctctcagaccgtcttcctccaacccctctatgtagtgccgctcttggggacatgggtcgcccatgagagcgcagcccgcggcaatcaataaacagcaggtgatacaagcaacccgc

SEQ ID NO: 28778 - protein, 136 aa, Homo sapiens; identical to SEQ ID NO: 28776

SEQ ID NO: 28779 - DNA, 748 bp, Homo sapiens
cttatctataaccagccacctgaccatagccaaacaaccagccggcccaccagtagcattcagcccctcagctggccctgagggtttggagacaggtcgagggtcatgcctgtctgtccaggagacagtcacaggcccccgaaagctctgccccacttggtgtgtgggagaagaggccggcaggtgaccgaagcatctctgttctgataaccgggacccgccctgtctctgccaaccccagcagggacggcaccctctgggcagctccacatggcacgtttggatttcaggttcgatccgaccgggacaagttcgtcatcttcctcgatgtgaagcacttctccccggaggacctcaccgtgaaggtgcaggacgactttgtggagatccacggaaagcacaacgagcgccaggacgaccacggctacatttcccgtgagttccaccgccgctaccgcctgccgtccaacgtggaccagtcggccctctcttgctccctgtctgccgatggcatgctgaccttctgtggccccaagatccagactggcctggatgccacccacgccgagcgagccatccccgtgtcgcgggaggagaagcccacctcggctccctcgtcctaagcaggcattgcctcggctggctcccctgcagccctggcccatcatggggggagcaccctgagggcggggtgtctgtcttcctttgcttcccttttttcctttccaccttctcacatggaatgagg

SEQ ID NO: 28780 - protein, 43 aa, Homo sapiens
MPPTPSEPSPCRGRRSPPRLPRPKQALPRLAPLQPWPIMGGAP

SEQ ID NO: 28781 - DNA, 1153 bp, Homo sapiens
cttatctataaccagccacctgaccatagccaaacaaccagccggcccaccagtagcattcagcccctcagctggccctgagggtttggagacaggtcgagggtcatgcctgtctgtccaggagacagtcacaggcccccgaaagctctgccccacttggtgtgtgggagaagaggccggcaggtgaccgaagcatctctgttctgataaccgggacccgccctgtctctgccaaccccagcagggacggcaccctctgggcagctccacatggcacgtttggatttcaggttcgatccgaccgggacaagttcgtcatcttcctcgatgtgaagcacttctccccggaggacctcaccgtgaaggtgcaggacgactttgtggagatccacggaaagcacaacgagcgccaggacgaccacggctacatttcccgtgagttccaccgccgctaccgcctgccgtccaacgtggaccagtcggccctctcttgctccctgtctgccgatggcatgctgaccttctgtggccccaagatccagactggcctggatgccacccacgccgagcgagccatccccgtgtcgcgggaggagaagcccacctcggctccctcgtcctaagcaggcattgcctcggctggctcccctgcagccctggcccatcatggggggagcaccctgagggcggggtgtctgtcttcctttgcttcccttttttcctttccaccttctcacatggaatgagggtttgagagagcagccaggagagcttagggtctcagggtgtcccagaccccgacaccggccagtggcggaagtgaccgcacctcacactcctttagatagcagcctggctcccctggggtgcaggcgcctcaactctgctgagggtccagaaggagggggtgacctccggccaggtgcctcctgacacacctgcagcctccctccgcggcgggccctgcccacacctcctggggcgcgtgaggcccgtggggccggggcttctgtgcacctgggctctcgcggcctcttctctcagaccgtcttcctccaacccctctatgtagtgccgctcttggggacatgggtcgcccatgagagcgcagcccgcggcaatcaataaacagcaggtgatacaagcaacccgc

SEQ ID NO: 28782 - protein, 43 aa, Homo sapiens; identical to SEQ ID NO: 28780

SEQ ID NO: 28783 - DNA, 434 bp, Homo sapiens
ccaggacgaccacggctacatttcccgtgagttccaccgccgctaccgcctgccgtccaacgtggaccagtcggccctctcttgctccctgtctgccgatggcatgctgaccttctgtggccccaagatccagactggcctggatgccacccacgccgagcgagccatccccgtgtcgcgggaggagaagcccacctcggctccctcgtcctaagcaggcattgcctcggctggctcccctgcagccctggcccatcatggggggagcaccctgagggcggggtgtctgtcttcctttgcttcccttttttcctttccacctcttctctcagaccgtcttcctccaacccctctatgtagtgccgctcttggggacatgggtcgcccatgagagcgcagcccgcggcaatcaataaacagcaggtgatacaagc

SEQ ID NO: 28784 - protein, 43 aa, Homo sapiens; identical to SEQ ID NO: 28780

SEQ ID NO: 28785 - DNA, 905 bp, Homo sapiens
tgaccctccaagttgggagtttcgaggaccccctgaacttagagctcctgggccgtctttccctgagaatgaagccaacacaggcaggattgagcctagagtctgaattagatggtgcctagtgaccgcctctgaactcctggacccagctacacctgaagccactctaccccacattttctaggactttcctgtatgactgcatggctaatagcacttctcctcgacaccggtgctgttctcggaatcctatctagagcttacagctttcccagcctcctggctgcctccccatttcctcccacactggtgatcccccgatgaaatcctcctgcccttcatcctgtcttggcgtctgcctcgcgatgaccctgggctcacagtctggccactgcagctgagtgtcgcactggctcaggtgtggcaacacgggggttgaaaggctctgaaccaggcaccaggagccctgcgccccaggccagccctccgcaaaccagctttgtgtcctcggacaactccaggcccatcctgggtcttgctgtctggagagaggaggaagccggccacactctccaagaacattcagcctccgcactgcatggcctctgcttggtttctggctgggcccagggctctgcttgcagtgtggagccgcagtggtgggtccccatgcgagcccccgccactgtctgctgtcatcaccggcccagatgcccttgccacacagcaccatttccaactgcgaaggcctccgtgtggcgcctgtcgggacaacacggccggcacaggctgggctgggggagaaagggtgctgggcagctctgtgccctgcgactttgtgggtctgctgggctgtccttgtcttgaaaacattgtatttttgactcctataaagtagtggagat

SEQ ID NO: 28786 - protein, 42 aa, Homo sapiens
MTAWLIALLLDTGAVLGILSRAYSFPSLLAASPFPPTLVIPR

SEQ ID NO: 28787 - DNA, 2888 bp, Homo sapiens
gggtcgtgagaaaatacgcaggaagagataccccgtggacatgtttcccttggaaagtggagggaaccctctgagccgtgattccgcctgaattaagcagtggcgggcactggcctggcaggcggcttctactgccttggatttgcacctctaaggggtcacaggggccacccccgaaacaagacaaagtgtgatcatggacaggccctcggggggccggaagaaggaacggctccagtgatgaaagctgaacgccagctctctccccatcgttctcccggaccaggagagggctgctcggcagggctaggtttaaaaaccttccatgcaacttacgaaggcatccacagtgacttctgctgctgtggtacgttctgccctcccctcctccccgccccatcctgttctcggctacaagttatttatatgtacagtgtcatctgaacgtgcacgggcctatcccaggacatcacacacaaagaggcggcggtgaacccaagccgccgggccggcctgtggctcagtgtgtgtttcagaagtcccggccccaggcagctctcctgaacagagccactggaactcaggagggtcaggaccacagcccaaacaactgcgaccgaaaacaccctacagggcttgagaactaaaaaataaggagggatctgggcagccgagctgcctcctaaagaagccacgtcatagagaaaactgcttgctctatccatgagacggaggcggccggggtgtcctgccagcagacacgggtctgtccatcaccggccaccacgctgcctctgtccttcactcccatttaagggaaaacgatatctcttcatctttctgccctggacattggaaatcagcggtgagaacagtgctcttgctacaaaatgctcaggttctagaatgctcccatctttccttccattccacatggagtttatccaaagcacaaaggccagtcacggcactgacatccgtggtgcccgctcaccggggagtgggaagcacaagcctgtcctcagaggaccgtgactgtgagcccgcagctgcttgtgggtggggccagcccgcagctcctcctggaggcctcgggcttcttgctgctgcatttctgtgacatgtggagggaggatcgttttgacacctgcctgggaagtttcaaaggagatggcctctgggcaggggttttaaactgaagggcaccacacagatccagatgtgaactgtggctgttgtttgcaattgaagcagagatgcagaggatggaacaggagtgctggccatgctgctctatggccttggcccagccaagacctgcagtcaatggggctacgggacccccgctacacagggacctgggaaccacctttgccgcggttgaccgctgggcccgccatgcaccgcccacacctggctgtgcctggagactgagagcagggggtgacggtgggcctggaagagtctctcccttttgcaaacgccagccacagaggtttatttttctccctgagagaaggaagagtgaaggctgagactgagacagaaggacagaaggagaagacttagaagccagtgagcccggaaccacgagacgcgctctgaggacacggggcctcggggaaaccgggcacgggcaggggttggtcttggcttccccgcaacattgccgcgagctcgggtgccgtctccactcgcaggctggcctgtcctctgcagccacgagctcaggcaccgtctccgttcataggccagcctgttctctgcagcctgaggtccctgtggtgccaacatccagatgctgagataattctgccagggtgttggctgatcggtgattggtggttggctgttccgtgagttctgcattgatcttgctggctgagcgtccaatgcggaggggcaggtgctgttagggtctccactcccatccctctccccaggactcatcacccactgcaaccgtaagctgctaggggctcacagccgtgagtctttgggacgggtggtcccacctggcatgtagctcaggctcctagccccaggaccctgccgctgctcccctcccgcccacatcttggcttagccgtcttccctggctgccagccccttcccctggtcttagttggcttgagccactaaactgaaatagcacaccctgaggccttcaacagcagacctgatttctcaccatctggaggctggaggtccaggatccaggcccccaaggctgctttctcccccactcccccacccaccttccaggacacgcagactccaccctcttgctgccctgtctcagggctgtccctctgggcaagcaggcccctggcatccccgtgtgtcttctcctcctgttcttataaggacaccagtcatactggatctgggcccaccctagtgacctcatttaccttaatcacctctgaaagaccttgtctcaaaaacagccacattctggggcactgagggttagggctttaacatgggaatttgagggatgcaattcaccccataaaacccagaccattcccccagtaaatcactttcacaagagctcttctctcaggctttgcttctgggggatcccccttgagatggatccatctagcttcctgcttctcaaagaacagaggggagagctctggtgcgaagggaacgggtggcctcggggacctgcggataagctgctggcactgccaggggacaggctgagctgaaagccaggaggagggcggcgaggcccggggccggacctcattcttctgagtgttataaaatctggctttgctcagaaactgccccatgtgtgcttttgttaattgaagtgcaaaattttctccaagtaataactggagtcgtttaacaatacaaataatttgcacctt

SEQ ID NO: 28788 - protein, 92 aa, Homo sapiens
MQRMEQECWPCCSMALAQPRPAVNGATGPPLHRDLGTTFAAVDRWARHAPPTPGCAWRLRAGGDGGPGRVSPFCKRQPQRFIFLPERRKSEG

SEQ ID NO: 28789 - DNA, 2816 bp, Homo sapiens
atttccagtggatgcaatagtgccgaccatgtgcacatggggtcaggatctcaggcccgccagctggactacagcaagtacccatggtctcagggaaaaggtcccctgctgcaggctgtgggggacctcggctctcacagtggctatgcctgagaaagcccctccagactcgccaacctggcccgcgcgtcctgtccggagggcagggtggggctggtgctggttacagatgatcctcaagggcacagcacgcaagccaccaggcgcccctcctgcagctgggtcagagagaggcactgggagcctggctccctccaggtcagtctccaccagggccaccccggtgacctgcaggagaggaaggcagacgaggagtggccctgccccttagggcgcatcgtgcaggtggcacaagggggtcatctgcatcctggtcaagggggagcccacctgcctcctccaggtcgggaacactccctggaggccatggtgtggagcgtccacccgggcttcgtcctccagctcagctgctgggccctgggaagggacaggcccagcacccgttcagccgggctgagccgcaggcagagcgccttgcctgggagagacaaacccaccgctgaggacacaccctcaaggttcacccttccccacttctgtgttgcccttagctctaaggtgctaattccatctctagtttcaacaggctgattgctcttaagggaaaatggggttgcacaatccggctgtggtggccggggctcttggtctccccccagtaagaggatggactttccagccctgctgatggtcagcggggaccacgtggaggctttggcagatgaaatggggcacatgacatagccctgccccagtggaagcctcagagccatggctgggctccaccaggcttgctccagcggccatgaggaccatgccccacaggcaggggctgcacctccaccctggttccagaaggaagaggcacagccgacatgccgctcgagcaggaaaccctggggaaggtgggacatgagatcctgtgtctgatactacagtgtaaccggctagaaactgactcaaaggggcatttttacagcagaaagaggcgaagcacacgtgcatctgccatcctgtgattgtcaggccccgtttaggagtggacagctccatggttgtgtttgagccccacaccggccctggggggttatactgccctggaggacagctgacctcagttctccaagcttccattcccccttgtatgggcacagcaccccaaccttcttttggcagctcccacgccccccagtgctggtgggctctagggctctggtccctgatgctcagaggcacagagacagcattcctcaggggccctgatcctctggcccggttcagactgtggtggggcctcgggacctttccagaaccttggaagtgggtagcaccctttgctgggacagacatgcctggagctccgggcattgggccactgctgggataagcccacgacagaatgaagccgggcaggcagaaagagctgcgggctccctggccactcctgtttccgtaaagggcctggtgtctcatttcctacttaccttggactttaagggcctcctgcagcctttgtcacacactcttcttatttttttgtccattacaaccttttacggcggcacaagccattgttctcagggccaacgcgtgagtcctgtggtgagtttcctattagtgtggctcgagaaggtaccccgtgctgacgaagcctggagaggcagggccacactgcagagcctcaggccaagggtggcggtgctggggtctcatgagcccagggttcactgcccaccaggcggcattagcctgcggctttggcgcccagaagtcccgacaggcagcaaagtctcctgctcctggctgctggccaggagagcccagctgggcctcacctgatcgagaggaaacgcctgtgtcctctaatcagcatctcactgacagagtcacccctggtacagcaagtgggctttcaaggacatcaggtggctgcattcaggctggtaacaacaccgccctcagctctcacagtctgaggaagccccctgaaaagtcactggagtggggctgcaggaaccccacaaaggcctttcctgctcctgaataattcccaagcacctaggacttcccgggcctggcttctccgccagtccaacctccggacctgaagaccaagcagtgcccaagtgtgaggtccctggagaaggaggaggaagagtggaaggaggtggagggtaatgcatccagaggaagacgctgagggtcaggctggccctgggtctgacctgtccttgggatcaactgcttcattaaaaaacatccgcctaaactgtggagacagaggaaggatcagtgcttgccaagggctgggggaggaggaacaggcagagcgcagagggtttcagggcagtgccgctctgcgtgacgccatcacggagggtccaggtcatcacacgtctctccaaacccctagaatgcccaacactcactctgaagccttctgtcaatgtgggatcatctgtcgtaaagtctgcaccgctgtggtgggggcgtggatagtgggggaggctgtgcgtgtgtgggggcagggagtgtatgggaaatctctgtaccttccgctcaatttggctgcgaacctaaactgctctaaaaaaagtctatttttaaaaagcatatgcccgaaaagtccttgaaaatgcatctttccctaaatattcaaatttatgttcattaataaaatagcacatatttattct

SEQ ID NO: 28790 - protein, 151 aa, Homo sapiens
MHPEEDAEGQAGPGSDLSLGSTASLKNIRLNCGDRGRISACQGLGEEEQAERRGFQGSAALRDAITEGPGHHTSLQTPRMPNTHSEAFCQCGIICRKVCTAVVGAWIVGEAVRVWGQGVYGKSLYLPLNLAANLNCSKKSLFLKSICPKSP

SEQ ID NO: 28791 - DNA, 4742 bp, Homo sapiens
atgcggcgcggccccggaggcagcagcagcggcggcggcagccggagcagtaggcacccgagcagcgccagcggccgagcgggcggcttcctggcctgggcgctccggtggcggcggaggtgcgcgcggagccatggttatcatgtcggagttcagcgcggaccccgcgggccagggtcagggccagcagaagcccctccgggtgggtttttacgacatcgagcggaccctgggcaaaggcaacttcgcggtggtgaagctggcgcggcatcgagtcaccaaaacgcaggttgcaataaaaataattgataaaacacgattagattcaagcaatttggagaaaatctatcgtgaggttcagctgatgaagcttctgaaccatccacacatcataaagctttaccaggttatggaaacaaaggacatgctttacatcgtcactgaatttgctaaaaatggagaaatgtttgattatttgacttccaacgggcacctgagtgagaacgaggcgcggaagaagttctggcaaatcctgtcggccgtggagtactgtcacgaccatcacatcgtccaccgggacctcaagaccgagaacctcctgctggatggcaacatggacatcaagctggcagattttggatttgggaatttctacaagtcaggagagcctctgtccacgtggtgtgggagccccccgtatgccgccccggaagtctttgaggggaaggagtatgaaggcccccagctggacatctggagcctgggcgtggtgctgtacgtcctggtctgcggttctctccccttcgatgggcctaacctgccgacgctgagacagcgggtgctggagggccgcttccgcatccccttcttcatgtctcaagactgtgagagcctgatccgccgcatgctggtggtggaccccgccaggcgcatcaccatcgcccagatccggcagcaccggtggatgcgggctgagccctgcttgccgggacccgcctgccccgccttctccgcacacagctacacctccaacctgggcgactacgatgagcaggcgctgggtatcatgcagaccctgggcgtggaccggcagaggacggtggagtcactgcaaaacagcagctataaccactttgctgccatttattacctcctccttgagcggctcaaggagtatcggaatgcccagtgcgcccgccccgggcctgccaggcagccgcggcctcggagctcggacctcagtggtttggaggtgcctcaggaaggtctttccaccgaccctttccgacctgccttgctgtgcccgcagccgcagaccttggtgcagtccgtcctccaggccgagatggactgtgagctccagagctcgctgcagtggcccttgttcttcccggtggatgccagctgcagcggagtgttccggccccggcccgtgtccccaagcagcctgctggacacagccatcagtgaggaggccaggcaggggccgggcctagaggaggagcaggacacgcaggagtccctgcccagcagcacgggccggaggcacaccctggccgaggtctccacccgcctctccccactcaccgcgccatgtatagtcgtctccccctccaccacggcaagtcctgcagagggaaccagctctgacagttgtctgaccttctctgcgagcaaaagccccgcggggctcagtggcaccccggccactcaggggctgctgggcgcctgctccccggtcaggctggcctcgcccttcctggggtcgcagtccgccaccccagtgctgcaggctcaggggggcttgggaggagctgttctgctccctgtcagcttccaggagggacggcgggcgtcggacacctcactgactcaagggctgaaggcctttcggcagcagctgaggaagaccacgcggaccaaagggtttctgggactgaacaaaatcaaggggctggctcgccaggtgtgccaggcccccgccagccgggccagcaggggcggcctgagccccttccacgcccctgcacagagcccaggcctgcacggcggcgcagccggcagccgggagggctggagcctgctggaggaggtgctagagcagcagaggctgctccagttacagcaccacccggccgctgcacccggctgctcccaggccccccagccggcccctgccccgtttgtgatcgccccctgtgatggccctggggctgccccgctccccagcaccctcctcacgtcggggctcccgctgctgccgcccccactcctgcagaccggcgcgtccccggtggcctcagcggcgcagctcctggacacacacctgcacattggcaccggccccaccgccctccccgctgtgcccccaccacgcctggccaggctggccccaggttgtgagcccctggggctgctgcagggggactgtgagatggaggacctgatgccctgctccctaggcacgtttgtcctggtgcagtgagggcagccctgcatcctggcacggacactgactcttacagcaataacttcagaggaggtgaagacatctggcctcaaagccaagaactttctagaagcgaaataagcaatacgttaggtgttttggctttttagtttatttttgttttatttttttcttgcactgagtgacctcaactttgagtagggactggaaactttaggaagaaagataattgaggggcgtgtctgggggcgggggcaggaggggagcggggtggagggaacacgtgcagtgccgtggtgtggggatctcggcccctctctctgggttcgtcgtggttgagatgattacctcggacgtctacggaaacgagcgggcgcattgttgtccgcttgtgtgtgtgtgtgtgtgtgtgtgtgtgcgcgtgcattgattactatccatttctttagtcaacgctctccacttcctgatttctgctttaaggaaaactgtgaactttctgcttcatgtatcagttttaaagcagcccaggcaaagatcatctacagattctaggaattctctcccctgaaatcaaaacctggaagacttttttttcttattttagttgagaagtttcataaactgctcaaggattagttttccaggactctgcggaggaacggcaggaagaacctcagagagggcagaggtgacttcaaagtgctggggactccgtcctgagggtcacttggccctgagcccctgcgtgcccttgcggaagcccagaagcttcttcctgctgcacctcccgtttccgctgctgctgacgtttatgcatttcatgatggggtccaacaagaacacctgacttgggtgaagttgtgcaatattggaggctgactgtagggctgggcagctgggagacaggctcatggctcatggctcatggctcagggcggtgcctgccctgggccgggacccccctccccaccccccacctaggctttttgggttttgttcaaggaaggtaaagtgagaggtttaggtcagtgtttttaagtttttgttttttttttaaagcaaatcctgtatatgtatctacatgggagacaggtagacactacttatttgttacattttgtactatacgtttgtgttccaggtttcagcttccctcgctcctgttgttaagaagcgtccctgtcagcacaggtgtgcattgaggaaggggccccagggccttcgctccctcagcactggggtggaggcggcaggaaggggcggcccttacctggcaggtctgggcgcacctttagcaggtggactccgtggggctccaccagccagaagcctctggaaggcaacgaaggcaatgctgctccctgagtccagtccccgcccccaaacccagcccaggtgccttcagctacttcggcttcttaaaccctgcagtgttaaacagaggcattgagaaaggggaaaggcgggtatttttaaaagccaaagattgacccagttacttgagggtagggaggcgggcccagtgcaggaggctgcatccctggcctgctggtgcccaccgggggctgtgcctgtgccgggccgcagggaagctggctgcccccattcctgctgctgctgctgctgctgctctgtggctgtttcaaagactgggcgaaaggctgtccggagggcagaccaggtgccttgccgcagagaaaacaccaaagtctcctgttcgctcataaagaagtttttgggatgggagagaatccagaccatcttggggcagccaggcccttgccttcatttttacagaggtagcacaactgattccaacacaaaaccccttcccctttttaaaatgatttctgttctaatgccatagatcaaaggcctcagaaaccattgtgtgtttcctctttgaagcaatgacaagcactttactttcacggtggtttttgttttttcttattgctgtggaacctcttttggaggacgttaaaggcgtgttttacttgtttttttaagagtgtgtgatgtgtgttttgtagatttcttgacagtgctgtaatacagacggcaatgcaatagcctatttaaagacactacgtgatctgattgagatgtacatagtttttttttttaccataactgaattattttatctcttatgttaacatgagaaatgtatgccaaatgattagttgatgtatgttttttaatttaatatttaaataaaatatttggaaggaaaaaaccttgactttttcccttcctctctctctca

SEQ ID NO: 28792 - protein, 783 aa, Homo sapiens
MVIMSEFSADPAGQGQGQQKPLRVGFYDIERTLGKGNFAVVKLARHRVTKTQVAIKIIDKTRLDSSNLEKIYREVQLMKLLNHPHIIKLYQVMETKDMLYIVTEFAKNGEMFDYLTSNGHLSENEARKKFWQILSAVEYCHDHHIVHRDLKTENLLLDGNMDIKLADFGFGNFYKSGEPLSTWCGSPPYAAPEVFEGKEYEGPQLDIWSLGVVLYVLVCGSLPFDGPNLPTLRQRVLEGRFRIPFFMSQDCESLIRRMLVVDPARRITIAQIRQHRWMRAEPCLPGPACPAFSAHSYTSNLGDYDEQALGIMQTLGVDRQRTVESLQNSSYNHFAAIYYLLLERLKEYRNAQCARPGPARQPRPRSSDLSGLEVPQEGLSTDPFRPALLCPQPQTLVQSVLQAEMDCELQSSLQWPLFFPVDASCSGVFRPRPVSPSSLLDTAISEEARQGPGLEEEQDTQESLPSSTGRRHTLAEVSTRLSPLTAPCIVVSPSTTASPAEGTSSDSCLTFSASKSPAGLSGTPATQGLLGACSPVRLASPFLGSQSATPVLQAQGGLGGAVLLPVSFQEGRRASDTSLTQGLKAFRQQLRKTTRTKGFLGLNKIKGLARQVCQAPASRASRGGLSPFHAPAQSPGLHGGAAGSREGWSLLEEVLEQQRLLQLQHHPAAAPGCSQAPQPAPAPFVIAPCDGPGAAPLPSTLLTSGLPLLPPPLLQTGASPVASAAQLLDTHLHIGTGPTALPAVPPPRLARLAPGCEPLGLLQGDCEMEDLMPCSLGTFVLVQ

SEQ ID NO: 28793 - DNA, 4706 bp, Homo sapiens
atgcggcgcggccccggaggcagcagcagcggcggcggcagccggagcagtaggcacccgagcagcgccagcggccgagcgggcggcttcctggcctgggcgctccggtggcggcggaggtgcgcgcggagccatggttatcatgtcggagttcagcgcggaccccgcgggccagggtcagggccagcagaagcccctccgggtgggtttttacgacatcgagcggaccctgggcaaaggcaacttcgcggtggtgaagctggcgcggcatcgagtcaccaaaacgcaggttgcaataaaaataattgataaaacacgattagattcaagcaatttggagaaaatctatcgtgaggttcagctgatgaagcttctgaaccatccacacatcataaagctttaccaggttatggaaacaaaggacatgctttacatcgtcactgaatttgctaaaaatggagaaatgtttgattatttgacttccaacgggcacctgagtgagaacgaggcgcggaagaagttctggcaaatcctgtcggccgtggagtactgtcacgaccatcacatcgtccaccgggacctcaagaccgagaacctcctgctggatggcaacatggacatcaagctggcagattttggatttgggaatttctacaagtcaggagagcctctgtccacgtggtgtgggagccccccgtatgccgccccggaagtctttgaggggaaggagtatgaaggcccccagctggacatctggagcctgggcgtggtgctgtacgtcctggtctgcggttctctccccttcgatgggcctaacctgccgacgctgagacagcgggtgctggagggccgcttccgcatccccttcttcatgtctcaagactgtgagagcctgatccgccgcatgctggtggtggaccccgccaggcgcatcaccatcgcccagatccggcagcaccggtggatgcgggctgagccctgcttgccgggacccgcctgccccgccttctccgcacacagctacacctccaacctgggcgactacgatgagcaggcgctgggtatcatgcagaccctgggcgtggaccggcagaggacggtggagtcactgcaaaacagcagctataaccactttgctgccatttattacctcctccttgagcggctcaaggagtatcggaatgcccagtgcgcccgccccgggcctgccaggcagccgcggcctcggagctcggacctcagtggtttggaggtgcctcaggaaggtctttccaccgaccctttccgacctgccttgctgtgcccgcagccgcagaccttggtgcagtccgtcctccaggccgagatggactgtgagctccagagctcgctgcagtggcccttgttcttcccggtggatgccagctgcagcggagtgttccggccccggcccgtgtccccaagcagcctgctggacacagccatcagtgaggaggccaggcaggggccgggcctagaggaggagcaggacacgcaggagtccctgcccagcagcacgggccggaggcacaccctggccgaggtctccacccgcctctccccactcaccgcgccatgtatagtcgtctccccctccaccacggcaagtcctgcagagggaaccagctctgacagttgtctgaccttctctgcgagcaaaagccccgcggggctcagtggcaccccggccactcaggggctgctgggcgcctgctccccggtcaggctggcctcgcccttcctggggtcgcagtccgccaccccagtgctgcaggctcaggggggcttgggaggagctgttctgctccctgtcagcttccaggagggacggcgggcgtcggacacctcactgactcaagggctgaaggcctttcggcagcagctgaggaagaccacgcggaccaaagggtttctgggactgaacaaaatcaaggggctggctcgccaggtgtgccaggcccccgccagccgggccagcaggggcggcctgagccccttccacgcccctgcacagagcccaggcctgcacggcggcgcagccggcagccgggagggctggagcctgctggaggaggtgctagagcagcagaggctgctccagttacagcaccacccggccgctgcacccggctgctcccaggccccccagccggcccctgccccgtttgtgatcgccccctgtgatggccctggggctgccccgctccccagcaccctcctcacgtcggggctcccgctgctgccgcccccactcctgcagaccggcgcgtccccggtggcctcagcggcgcagctcctggacacacacctgcacattggcaccggccccaccgccctccccgctgtgcccccaccacgcctggccaggctggccccaggttgtgagcccctggggctgctgcagggggactgtgagatggaggacctgatgccctgctccctaggcacgtttgtcctggtgcagtgagggcagccctgcatcctggcacggacactgactcttacagcaataacttcagaggaggtgaagacatctggcctcaaagccaagaactttctagaagcgaaataagcaatacgttaggtgttttggctttttagtttatttttgttttatttttttcttgcactgagtgacctcaactttgagtagggactggaaactttaggaagaaagataattgaggggcgtgtctgggggcgggggcaggaggggagcggggtggagggaacacgtgcagtgccgtggtgtggggatctcggcccctctctctgggttcgtcgtggttgagatgattacctcggacgtctacggaaacgagcgggcgcattgttgtccgcttgtgtgtgtgtgtgtgtgtgtgtgtgtgcgcgtgcattgattactatccatttctttagtcaacgctctccacttcctgatttctgctttaaggaaaactgtgaactttctgcttcatgtatcagttttaaagcagcccaggcaaagatcatctacagattctaggaattctctcccctgaaatcaaaacctggaagacttttttttcttattttagttgagaagtttcataaactgctcaaggattagttttccaggactctgcggaggaacggcaggaagaacctcagagagggcagaggtgacttcaaagtgctggggactccgtcctgagggtcacttggccctgagcccctgcgtgcccttgcggaagcccagaagcttcttcctgctgcacctcccgtttccgctgctgctgacgtttatgcatttcatgatggggtccaacaagaacacctgacttgggtgaagttgtgcaatattggaggctgactgtagggctgggcagctgggagacaggctcatggctcatggctcatggctcagggcggtgcctgccctgggccgggacccccctccccaccccccacctaggctttttgggttttgttcaaggaaggtaaagtgagaggtttaggtcagtgtttttaagtttttgttttttttttaaagcaaatcctgtatatgtatctacatgggagacaggtagacactacttatttgttacattttgtactatacgtttgtgttccaggtttcagcttccctcgctcctgttgttaagaagcgtccctgtcagcacaggtgtgcattgaggaaggggccccagggccttcgctccctcagcactggggtggaggcggcaggaaggggcggcccttacctggcaggtctgggcgcacctttagcaggtggactccgtggggctccaccagccagaagcctctggaaggcaacgaaggcaatgctgctccctgagtccagtccccgcccccaaacccagcccaggtgccttcagctacttcggcttcttaaaccctgcagtgttaaacagaggcattgagaaaggggaaaggcgggtatttttaaaagccaaagattgacccagttacttgagggtagggaggcgggcccagtgcaggaggctgcatccctggcctgctggtgcccaccgggggctgtgcctgtgccgggccgcagggaagctggctgcccccattcctgctgctgctgctgctgctgctctgtggctgtttcaaagactgggcgaaaggctgtccggagggcagaccaggtgccttgccgcagagaaaacaccaaagtctcctgttcgctcataaagaagtttttgggatgggagagaatccagaccatcttggggcagccaggcccttgccttcatttttacagaggtagcacaactgattccaacacaaaaccccttcccctttttaaaatgatttctgttctaatgccatagatcaaaggcctcagaaaccattgtgtgtttcctctttgaagcaatgacaagcactttactttcacggtggtttttgttttttcttattgctgtggaacctcttttggaggacgttaaaggcgtgttttacttgtttttttaagagtgtgtgatgtgtgttttgtagatttcttgacagtgctgtaatacagacggcaatgcaatagcctatttaaagacactacgtgatctgattgagatgtacatagtttttttttttaccataactgaattattttatctcttatgttaacatgagaaatgtatgccaaatgattagttgatgtatgttttttaatttaatatttaaataaaatatttggaagg

SEQ ID NO: 28794 - protein, 783 aa, Homo sapiens; identical to SEQ ID NO: 28792

SEQ ID NO: 28795 - DNA, 617 bp, Homo sapiens
cactgaatttgctaaaaatggagaaatgtttggtaagccacactcgttttcagtatctgttgaaaaccaatggcacgaacgcgtctggatttgcgcggccagtgtctgggccacacatcccaggaccccgcggtgttccccagggctccatgggtggtgggcaggctttgccctgggggctgtagctttgttttgtggctcctcagattatttgacttccaacgggcacctgagtgagaacgaggcgcggaagaagttctggcaaatcctgtcggccgtggagtactgtcacgaccatcacatcgtccaccgggacctcaagaccgagaacctcctgctggatggcaacatggacatcaagctggcagattttggatttgggaatttctacaagtcaggagagcctctgtccacgtggtgtgggagccccccgtatgccgccccggaagtctttgaggggaaggagtatgaaggcccccagctggacatctggagcctgggcgtggtgctgtacgtcctggtctgcggttctctccccttcgatgggcctaacctgccgacgctgagacagcgggtgctggagggccgcttccgcatccccttcttcatgtctcaag

SEQ ID NO: 28796 - protein, 196 aa, Homo sapiens
MFGKPHSFSVSVENQWHERVWICAASVWATHPRTPRCSPGLHGWWAGFALGAVALFCGSSDYLTSNGHLSENEARKKFWQILSAVEYCHDHHIVHRDLKTENLLLDGNMDIKLADFGFGNFYKSGEPLSTWCGSPPYAAPEVFEGKEYEGPQLDIWSLGVVLYVLVCGSLPFDGPNLPTLRQRVLEGRFRIPFFMS

SEQ ID NO: 28797 - DNA, 1984 bp, Homo sapiens
gcaatgagtcagcgggtggacacaggtgagcatggccagactgtgccagaacatggtgacagacagacatgcttcgaagttcactgtgggaagggacaggtccccagagagaggtgagacggtgcaacgcgagggtgagttcggagtcatcctccagatgtccacaaaggctcgagaggccctgctgtgtgtcaggcactgcgtgaaggttgtgggcacagtaggagggacacaagacaccttctctcgaggaccgttggttccagttgcggagacagtaacagcataagatgatgagtaagaaaagaatgctggcaggaaagtggccatggagggaactgcttccgggcctctccgtgggatttgccaggcgtggactgagcgaggaccttccctgagaacaccaactgctccaggagagagaagaggtggagccccggcggggggcatggggcaggaggcagccacccacaccttccctctctgaatgctgagcagaggctctcagcagaggggaagaagagcagaggccacgattgggaagacagacccagtgggggtccttggcgccgtccacatccatctgcaacctgctgcccagcgcctgcctgcccggggtgtgcacagagcagtgtggtctgtcccggcttcacggcctgacacggccaggcgaggatgacagggaaagggaggcagggacttggggctgttggagccaagctgaggagcaaggagctgcgatgggaagcgggtggcaggaaggagcgtgaggcctgtgggtggaaggtctctggccttggagattgaagcgtttcacttgtgcatctcacagcccagagaagccaagcccggaccatgggggagagaggaggacccccgtctcagggcgggctgaggagacgctctctccacggcttccggatgggtctccctccatctcagctgcatctatgggaaaacgatgaaatgctccctccactgccgggccttctcttataaagcaggtttcttcgaagtataaaaattaatagaaaaggttccatagaaaatcaagaaagtaagtatgtaaagatgaaaacaaaaagcaccggaaatgctcttcatagctgacgttttcttattcactttttattaaaacaggatgaggcgtcctgccttttccagccttatctaggaagtgtcttgccaggtcaccaaatggcaagcagaaccgtaagctgaagttgtctgcctagaattccactgtggcaatgttcagcatcccgactggacagctccgtgcggcggcatcgggggcgcggcggcatcgggggcgcggcagcatcgggggcccttttcatgccattcaaggccccgtggaaacagacaccacagctcagcatgagactgtggccccacctgacctggctcatccatccccagcctctcgtggtccccggccctatgccgacatttggcactcgatgagccatttctccacatttcaggagccttgttttaagacagcctggctgtctgagagccaccggagtcgagactggatgcccggcctggtgcccgtgggccagcaccgcctgaggaggaggggtctctggaggccacaggcagagccactgagagggatctttaagcagagggccccacacacctcctgggacccacgggtgtggctgccatgcagggtctgggagctacagagagtcgggaaccaagggcgcggtggctcacacctgtaatcccagcactttgggaggccaaggatcacgaggtcaggagatcgagaccatcctggctcatacggtgaaaccccatctccactaaaaatacaaaaaattagccgggcgtggtggcgggcgcctgtggtcctagctactcgggaggctgaggcaggagaatggagtgaacccgggaggcagaggttgcagtgaacccagattgcccactgcactccagcctgggcaacagagcgagactccgtctcaaa

SEQ ID NO: 28798 - protein, 161 aa, Homo sapiens
MFSIPTGQLRAAASGARRHRGRGSIGGPFHAIQGPVETDTTAQHETVAPPDLAHPSPASRGPRPYADIWHSMSHFSTFQEPCFKTAWLSESHRSRDWMPGLVPVGQHRLRRRGLWRPQAEPLRGIFKQRAPHTSWDPRVWLPCRVWELQRVGNQGRGGSHL

SEQ ID NO: 28799 - DNA, 3503 bp, Homo sapiens
gtttagattaggttggaagtcacctgggctgagctgatggctgattccgtcagcaaaaagaactgtggaacatactggcacttgggccggtgtgaagccacccccctgccatgaaaaatggctcttccctgccacagccggcccagcgggagccaggtcagggcctggagacacagcgccccccaccggagccactgcccggcccagcagcacctgcggagaatcccaccagctcccacgcctcccgccgcgccaccgccccggctttctgcaaatccaccttatggaagccggataagcacctcctcctctgatgcgtcacagtcacaggtcctggtgaggagggagccacgccaagcacagcggctggaacaggggcaagtgggtgcccaccccgaagtgcaggcaatgaacttgtgctgtagcccatggtgagctgtggggctgtttgtgactgcagcgtagccaagcccatcccgcctgatgcggcctcttcatccagagtgggggtgacgtgccagcccccacctcaccggaatgctgggaggagcgtctccacggaaggagctcactttgtcagctgtaatgtgctgtgactatcgtaaagttccttccgggtgcagagtgatacatgaaccctggggactcactccaacttggtattgattttctccacggaggacccagcagtcacggcccgtgtctgcacagccccttggatcctgcggaggaattcagccggcccctccccctgtgccgaaaaccacggaggcaaagccaggccagggtacagtgagaacacgggagaggactgagagaccgctggctgccgagggaggaagagcaggattcgcacccccgtcatcgctgggcccacacgccgccgacagcttccgcgtgtggccatctgtctttcagaaaccctctggcagagggacccagcagatgacacgggggccgttcacactctgaaacctgcctggagtcaaaacactgctggcgagcctccaccgcaaacccaatccagatggtcttccctggtggccctcggggtggcgggcaccctgcccactccctgccagcccctgcccgctggactccaggcccggccgagcccccgaccggtctcctgacccagcatgctgctctcccctgggcccggctttctcgcccgctgggactcccaggcccctccagcccagccccgagagcaggagccccaagggaggcttggcggctgtggaggcgagtgggccacgtgtagctgggaggccggcaggaccaggagcccctcacagcgcagcacccacagcatcacgagccacttccactcctgggtggcctgggggcccccaccctgctctgagctgccccttgttgtgacctggggtcccccgtggtgggcccgccccttgagcctgggatccagcctcagcgaggctccagaagtgtcgtctccgccggccaggcgtcagcgcctccacccaggatcacacactcctatctctgcacttctgccctccatcctgctccacgccgcctctgcttgttattccagcacattccagggtgatgcctgctgaagccacgcagccagtgcctccaccctaccccccatctgacccaccggccccttccgcacgctggaagcctgcccggcctgaagtgtcctcacctgtcgccctatcctcccctccactccagcccaccggtgactcagccctcacagctctctcctccccgagggagccggtgacttggctctgatggtgccgggacccagccccggcatgttcagaatccttgtcctttaacctgcgtccacatgtagtcgcctccacctccctgcctgaacctccaggccctgcagagcaaacactgctgcctgcaggagacccctggggccttctccgtcccctcatcctcctaaggagcctcccctgccaccgtgccagaatgtgccggaggaacagaggcccgagcctcccgtggccccagcgaggcttcctctggggaagacagtgagcccaacgccctggctctcgaggggtggacggagtccagctggcatcgaccgggtgcccctcttcaccggtgtccacagtccttgagagcaaaggtggtcccagcagtggagcagagggcaagggtggggcatgtagagtctccagggagccactgttggttagagagggagcccgaagtgggctccggaccccagcagggacagcgtccccttccagcgggggcagccgattgatctgggcacacgagcaggaggagcggcgccacccagggctgacctcacggccctgctcacgtctcggggcattttggcagacccacctagacctgggggacagcctgatttcctgcagccatgacctacaagggtggcagctctctcaggcttgagtaaccaggacacagacctgggccatttaatgcgcaggcagccccaagtcccggcagggccagaagcagagacggcggctggggatgaaagtgcacgctggtcccagatggggctgggggtgaaagctgcatgctgatccctgggccccctcactctatgagctcctgaaaggagggaagcccccacaccctactgagtggagtgctccttggcctgggaccccgtccagtgtctgctgctgtgggggcgggctctgggcagagagaggccagacaggcacccaggaaagctggaacacatccctcctgcttcccccagggttcccagaggcgacctccctcctgcacaggcatttgtcatccttaccctctaggacagctttgccatgtgcagtgaacccctggacagtgttgcgtgccactttgccggatttggactgtatacagaccgaagcatgtggcatgaagccttctgctgtcagcaagttccttgtccctcgacagtatgtgcccaggctgcccttcaaggtggcagtgatggcagttgtctcttgcacgctgcgtacagttctgtcactgactcttacacacagccctggagacgggagagtgccgggagcattctatgcaagtgtcctggcctttgcgggcgtctccacagcacaaacacgagtcagggaccacccctcttctgcttccatgattccaccaactgggtggggcagagcagtgccagggccggaggcacgccccaggtgagggcaggtggccatgccagtgagtgcactgcgttctcagttaattcatccgaaatatttctaagtttcttgattattgcagttgcatccccaagataatgccgccctcaccaagtagaaggcacatgtgctctgatggcccctcccacactggggtcagggcacagcaacttagcgaggcgacgtgggggctcagaggacctcggaccaggctcggcacatggggcttctccagccagccagggggaagcaccctgcagactgctaacttttgcaaaatagagtaaaaaagatcagctagaaaaataaaacaaaaaaggaaagatatac

SEQ ID NO: 28800 - protein, 105 aa, Homo sapiens
MALPCHSRPSGSQVRAWRHSAPHRSHCPAQQHLRRIPPAPTPPAAPPPRLSANPPYGSRISTSSSDASQSQVLVRREPRQAQRLEQGQVGAHPEVQAMNLCCSPW

SEQ ID NO: 28801 - DNA, 3013 bp, Homo sapiens
cattgccctctgccccgcagcctgcccgttcccaggccagcgagggcgctcccaggccggtctgcagccagaacacagcccgttccatgtgcttgtcctcgggacacattaggaatgaacccaggcctcagtcctggcctcctcctcaaggctgggtgctcagacgtccccctcagcccctttctctagaccttccggctgaacaaacgagaacatctcacagccctgcaacagccaggagctgctcgtggagctccacgcccggctggagagagaggaggcaccctgggcagcccgccagcacccaggctctcacagtggaagcccacgtcttcttgggctctattttgaaagctgttctttccacgacggctttgacaagaatcgatttgagtgagccggcgtgtcaatacaggccagcacaggactggcctcagggccacattggggagggtggcgaccaggccctggctgcagcccacgtgggcaaaagcatggccaggcaggaggtggggcctgtgagcttggctacagcgaccgtgggcgctgggcccggggctcctcagccctgaggggagacccaggcccaggcaggctcccaggcgggctcccgggctcccagccttccgatcttctccctttgagaccttgccttctgcacagtgacaggaaagagccctgagtcccactttgcagggatgtattgcatttccagaaagttccttccgggtgcagagtgatacatgaaccctggggactcactccaacttggtattgattttctccacggaggacccagcagtcacggcccgtgtctgcacagccccttggatcctgcggaggaattcagccggcccctccccctgtgccgaaaaccacggaggcaaagccaggccagggtacagtgagaacacgggagaggactgagagaccgctggctgccgagggaggaagagcaggattcgcacccccgtcatcgctgggcccacacgccgccgacagcttccgcgtgtggccatctgtctttcagaaaccctctggcagagggacccagcagatgacacgggggccgttcacactctgaaacctgcctggagtcaaaacactgctggcgagcctccaccgcaaacccaatccagatggtcttccctggtggccctcggggtggcgggcaccctgcccactccctgccagcccctgcccgctggactccaggcccggccgagcccccgaccggtctcctgacccagcatgctgctctcccctgggcccggctttctcgcccgctgggactcccaggcccctccagcccagccccgagagcaggagccccaagggaggcttggcggctgtggaggcgagtgggccacgtgtagctgggaggccggcaggaccaggagcccctcacagcgcagcacccacagcatcacgagccacttccactcctgggtggcctgggggcccccaccctgctctgagctgccccttgttgtgacctggggtcccccgtggtgggcccgccccttgagcctgggatccagcctcagcgaggctccagaagtgtcgtctccgccggccaggcgtcagcgcctccacccaggatcacacactcctatctctgcacttctgccctccatcctgctccacgccgcctctgcttgttattccagcacattccagggtgatgcctgctgaagccacgcagccagtgcctccaccctaccccccatctgacccaccggccccttccgcacgctggaagcctgcccggcctgaagtgtcctcacctgtcgccctatcctcccctccactccagcccaccggtgactcagccctcacagctctctcctccccgagggagccggtgacttggctctgatggtgccgggacccagccccggcatgttcagaatccttgtcctttaacctgcgtccacatgtagtcgcctccacctccctgcctgaacctccaggccctgcagagcaaacactgctgcctgcaggagacccctggggccttctccgtcccctcatcctcctaaggagcctcccctgccaccgtgccagaatgtgccggaggaacagaggcccgagcctcccgtggccccagcgaggcttcctctggggaagacagtgagcccaacgccctggctctcgaggggtggacggagtccagctggcatcgaccgggtgcccctcttcaccggtgtccacagtccttgagagcaaagggttcccagaggcgacctccctcctgcacaggcatttgtcatccttaccctctaggacagctttgccatgtgcagtgaacccctggacagtgttgcgtgccactttgccggatttggactgtatacagaccgaagcatgtggcatgaagccttctgctgtcagcaagttccttgtccctcgacagtatgtgcccaggctgcccttcaaggtggcagtgatggcagttgtctcttgcacgctgcgtacagttctgtcactgactcttacacacagccctggagacgggagagtgccgggagcattctatgcaagtgtcctggcctttgcgggcgtctccacagcacaaacacgagtcagggaccacccctcttctgcttccatgattccaccaactgggtggggcagagcagtgccagggccggaggcacgccccaggtgagggcaggtggccatgccagtgagtgcactgcgttctcagttaattcatccgaaatatttctaagtttcttgattattgcagttgcatccccaagataatgccgccctcaccaagtagaaggcacatgtgctctgatggcccctcccacactggggtcagggcacagcaacttagcgaggcgacgtgggggctcagaggacctcggaccaggctcggcacatggggcttctccagccagccagggggaagcaccctgcagactgctaacttttgcaaaatagagtaaaaaagatcagctagaaaaataaaacaaaaaaggaaagatatacaaaatacaaggcc

SEQ ID NO: 28802 - protein, 54 aa, Homo sapiens
MNPGDSLQLGIDFLHGGPSSHGPCLHSPLDPAEEFSRPLPLCRKPRRQSQARVQ

SEQ ID NO: 28803 - DNA, 579 bp, Homo sapiens; identical to SEQ ID NO: 3972

SEQ ID NO: 28804 - protein, 77 aa, Homo sapiens; identical to SEQ ID NO: 3973

SEQ ID NO: 28805 - DNA, 413 bp, Homo sapiens
cccgtcgggagacacgttttgtcagttgcttcctctggagtccttttaaaagactactttttagagcagttttcattttaccgatacatcgatcagagagtacggagcttcccacattgcctcccgcaccccatagcaggcagaggcaccagccaggcgccatcctttacaagctgtttcagcaaaatgtccctgggtcttaatgattaagtccaggcactccaaggacgattaaatatttaaacagcagcttccctttgaagggaaggaaatgaccgcagaagggagtgcaccgtgggggcaggaggtgctgcggccaatgggcagtgctgggagatgaaaccaacagcggcgattgccccagaaagaacttggcgctgctaaggcaatggcggcccgaaagaggcccctga

SEQ ID NO: 28806 - protein, 66 aa, Homo sapiens
RRETRFVSCFLWSPFKRLLFRAVFILPIHRSESTELPTLPPAPHSRQRHQPGAILYKLFQQNVPGS

SEQ ID NO: 28807 - DNA, 633 bp, Homo sapiens
atgatggaccaccaccgtcaaggttgccaccgccgcctcctgacacgcgccaccaggctccgcgctcatggcctggcctggcatctcaccaggcttttcaatggactagagtgcggggctgctctgcctgtggcaagggttgtcctgctgctgggcacaggcccagagaggaagtggcagaagctgggcatgggatgctggtccttgaaggagtgtgtgggggccactgggttgaacgcagcccgctgcagccctgtgaccttgattaaaagactactttttagagcagttttcattttaccgatacatcgatcagagagtacggagcttcccacattgcctcccgcaccccatagcaggcagaggcaccagccaggcgccatcctttacaagctgtttcagcaaaatgtccctgggtcttaatgattaagtccaggcactccaaggacgattaaatatttaaacagcagcttccctttgaagggaaggaaatgaccgcagaagggagtgcaccgtgggggcaggaggtgctgcggccaatgggcagtgctgggagatgaaaccaacagcggcgattgccccagaaagaacttggcgctgctaaggcaatggcggcccgaaagaggcccctga

SEQ ID NO: 28808 - protein, 140 aa, Homo sapiens [sequence omitted]

SEQ ID NO: 28809 - DNA, 233 bp, Homo sapiens
gtggctctgacgatgatggtgaggtggtggagacgccctcacagctgggccaccctcccgtcgggagacacgttttgtcagttgcttcctctggagtccttggaaggaaatgaccgcagaagggagtgcaccgtgggggcaggaggtgctgcggccaatgggcagtgctgggagatgaaaccaacagcggcgattgccccagaaagaacttggcgctgctaaggcaatggcgg

SEQ ID NO: 28810 - protein, 69 aa, Homo sapiens
MMVRWWRRPHSWATLPSGDTFCQLLPLESLEGNDRRRECTVGAGGAAANGQCWEMKPTAAIAPERTWRC

SEQ ID NO: 28811 - DNA, 475 bp, Homo sapiens
tgacacgcgccaccaggctccgcgctcatggcctggcctggcatctcaccaggcttttcaatggactagagtgcggggctgctctgcctgtggcaagggttgtcctgctgctgggcacaggcccagagaggaagtggcagaagctgggcatgggatgctggtccttgaaggagtgtgtgggggccactgggttgaacgcagcccgctgcagccctgtgaccttgattaaaagactactttttagagcagttttcattttaccgatacatcgatcagagagtacggagcttcccacattgcctcccgcaccccatagcaggcagaggcaccagccaggcgccatcctttacaagctgtttcagcaaaatgtccctgggaaggaaatgaccgcagaagggagtgcaccgtgggggcaggaggtgctgcggccaatgggcagtgctgggagatgaaaccaacagcggcgattgcccca

SEQ ID NO: 28812 - protein, 100 aa, Homo sapiens
MGCWSLKECVGATGLNAARCSPVTLIKRLLFRAVFILPIHRSESTELPTLPPAPHSRQRHQPGAILYKLFQQNVPGKEMTAEGSAPWGQEVLRPMGSAGR

SEQ ID NO: 28813 - DNA, 289 bp, Homo sapiens
gggagacacgttttgtcagttgcttcctctggagtccttttaaaagactactttttagagcagttttcattttaccgatacatcgatcagagagtacggagcttcccacattgcctcccgcaccccatagcaggcagaggcaccagccaggcgccatcctttacaagctgtttcagcaaaatgtccctgggaaggaaatgaccgcagaagggagtgcaccgtgggggcaggaggtgctgcggccaatgggcagtgctgggagatgaaaccaacagcggcgattgcccca

SEQ ID NO: 28814 - DNA, 512 bp, Homo sapiens
ggaagagtccctattctgtacagccacgcactgaggcaagagcacaaggaaacaagcagaaggaattcagagaaacagctccaggctccagctcaaaggccgacaccaaaagcgaacacctctgggcgctcttgccttcaagaaggtggggaggctcacagacgcagcatccacccctcgcagggaacctcagttcctggcctgtggtcccatgaaggacatcaggctggcagattggagcacaccccttctttctaacccctcttgaaagcttccttgaatctgccagtcctgccccctggagcaggaaggaaaacagaaggcctaggacgctagaggggtcccgagctttccggagctccagccaccatcaggtctgactgctcagggacagacacaccgaccacatcctgacctcaggatgacctgcggaagtacttggcatttcttcttagccaaatcccttcattaaaagacgggtgagggttccagcgctgccctcttccttctca

SEQ ID NO: 28815 - protein, 85 aa, Homo sapiens
GRVPILYSHALRQEHKETSRRNSEKQLQAPAQRPTPKANTSGRSCLQEGGEAHRRSIHPSQGTSVPGLWSHEGHQAGRLEHTPSF

SEQ ID NO: 28816 - DNA, 1021 bp, Homo sapiens
atgggaaagaatgtctgggaaggacgtcatgcccgaggcttgcgtgacagtttccactcacagtgcgctcactctgaacctctgtgcacacgatgggcctgcatctcttcccactatctgctaggaaacacgaggaatcatgggatttgccgcagtttgcacccaggcctgtgcggatgccccccgactgcccgagatgctgcacctgccactgctgggggtgtacctgcctatgcccactcacaggggcacctccagggtagctgcctggtgcaggcattggctctaagcagagcagcactatgggcccatctggggctggctcttgcctgggcctgtgagcaccatcacagccagccgatctgggagtatccagggtgttcttgtcattgcggacactgaatagccattggtgggtggcgatgggggcttggaagccgagcatcagtggcaatgagaagcaggccctgtggtttaattccgaagcacatgaacccacagagccgccaacagtcgttattcggcaggagggggtacagagacagcagcctgcggagcgttctaggcaggacagggcagcaaacctgacatgcggagctgggggcaggggtaatggggccagggggtaatggcaggtgaggccatggcctagagggttgccatgcttggtgcaggggaggagaggcccaggtgtggctgcagtggcagcaggagtcagtgtggctgtgcccagtgggatgttgtcagagaatggacctggctgctgggaaaggtgattgtgtttgtctgagccacactggactcttctctgaccagcaagcacattctggagatgcggggcagagacgaggcctccgtgagaacctttgaggtgtgagggccttgatctggggtgcagcctccagctttctgcttacagagcaggacctgcaggagctcgctgactgcctgcacagtggaaggaagacctgtttcttttactttccttgaggagaaaaaattaaagttctgagcaaacgca

SEQ ID NO: 28817 - protein, 133 aa, Homo sapiens
MGKNVWEGRHARGLRDSFHSQCAHSEPLCTRWACISSHYLLGNTRNHGICRSLHPGLCGCPPTARDAAPATAGGVPAYAHSQGHLQGSCLVQALALSRAALWAHLGLALAWACEHHHSQPIWEYPGCSCHCGH

SEQ ID NO: 28818 - DNA, 445 bp, Homo sapiens
aactctgagcaagtcaaaacaaccgtcagcagcgggaaacctcgatgaacaaacaccgggagagtgtttctgcagatcctgctttgtgacttcgagtgaagtgtggaagcgctggaagcacttagaccctgcctgtgccgcagacccctgggaggcaccaacaccccggatcgagaagcccgatgggaaagaatgtctgggaaggacgtcatgcccgaggcttgcgtgacagtttccactcacagtgcgctcactctgaacctctgtgcacacgatgggcctgcatctcttcccactatctgctaggaaacacgagggagaggcccaggtctttctgcttacagagcaggacctgcaggagctcgctgactgcctgcacagtggaaggaagacctgtttcttttactttccttgaggagaaaaaattaaagttctgagcaaacgc

SEQ ID NO: 28819 - protein, 84 aa, Homo sapiens
MGKNVWEGRHARGLRDSFHSQCAHSEPLCTRWACISSHYLLGNTRERPRSFCLQSRTCRSSLTACTVEGRPVSFTFLEEKKLKF

SEQ ID NO: 28820 - DNA, 654 bp, Homo sapiens
cagagatccccttgtttaccctagtccagggacagaggctcagatgtcatgcttgaccccacaggtacagggttaggggtgaaggtggctgtctcttcatgtcttcaccatggcttctctgccttcctcctgctcctggtggcttatgtcctgccgctcttgatacgcgactgtggtctgtcctgggatggttatgatgcatatgtgctattgttgtgaactgtaacattgaggtctggccttacggttggttttgattgtcccttctgctcccttttcttattttaatattttaccattttccattttaatgtatctgttgtcttttttggctaaatctcttttcagttttattttactgtatatcttttctaagtgattgcttagagattacaatatactaaacctagcctttcacagtttctgcagatcctgctttgtgacttcgagtgaagtgtggaagcgctggaagcacttagaccctgcctgtgagttgtcatgtatcatgtctgcaaacattaaaaatctcaccagatgatggggtgcagaggttgcggtgagctgagatgacgccactacactccagcctaggcgacagagcaagaccctatctcaaaaaacaaaacaaaataaaagttctctgcttattttgca

SEQ ID NO: 28821 - protein, 56 aa, Homo sapiens [sequence omitted]

SEQ ID NO: 28822 - DNA, 447 bp, Homo sapiens
tctcgggcttctcatcagcttattggcccatttagccagggcaaaggtgcatgacaactctgagcaagtcaaaacaaccgtcagcagcgggaaacctcgatgaacaaacaccgggagagtgcattcccaggggagttccaggaggcccatggcccctcctgtacagccctccaccgcccagagccttccagcgccgtgtcttccccttggagcatctggaggccccagacagcacccgcctgacgttcagcagagggggagaccgaggcctgcagcagagtgttttgtcagatgctgctccctgaccgggagtgagagggaacccacctagagtttctgcagatcctgctttgtgacttcgagtgaagtgtggaagcgctggaagcacttagaccctgcctgtgagttgtcatgtatcatgtctgcaaacattaaaaatctcaccag

SEQ ID NO: 28823 - protein, 84 aa, Homo sapiens
MTTLSKSKQPSAAGNLDEQTPGECIPRGVPGGPWPLLYSPPPPRAFQRRVFPLEHLEAPDSTRLTFSRGGDRGLQQSVLSDAAP

SEQ ID NO: 28824 - DNA, 1904 bp, Homo sapiens
ggagtgagcgcggcagtggccctggcagctggcggagcggcccagcccgtgtgcacgtggcgccggcgctgcctttcggttgccaaaattcaggctgtagacggcgagataacaagtttaaaaccccggctaagccagaagagccaaagagggacctcgccaaggccactcctcgctctctaggccgagaatactgcgcaaattctgggaggtttgggcctggcggctctccgttcccgacccccggcgtggattcgttcccgcgctttctggcgtgaggggtcagagggcgcgccgacgctcaggcgaacggagcggaggcggcagcggccatgggcgaagcgggcgccgctgaggaggcctgccggcacatgggaactaaagaggaatttgttaaagtcagaaagaaggatctggaacggctgacaactgaagtgatgcaaatacgggacttcttacccagaatactaaatggggaggtgctggagagcttccagaaattaaagattgtagaaaaaaacctggaaaggaaagagcaagaattagagcagctgaaaatggattgtgagcactttaaagcccgcctggaaaccgtgcaggccgacaacataagagagaagaaggagaaactggctcttcgacagcagttgaatgaagcgaagcagcaactcctgcagcaggcagagtattgtacagaaatgggagcagcagcgtgtaccctcttgtggggtgtctccagcagtgaggaagtcgtcaaggccattttgggaggagataaagctttgaagtttttcagcatcactggtcaaacaatggagagttttgtgaagtcgttagacggtgatgtccaggagctggattcggatgaaagtcagtttgttttcgctctggctggaattgtcacgaatgttgctgctatagcatgtggtcgtgaattcttggttaattcaagccgggtgctcttggacaccatattgcagcttctgggagacttgaagccaggacagtgtaccaaactcaaagtgctaatgctgatgtccctatacaatgtaagcatcaatttgaaaggcttgaaatacatcagcgagagtccaggattcatccctttgctgtggtggcttttgagtgatccagatgcagaggtgtgccttcatgtactgaggcttgtccagtctgtggttctggaacctgaagtcttctccaagtcggcctctgagttccggagctccctgcccctgcaacgcatcctggcaatgtccaagagccgcaacccccgcctgcaaaccgcagcccaggagctcctggaagatctccgcactctggagcataatgtgtaggtgtgctcggccaccagggttttggtgaaaatgccggtgtcccttctccccagatccctcatttgatactccaaaaccatcaccatgtaccatgtgttagagttggcaaaatgtgattgactagagatggacatgaattgatatgtatcccacataactttgtcttggaagtgagagtgcttgtaggtggttggttaagcttgccaaaggagaggccatgaaagaacctgtccttctggaaaagtggtccatgtctgtgctggctggaagagggcttgcttagggcagcttcttgctgctcagcagaccatgacctgtaggttcacctataaaacagggaaattgaataaccatctaccccattagtcagcattttcttgagatacatttctttgaaaagcaattcattctctctctagtaattgtaattaatccccccaaaatgcaagtttacttttataaccttttggtgaacctgctatttcggatgacattgggcattttagttctatattttttgtgcctcttttatttttgaataaagaaaatcagaagagttgtattacg

SEQ ID NO: 28825 - protein, 334 aa, Homo sapiens; identical to SEQ ID NO: 3975

SEQ ID NO: 28826 - DNA, 2606 bp, Homo sapiens
gtcccgggagcccggcctcgtgcgccgcgctttgagcctctaggccatgaaactgcctcaccaagcactatgcaattgagtgcccaccagaagacacccctccagtcaacccacagaccccagaaagagtacccagaggagcctgagcacactccaccctatctgttctctgaaattcaatcaaatgagtcactctacttctctggaagcagaaagaggctggaagtttttctccagcagcagactgctcgacaaacactgcgccaagagctcctcagcagaagctcctcgcatcagatcctctgtgctgggaatcctcccctcttgagcacactctgtgctcctcttccagttacggtgcatgtgaagcaatggtatgggaaaattgtttgcagaaggatgaaaaggctttattgccaaactcttaaggtattttgttaataaaatcattttcataatggaaaagactcagaaaattcccctcgcatgacatataacatccaacaaggggctgaaccaagaaaaaatactgcagctgctgctaatggcaacactgagcaagcacctggcctgtgccaggcactgtcctgtgcagtctgtgtttgcactcattttatcctcaagagccagatgagcatctccaccagacagcacctgcagaggcttgggcagtttattttaccgtctctgagtaaaatagggataataagtaacagtacccatacacaggtggcagagacgctagggaacttgcccaaggtcacagagcttccaagtggaggagcagggacacatatgctcacaatgatggcactaaggcacatgttgcctggatggagaccagcccacagatgagagttccaggacagagggaacatggatggatcaagtgaagtgacagaacatttggaaaactctaccgagatatatacggccccccagtaaaattaaagagataaagagaactacattaagtgagacaataaggcaactctatttcttgcaggaaaaaaataattgtggttatagaacactactggttctgaggtgaatagcagtcacagagccatcaaaatatgaccccactcactgaagtaatacaaagtgctagtgtagctatcccgggaagacgtggaaggccgagcaaggaccatggcacaagaggccacgctgtacctagtatggtatgcagtggccaagaggacccccctgattccacctagtgttcatgcccacgtgtgatctcctgccccgtgagctgggcctagccactcacttctgacagacagaagccaacaaaagcaacaggatgtcacttctaagtttaggttataaacacactcagacttccatctaggctcacctcttgctcactctgatgaaagccagctgccatgctgtcagctggggagaggcccatgtggcaggaactgaggaagtctttggccacagcctgcaaggaagtgaatcctgacacaagctcactagagtgagctgggaagtagatacccttcagtcaagctttcagatgaggccacaatcctagccaacattttcatttccacccatgagaaaccttgagccagaagacccaagctaagctacacctggattcctgacccacagataccatgataacagacattattttaagctgctatgttaggagtaattagttatttaggaataaggtaactaatacatttatattaatgggaagtcagcagagaacatttaaatggataaactgagaaatggctgtgtaagtgtgtgatctggaaacaggagaaaaatgcagccctgaagaaaggagttaagagaggaaggaggagctactatgtctcattttaaatcacgtgggtggcattatttgacttctttttaagtacacggaagtgttactttcttaaatgaaaatgaaggtaacagcagcagtaaactaatttccagtagatgaaatgtgactttgtaatcccaggaaaagggaagaatttgcaccaagaagttactgttacctcagaatggcaagagcatggatggctcttatcatcatctttatacttcttttacatttcctcattttttaaaagttttgtgtacatattacatttaggaaatccaatatatagtattaaaacagaaaaagtaaagaagcaggctgggcttggtgcccactactcaatttgactggcttaaaaaaattttttaaacgacatgtacggacagacataatacttgcttctgagcctcccagtctttcaaaaccacattagggaataagcagtatttgcatggttccagtgatatctgggagtaagtgaaagtaatgaaaacacagaagtaaacacaaagtaattatagttcacctttatacacacgttaacagaaatcatctgatcccctttgctgctaagtgagttgaaaagcgaaagcgtctgaatcccaccagcatcgctggatgtgtcatccactgagccttcatctcccatgaacttgacttttaaccaatttgctagaattctacagatttaaaaaaaacaaaaaacaaaaaaaacacttgaagaatctaattctatatttgaattataaagactttcaggaaaaga

SEQ ID NO: 28827 - protein, 123 aa, Homo sapiens
MQLSAHQKTPLQSTHRPQKEYPEEPEHTPPYLFSEIQSNESLYFSGSRKRLEVFLQQQTARQTLRQELLSRSSSHQILCAGNPPLLSTLCAPLPVTVHVKQWYGKIVCRRMKRLYCQTLKVFC

SEQ ID NO: 28828 - DNA, 863 bp, Homo sapiens
actctcagcattaaaaacggtgccaggcacagagcaaatgcttgatcagtgttggttgaattaaagaacatcggaagaggactaacagcttaggtaccaaagtcccagcactcaagcagaatttttgttcggattttcatgtttttcctttgtctatttttacttttatttttatttatttatttttttgagatggagtctcactttgtcacactgcattcccacctgggtgacagactgagatcctgtcactaaataaataaaagacacctctattttagtaaatgaccaccaccatatacccagttgttgaggccaaaatcctcagagccttctgtatctggcttaatgaataagctggatgcagtagtatgtaagcagataggaacagtgttttttctcatgactgcccctagaagcttaactgtgtcaattctcagacgtagtttacagctttttcttttctttcagacattaaaaagagcggattattttactcataaaaagtccagtccattaagatatcaaaactcaaactcttatccagttgaaacctcttccctcacctagctttgccaggttcagtgtgagattccatccaggctgaagccccttatccctattcttcatgtttctacatggaggaacttacctggagaaaaacttccagcctctttctgcttccagagaagtagagtgactcatttgattgaatttcagagaacagatagggtggagtgtgctcaggctcctctgggtactctttctggggtctgtgggttgactggaggggtgtcttctggtgggcactcaattgcatagtgcttggtgaggcagtttcatggcctagaggctgggggata

SEQ ID NO: 28829 - protein, 38 aa, Homo sapiens
MFFLCLFLLLFLFIYFFEMESHFVTLHSHLGDRLRSCH

SEQ ID NO: 28830 - DNA, 3600 bp, Homo sapiens
aagctctgcctcccggcttcacgtcattctcctgcttcagcctcccgagtagctgggactacaggcgcccgccaccacaccaggctaatttttttgtatttttagtagagacagggtttcaccatgttagccaggatggtctggatctcttgacctcatgatccacccgcttcggccttccaaagtgctgggattacaggcgtgagccaccgcgcctgactgactcttgcacttttcaagcaagccctcagtgtctgtgggccccaagtgcagtgtcttccatgctgattgccctgtttctaggaatgcagtagagacagaccagagggtccgtgtggcccgttgctgtgaggatgtctgtgcccacttagtggacttgtttctcgtggaggaaatcttccagactgcaaaggagaccctccaggagcttcagtgcttctgcaagtatctacagcggtggagggaagctgtcacagcccgcaagaaactgaggcgccaaatgcgggctttccctgctgcgccctgctgcgtggacgtgagcgaccggctgagggcgctggcgcccagcgcagagtgccccattgctgaagagaacctggccaggggcctcctggacctgggccatgcagggagattgggcatctcctgcaccaggttaaggcggctcagaaacaagacagctcaccagatgaaggttcagcacttctaccagcagctgctgagtgatgtggcatgggcgtctctggacctgccatccctcgtggctgagcacctccctgggaggcaggagcatgtgttttggaagctggtgctggtgttgccggatgtagaggagcagtccccagagagttgtggcagaattctagcaaattggttaaaagtcaagttcatgggagatgaaggctcagtggatgacacatccagcgatgctggtgggattcagacgctttcgcttttcaactcacttagcagcaaaggggatcagatgatttctgttaacgtgtgtataaaggtggcccatggcgccctcagtgatggtgccattgatgctgtggagacacagaaggacctcctgggagccagtgggctcatgctgctgcttccccccaaaatgaagagtgaggacatggcagaggaggacgtgtactggctgtcggccttgctgcagctcaagcagctcctgcaggctaagcccttccagcctgcgcttcctctggtggttcttgtgcctagcccaggaggggacgccgttgagaaggaagtagaagatggtctgatgctacaggacttggtttcagctaagctgatttcagattacactgttaccgagatccctgataccattaatgatctacaaggttcaactaaggttttgcaagcagtgcagtggctggtttcccactgcccccattcccttgacctctgctgccagactctcattcagtacgtcgaagacgggattggccatgagtttagtggccgctttttccatgacagaagagagaggcgtctgggcggtcttgcttctcaggagcctggcgccatcattgagctgtttaacagtgtgctgcagttcctggcttctgtggtgtcctctgaacagctgtgtgacctgtcctggcctgtcactgagtttgctgaggcagggggcagccggctgcttcctcacctgcactggaatgccccagagcacctggcctggctgaagcaggctgtgctcgggttccagcttccgcagatggaccttccacccctgggggccccctggctccccgtgtgctccatggttgtccagtacgcctcccagatccccagctcacgccagacacagcctgtcctccagtcccaggtggagaacctgctccacagaacctactgtaggtggaagagcaagagtccctccccagtccatggggcaggcccctcggtcatggagatcccatgggatgatcttatcgccttgtgtatcaaccacaagctgagagactggacgcccccccggcttcctgttacatcagaggcgctgagtgaagatggtcagatatgtgtgtatttttttaaaaacgatttgaaaaaatatgatgttcctttgtcgtgggaacaagccaggttgcagacgcagaaggagctacagctgagagagggacgtttggcaataaagccttttcatccttctgcaaacaattttcccataccattgcttcacatgcaccgtaactggaagaggagcacagagtgtgctcaagaggggaggattcccagcacagaggatctgatgcgaggagcttctgctgaggagctcttggcgcagtgtttgtcgagcagtctgctgctggagaaagaagagaacaagaggtttgaagatcagcttcagcaatggttgtctgaagactcaggagcatttacggatttaacttcccttcccctctatcttcctcagactctagtgtctctttctcacactattgaacctgtgatgaaaacatctgtaactactagcccacagagtgacatgatgagggagcaactgcagctgtcagaggcgacaggaacgtgtctaggcgaacgactaaagcacctggaaaggctgatccggagttcaagggaagaggaagttgcctctgagctccatctctctgcgctgctagacatggtggacatttgagcagcctgacctgtggggagggggtctctcccgaagagtttctgtttttactcaaaataatgttattctcagatgcttgatgcactgttggaaatgtgattaatttaatcatgcagataaaccatttaaatgtcagtctcccagtttttcataatgaaaagttgtttcccctgtgtgacctcttcaatattctcctatattcatgacctcctcagattgtcacccaccagcatatgctctgaggcagtttagagcttacatttccatgtataaaaggcgattcattctctcagcaaacttgcagtccttgatgtgccagacatcagtgatgcagagataaagtaagacacagggcctctgcctgctaagcccacccagcttacatccaggagagtcaggtacttatgtacataattctcagagaatgtgcatgaggcgtgggcctgaattggtagcaaggaaaaaacagaggatggaacagggtctggttgggtagaggagaaacagaattcccggagaggagtgcaggggtgtagctggagacagtgtacttgagaggacatgatgaaagcgtggaggtaccagcttggttgtgtggccaggtgaggggaacaggccagcagggtgaggtcagagattcttgtcaccttcttctgagagctgtgagaacccgttgttgaagattaggcagagaagtgatctggtcacattttcttttaagaatggcatgtagggcaggaatcttgagaggtgggtgctgcagccatccaggtgaaattcaaagggaataagcgtgagtttgttagcaattggtgtgaagagaggggataaaatttgagccatatacagaaagaggtattaatagacttggtgatgttgcgtatgaccaccaatcttaaactggcactcagcatctcctgactgtaatcctacat

SEQ ID NO: 28831 - protein, 721 aa, Homo sapiens
MRAFPAAPCCVDVSDRLRALAPSAECPIAEENLARGLLDLGHAGRLGISCTRLRRLRNKTAHQMKVQHFYQQLLSDVAWASLDLPSLVAEHLPGRQEHVFWKLVLVLPDVEEQSPESCGRILANWLKVKFMGDEGSVDDTSSDAGGIQTLSLFNSLSSKGDQMISVNVCIKVAHGALSDGAIDAVETQKDLLGASGLMLLLPPKMKSEDMAEEDVYWLSALLQLKQLLQAKPFQPALPLVVLVPSPGGDAVEKEVEDGLMLQDLVSAKLISDYTVTEIPDTINDLQGSTKVLQAVQWLVSHCPHSLDLCCQTLIQYVEDGIGHEFSGRFFHDRRERRLGGLASQEPGAIIELFNSVLQFLASVVSSEQLCDLSWPVTEFAEAGGSRLLPHLHWNAPEHLAWLKQAVLGFQLPQMDLPPLGAPWLPVCSMVVQYASQIPSSRQTQPVLQSQVENLLHRTYCRWKSKSPSPVHGAGPSVMEIPWDDLIALCINHKLRDWTPPRLPVTSEALSEDGQICVYFFKNDLKKYDVPLSWEQARLQTQKELQLREGRLAIKPFHPSANNFPIPLLHMHRNWKRSTECAQEGRIPSTEDLMRGASAEELLAQCLSSSLLLEKEENKRFEDQLQQWLSEDSGAFTDLTSLPLYLPQTLVSLSHTIEPVMKTSVTTSPQSDMMREQLQLSEATGTCLGERLKHLERLIRSSREEEVASELHLSALLDMVDI

SEQ ID NO: 28832 - DNA, 5229 bp, Homo sapiens
tgatctctaagcttgggttccgtgttgccaaagcgccttctggtggactcagcccaggaggagcccatgtgccccacgctggccatggctgtggtcatgggctgactgcatgtgtctgactgggccttcgtctgagactgcagtgatttcgctcctcctctcagatccgcaaggatgctctccgggcgctcaactttgcgtacacggtgagcacacagcgatctaccatctttcccctggatggtgtggtgcgcatgctgctgttcagagactgtgaagaggccaccgacttcctcacctgccacggcctcaccgtttccgacgggtaagagctgagaatggaactgtggggcccctgtctccttttttcttgttaattctgatgaagggctgtgaagggctggctgcttgcctgacttgaagaaggtgcattccctctgccatgcaggtgaacacacgagactcagaatggctgggggtgttcccaaggtcacatcctggctgtcagcacattgagggctcagaccaagttctttgtgactccaaaatcagtccttttcatgacttgctgacaaacctaaagataaaagttagggccttctttattctttcccttgactgcctttgccagccaatgacggacaacctctgacggctgggatggaggcacccgcaggccagccggagtcttctccggtacttaccagtcagagtggtgagactcacagacgctctctcagaaactggcagcttacactcaacacccggtgcctagttccccaccctgtctcctctaactcctcacctgcctcctgcctgtctcctccttccagttctgtctccttctagttctgtctcctccttccagttctgtcctcagaaaattagacggttttgggtgagccagcaaggaggcaggagtgagtcagcgtgcgtctgttaacacgctgggcttagtggttctagggacctacagaggctccagggtgggcggcagtgggacctggcgcctgtgctttctgttatttacacatggctgtggtgacacccaaggggcttgcagtactcggcagggcactgagggcgaagctgtcttctcccctggtgacacccctcgggggtcttttgtggtctgggtagctgtgtggagctgaaccggtctgcattcctggaaccagagggattatccaagaccaggaagtcggtgtttattactaggaagctgacggtgtcagtcggggaaattgtgaacggagggccattgccccccgtccctcgtcatacccctgtgtgcagcttcaactcccagaacaagtacatcggggagagcctggccgcggagctgcccgtcagcacccagagacccggctccgacacagtgggcggagggagaggagaggagtgtggtgtagagccggatgcacccctgtccagtctcccacagtctctaccagcccctgcgccctcaccagtgcctctgcctcctgtcctggcactgaccccgtctgtggcgcccagcctcttccagctgtctgtgcagcctgaaccaccgcctccagagcccgtgcccatgtactctgacgaggacctggcgcaggtggtggacgagctcatccaggaggccctgcagagggactgtgaggaagttggctctgcgggtgctgcctacgcagctgccgccctgggtgtttctaatgctgctatggaggatttgttaacagctgcaaccacgggcattttgaggcacattgcagctgaagaagtgtctaaggaaagagagcgaagggagcaggagaggcagcgggctgaagaggaaaggttgaaacaagagagagagctggtgttaagtgagctgagccagggcctggccgtggagctgatggaacgcgtgatgatggagtttgtgagggaaacctgctcccaggagttgaagaatgcagtagagacagaccagagggtccgtgtggcccgttgctgtgaggatgtctgtgcccacttagtggacttgtttctcgtggaggaaatcttccagactgcaaaggagaccctccaggagcttcagtgcttctgcaagtatctacagcggtggagggaagctgtcacagcccgcaagaaactgaggcgccaaatgcgggctttccctgctgcgccctgctgcgtggacgtgagcgaccggctgagggcgctggcgcccagcgcagagtgccccattgctgaagagaacctggccaggggcctcctggacctgggccatgcagggagattgggcatctcctgcaccaggttaaggcggctcagaaacaagacagctcaccagatgaaggttcagcacttctaccagcagctgctgagtgatgtggcatgggcgtctctggacctgccatccctcgtggctgagcacctccctgggaggcaggagcatgtgttttggaagctggtgctggtgttgccggatgtagaggagcagtccccagagagttgtggcagaattctagcaaattggttaaaagtcaagttcatgggagatgaaggctcagtggatgacacatccagcgatgctggtgggattcagacgctttcgcttttcaactcacttagcagcaaaggggatcagatgatttctgttaacgtgtgtataaaggtggcccatggcgccctcagtgatggtgccattgatgctgtggagacacagaaggacctcctgggagccagtgggctcatgctgctgcttccccccaaaatgaagagtgaggacatggcagaggaggacgtgtactggctgtcggccttgctgcagctcaagcagctcctgcaggctaagcccttccagcctgcgcttcctctggtggttcttgtgcctagcccaggaggggacgccgttgagaaggaagtagaagatggtctgatgctacaggacttggtttcagctaagctgatttcagattacactgttaccgagatccctgataccattaatgatctacaaggttcaactaaggttttgcaagcagtgcagtggctggtttcccactgcccccattcccttgacctctgctgccagactctcattcagtacgtcgaagacgggattggccatgagtttagtggccgctttttccatgacagaagagagaggcgtctgggcggtcttgcttctcaggagcctggcgccatcattgagctgtttaacagtgtgctgcagttcctggcttctgtggtgtcctctgaacagctgtgtgacctgtcctggcctgtcactgagtttgctgaggcagggggcagccggctgcttcctcacctgcactggaatgccccagagcacctggcctggctgaagcaggctgtgctcgggttccagcttccgcagatggaccttccacccctgggggccccctggctccccgtgtgctccatggttgtccagtacgcctcccagatccccagctcacgccagacacagcctgtcctccagtcccaggtggagaacctgctccacagaacctactgtaggtggaagagcaagagtccctccccagtccatggggcaggcccctcggtcatggagatcccatgggatgatcttatcgccttgtgtatcaaccacaagctgagagactggacgcccccccggcttcctgttacatcagaggcgctgagtgaagatggtcagatatgtgtgtatttttttaaaaacgatttgaaaaaatatgatgttcctttgtcgtgggaacaagccaggttgcagacgcagaaggagctacagctgagagagggacgtttggcaataaagccttttcatccttctgcaaacaattttcccataccattgcttcacatgcaccgtaactggaagaggagcacagagtgtgctcaagaggggaggattcccagcacagaggatctgatgcgaggagcttctgctgaggagctcttggcgcagtgtttgtcgagcagtctgctgctggagaaagaagagaacaagaggtttgaagatcagcttcagcaatggttgtctgaagactcaggagcatttacggatttaacttcccttcccctctatcttcctcagactctagtgtctctttctcacactattgaacctgtgatgaaaacatctgtaactactagcccacagagtgacatgatgagggagcaactgcagctgtcagaggcgacaggaacgtgtctaggcgaacgactaaagcacctggaaaggctgatccggagttcaagggaagaggaagttgcctctgagctccatctctctgcgctgctagacatggtggacatttgagcagcctgacctgtggggagggggtctctcccgaagagtttctgtttttactcaaaataatgttattctcagatgcttgatgcactgttggaaatgtgattaatttaatcatgcagataaaccatttaaatgtcagtctcccagtttttcataatgaaaagttgtttcccctgtgtgacctcttcaatattctcctatattcatgacctcctcagattgtcacccaccagcatatgctctgaggcagtttagagcttacatttccatgtataaaaggcgattcattctctcagcaaacttgcagtccttgatgtgccagacatcagtgatgcagagataaagtaagacacagggcctctgcctgctaagcccacccagcttacatccaggagagtcaggtacttatgtacataattctcagagaatgtgcatgaggcgtgggcctgaattggtagcaaggaaaaaacagaggatggaacagggtctggttgggtagaggagaaacagaattcccggagaggagtgcaggggtgtagctggagacagtgtacttgagaggacatgatgaaagcgtggaggtaccagcttggttgtgtggccaggtgaggggaacaggccagcagggtgaggtcagagattcttgtcaccttcttctgagagctgtgagaacccgttgttgaagattaggcagagaagtgatctggtcacattttcttttaagaatggcatgtagggcaggaatcttgagaggtgggtgctgcagccatccaggtgaaattcaaagggaataagcgtgagtttgttagcaattggtgtgaagagaggggataaaatttgagccatatacagaaagaggtattaatagacttggtgatgttgcgtatgaccaccaatcttaaactggcactcagcatctcctgactgtaatcctacat

SEQ ID NO: 28833 - protein, 907 aa, Homo sapiens [sequence omitted]

SEQ ID NO: 28834 - DNA, 5393 bp, Homo sapiens
accacacccagctaatttttgtatttttagtagagatggggtttcaccatgttggccaggctggtctcaaactcctggcttcaagtgacccgcctgccttggcctcccaaagtgctgggattacaggcgtgagccaccacacccagccccattgtcttttttttaagacactggttctcactctgtcacctaggctggagtgcagtggtgtgatcaaggcttactgcagcctcaacctcttgggctcaagcagtcctcccactttagcctcccatgttgctgggaccacaggtgcatgccaccaagccccactaattaaaacaaatttttttttatagagaataggatgtagctatgttgcccaggctggtcttgaattcctgggctcaagtgatcctcccaccttggcctcccaaagtgctgggattacaggtatgagctactgcacctggtctctgtcttctttttttttttttaaggctcttgttagaatgccgtgaacagttgtctccaactattatatgtcattccacgggattggtttcctgctggcattccatggtctccggggtcctctgcagcaccttcctggccttttgtcatgtggatgctgcacagctgacttcacctggtcttgttgatggacagtttgtttcatgatttctcttatgaataaaaccttcacaagccatccttctctatgagagtgtttgcttggcacgcattcctgagcactgcccctgagcagaccgcctatgatctctaagcttgggttccgtgttgccaaagcgccttctggtggactcagcccaggaggagcccatgtgccccacgctggccatggctgtggtcatgggctgactgcatgtgtctgactgggccttcgtctgagactgcagtgatttcgctcctcctctcagatccgcaaggatgctctccgggcgctcaactttgcgtacacggtgagcacacagcgatctaccatctttcccctggatggtgtggtgcgcatgctgctgttcagagactgtgaagaggccaccgacttcctcacctgccacggcctcaccgtttccgacggctgtgtggagctgaaccggtctgcattcctggaaccagagggattatccaagaccaggaagtcggtgtttattactaggaagctgacggtgtcagtcggggaaattgtgaacggagggccattgccccccgtccctcgtcatacccctgtgtgcagcttcaactcccagaacaagtacatcggggagagcctggccgcggagctgcccgtcagcacccagagacccggctccgacacagtgggcggagggagaggagaggagtgtggtgtagagccggatgcacccctgtccagtctcccacagtctctaccagcccctgcgccctcaccagtgcctctgcctcctgtcctggcactgaccccgtctgtggcgcccagcctcttccagctgtctgtgcagcctgaaccaccgcctccagagcccgtgcccatgtactctgacgaggacctggcgcaggtggtggacgagctcatccaggaggccctgcagagggactgtgaggaagttggctctgcgggtgctgcctacgcagctgccgccctgggtgtttctaatgctgctatggaggatttgttaacagctgcaaccacgggcattttgaggcacattgcagctgaagaagtgtctaaggaaagagagcgaagggagcaggagaggcagcgggctgaagaggaaaggttgaaacaagagagagagctggtgttaagtgagctgagccagggcctggccgtggagctgatggaacgcgtgatgatggagtttgtgagggaaacctgctcccaggagttgaagaatgcagtagagacagaccagagggtccgtgtggcccgttgctgtgaggatgtctgtgcccacttagtggacttgtttctcgtggaggaaatcttccagactgcaaaggagaccctccaggagcttcagtgcttctgcaagtatctacagcggtggagggaagctgtcacagcccgcaagaaactgaggcgccaaatgcgggctttccctgctgcgccctgctgcgtggacgtgagcgaccggctgagggcgctggcgcccagcgcagagtgccccattgctgaagagaacctggccaggggcctcctggacctgggccatgcagggagattgggcatctcctgcaccaggttaaggcggctcagaaacaagacagctcaccagatgaaggttcagcacttctaccagcagctgctgagtgatgtggcatgggcgtctctggacctgccatccctcgtggctgagcacctccctgggaggcaggagcatgtgttttggaagctggtgctggtgttgccggatgtagaggagcagtccccagagagttgtggcagaattctagcaaattggttaaaagtcaagttcatgggagatgaaggctcagtggatgacacatccagcgatgctggtgggattcagacgctttcgcttttcaactcacttagcagcaaaggggatcagatgatttctgttaacgtgtgtataaaggtggcccatggcgccctcagtgatggtgccattgatgctgtggagacacagaaggacctcctgggagccagtgggctcatgctgctgcttccccccaaaatgaagagtgaggacatggcagaggaggacgtgtactggctgtcggccttgctgcagctcaagcagctcctgcaggctaagcccttccagcctgcgcttcctctggtggttcttgtgcctagcccaggaggggacgccgttgagaaggaagtagaagatggtttgtgaaggaagtctcgtttatgaagcagcattgtttaataaatgggtggaggccctgggtctgaggatggtccagtagtgttggggtcaggaatcactgagacagcaacccctgtggtgactgtccactgcaggactgggtggggtcagcacagtgagatatgttagcaggtgtgctgacagcagaatgcaagtgaccttcatctatgtctgtcttaaaggtctgatgctacaggacttggtttcagctaagctgatttcagattacactgttaccgagatccctgataccattaatgatctacaaggttcaactaaggttttgcaagcagtgcagtggctggtttcccactgcccccattcccttgacctctgctgccagactctcattcagtacgtcgaagacgggattggccatgagtttagtggccgctttttccatgacagaagagagaggcgtctgggcggtcttgcttctcaggagcctggcgccatcattgagctgtttaacagtgtgctgcagttcctggcttctgtggtgtcctctgaacagctgtgtgacctgtcctggcctgtcactgagtttgctgaggcagggggcagccggctgcttcctcacctgcactggaatgccccagagcacctggcctggctgaagcaggctgtgctcgggttccagcttccgcagatggaccttccacccctgggggccccctggctccccgtgtgctccatggttgtccagtacgcctcccagatccccagctcacgccagacacagcctgtcctccagtcccaggtggagaacctgctccacagaacctactgtaggtggaagagcaagagtccctccccagtccatggggcaggcccctcggtcatggagatcccatgggatgatcttatcgccttgtgtatcaaccacaagctgagagactggacgcccccccggcttcctgttacatcagaggcgctgagtgaagatggtcagatatgtgtgtatttttttaaaaacgatttgaaaaaatatgatgttcctttgtcgtgggaacaagccaggttgcagacgcagaaggagctacagctgagagagggacgtttggcaataaagccttttcatccttctgcaaacaattttcccataccattgcttcacatgcaccgtaactggaagaggagcacagagtgtgctcaagaggggaggattcccagcacagaggatctgatgcgaggagcttctgctgaggagctcttggcgcagtgtttgtcgagcagtctgctgctggagaaagaagagaacaagaggtttgaagatcagcttcagcaatggttgtctgaagactcaggagcatttacggatttaacttcccttcccctctatcttcctcagactctagtgtctctttctcacactattgaacctgtgatgaaaacatctgtaactactagcccacagagtgacatgatgagggagcaactgcagctgtcagaggcgacaggaacgtgtctaggcgaacgactaaagcacctggaaaggctgatccggagttcaagggaagaggaagttgcctctgagctccatctctctgcgctgctagacatggtggacatttgagcagcctgacctgtggggagggggtctctcccgaagagtttctgtttttactcaaaataatgttattctcagatgcttgatgcactgttggaaatgtgattaatttaatcatgcagataaaccatttaaatgtcagtctcccagtttttcataatgaaaagttgtttcccctgtgtgacctcttcaatattctcctatattcatgacctcctcagattgtcacccaccagcatatgctctgaggcagtttagagcttacatttccatgtataaaaggcgattcattctctcagcaaacttgcagtccttgatgtgccagacatcagtgatgcagagataaagtaagacacagggcctctgcctgctaagcccacccagcttacatccaggagagtcaggtacttatgtacataattctcagagaatgtgcatgaggcgtgggcctgaattggtagcaaggaaaaaacagaggatggaacagggtctggttgggtagaggagaaacagaattcccggagaggagtgcaggggtgtagctggagacagtgtacttgagaggacatgatgaaagcgtggaggtaccagcttggttgtgtggccaggtgaggggaacaggccagcagggtgaggtcagagattcttgtcaccttcttctgagagctgtgagaacccgttgttgaagattaggcagagaagtgatctggtcacattttcttttaagaatggcatgtagggcaggaatcttgagaggtgggtgctgcagccatccaggtgaaattcaaagggaataagcgtgagtttgttagcaattggtgtgaagagaggggataaaatttgagccatatacagaaagaggtattaatagacttggtgatgttgcgtatgaccaccaatcttaaactggcactcagcatctcctgactgtaatcctacat

SEQ ID NO: 28835 - protein, 612 aa, Homo sapiens
MLLFRDCEEATDFLTCHGLTVSDGCVELNRSAFLEPEGLSKTRKSVFITRKLTVSVGEIVNGGPLPPVPRHTPVCSFNSQNKYIGESLAAELPVSTQRPGSDTVGGGRGEECGVEPDAPLSSLPQSLPAPAPSPVPLPPVLALTPSVAPSLFQLSVQPEPPPPEPVPMYSDEDLAQVVDELIQEALQRDCEEVGSAGAAYAAAALGVSNAAMEDLLTAATTGILRHIAAEEVSKERERREQERQRAEEERLKQERELVLSELSQGLAVELMERVMMEFVRETCSQELKNAVETDQRVRVARCCEDVCAHLVDLFLVEEIFQTAKETLQELQCFCKYLQRWREAVTARKKLRRQMRAFPAAPCCVDVSDRLRALAPSAECPIAEENLARGLLDLGHAGRLGISCTRLRRLRNKTAHQMKVQHFYQQLLSDVAWASLDLPSLVAEHLPGRQEHVFWKLVLVLPDVEEQSPESCGRILANWLKVKFMGDEGSVDDTSSDAGGIQTLSLFNSLSSKGDQMISVNVCIKVAHGALSDGAIDAVETQKDLLGASGLMLLLPPKMKSEDMAEEDVYWLSALLQLKQLLQAKPFQPALPLVVLVPSPGGDAVEKEVEDGL

SEQ ID NO: 28836 - DNA, 6914 bp, Homo sapiens
taatacttaattaccttctaataattggagcagaagatgaacccaactaatcctttcagtgggcagcagcctagtgctttttcggcgtcttctagtaatgtaggaacacttccatctaagccgccatttcgatttggtcaaccttctctttttggacaaaacagtaccttatctgggaagagctcgggattttcacaggtatccagctttccagcgtcttctggagtaagtcattcctcttcagtgcaaacattagggttcacccaaacctcaagtgttggacccttttctggacttgagcacacttccacctttgtggctacctctgggccttcaagttcatctgtgctgggaaacacaggatttagttttaaatcacccaccagtgttggggctttcccaagcacttctgcttttggacaagaagctggagaaatagtgaactctggttttgggaaaacagaattcagctttaaacctctggaaaatgcagtgttcaaaccaatactgggggctgaatctgagccagagaaaacccagagccaaattgcttctgggttttttacattttcccacccaattagtagtgcacctggaggcctggcccctttctcttttcctcaagtaacaagtagttcagctaccacttcaaattttaccttttcaaaacctgttagtagtaataattcattatctgcctttacccctgctttgtcaaaccaaaatgtagaggaagagaagagaggacctaagtcaatatttggaagttctaataatagcttcagtagcttccctgtatcatctgcggttttgggcgaacctttccaggctagcaaagcaggtgtcaggcaggggtgtgaagaagctgtttcccaggtggaaccacttcccagcctaatgaaaggactgaaaaggaaggaggaccaggatcgctccccaaggagacatggccacgagccagcagaagattcggatcctctgtcccggggcgatcatcctccagacaaacgacctgtccgcctgaatcgaccccggggaggtactttatttggtcggacgatacaggatgttttcaaaagcaataaggaagtaggtcgtctgggcaacaaggaggccaaaaaggaaactggctttgttgagtctgcagaaagtgaccacatggctatcccaggagggaatcagtctgtcctggcaccttcccggattccaggtgtgaataaagaggaagaaactgaaagtagagagaagaaagaagattctctaagaggaactccggcgcgtcagagtaacagaagcgagagcacagacagtcttgggggcttgtctccctctgaagtcacagccatccagtgcaagaacatccctgactacctcaacgacaggaccattctggagaaccattttggcaaaattgctaaagtgcagcgcatctttaccaggcgcagcaaaaagcttgcagtggtacatttctttgatcatgcatctgcagccctggctagaaagaaggggaaaagtttgcataaagacatggctatcttttggcacaggaagaaaataagccccaataagaaacccttttccctgaaggagaagaaaccaggtgacggtgaagtcagcccgagcacagaggatgcaccctttcagcactctcctcttggcaaggccgcagggaggactggtgctagcagcctcctgaataaaagctctccagtgaagaagccaagtcttctaaaggcccaccaattcgagggagactcttttgactcagcctccgagggctccgagggcctcgggccatgtgtgctctccctcagtaccctgataggcactgtggctgagacatccaaggagaagtaccgcctgcttgaccagagagacaggatcatgcggcaagctcgggtgaagagaaccgatctggacaaagcgaggacttttgttggcacctgcctggatatgtgtcctgagaaggagaggtacatgcgggagacccgtagccagctgagcgtgttcgaagtggtcccagggactgaccaggtggaccacgcagcagctgtgaaagagtacagtcggtcctcggcggatcaggaggagcccctgccccacgagctgcggcccttgccagtgctcagcaggaccatggactacctggtgacccagatcatggaccagaaggagggcagcctgcgggattggtatgacttcgtgtggaaccgcacgcgtggcatacggaaggatatcacgcagcagcacctctgtgaccccctgacggtgtccctgattgagaagtgcacccggtttcacatccactgtgcccacttcatgtgtgaggagcccatgtcctcctttgatgccaagatcaataatgagaacatgaccaagtgcctgcagagcctgaaggagatgtaccaggacctgagaaacaagggtgtcttctgtgccagcgaagcggagttccagggctacaatgttctgctcagtctcaacaagggagacatcctaagagaagtacaacagttccatcctgctgttagaaactcatctgaggtgaaatttgctgttcaggcttttgctgcattgaacagtaataattttgtgagatttttcaaactggtccagtcagcttcttacctgaacgcttgtcttttacactgttacttcagtcagatccgcaaggatgctctccgggcgctcaactttgcgtacacggtgagcacacagcgatctaccatctttcccctggatggtgtggtgcgcatgctgctgttcagagactgtgaagaggccaccgacttcctcacctgccacggcctcaccgtttccgacggctgtgtggagctgaaccggtctgcattcctggaaccagagggattatccaagaccaggaagtcggtgtttattactaggaagctgacggtgtcagtcggggaaattgtgaacggagggccattgccccccgtccctcgtcatacccctgtgtgcagcttcaactcccagaacaagtacatcggggagagcctggccgcggagctgcccgtcagcacccagagacccggctccgacacagtgggcggagggagaggagaggagtgtggtgtagagccggatgcacccctgtccagtctcccacagtctctaccagcccctgcgccctcaccagtgcctctgcctcctgtcctggcactgaccccgtctgtggcgcccagcctcttccagctgtctgtgcagcctgaaccaccgcctccagagcccgtgcccatgtactctgacgaggacctggcgcaggtggtggacgagctcatccaggaggccctgcagagggactgtgaggaagttggctctgcgggtgctgcctacgcagctgccgccctgggtgtttctaatgctgctatggaggatttgttaacagctgcaaccacgggcattttgaggcacattgcagctgaagaagtgtctaaggaaagagagcgaagggagcaggagaggcagcgggctgaagaggaaaggttgaaacaagagagagagctggtgttaagtgagctgagccagggcctggccgtggagctgatggaacgcgtgatgatggagtttgtgagggaaacctgctcccaggagttgaagaatgcagtagagacagaccagagggtccgtgtggcccgttgctgtgaggatgtctgtgcccacttagtggacttgtttctcgtggaggaaatcttccagactgcaaaggagaccctccaggagcttcagtgcttctgcaagtatctacagcggtggagggaagctgtcacagcccgcaagaaactgaggcgccaaatgcgggctttccctgctgcgccctgctgcgtggacgtgagcgaccggctgagggcgctggcgcccagcgcagagtgccccattgctgaagagaacctggccaggggcctcctggacctgggccatgcagggagattgggcatctcctgcaccaggttaaggcggctcagaaacaagacagctcaccagatgaaggttcagcacttctaccagcagctgctgagtgatgtggcatgggcgtctctggacctgccatccctcgtggctgagcacctccctgggaggcaggagcatgtgttttggaagctggtgctggtgttgccggatgtagaggagcagtccccagagagttgtggcagaattctagcaaattggttaaaagtcaagttcatgggagatgaaggctcagtggatgacacatccagcgatgctggtgggattcagacgctttcgcttttcaactcacttagcagcaaaggggatcagatgatttctgttaacgtgtgtataaaggtggcccatggcgccctcagtgatggtgccattgatgctgtggagacacagaaggacctcctgggagccagtgggctcatgctgctgcttccccccaaaatgaagagtgaggacatggcagaggaggacgtgtactggctgtcggccttgctgcagctcaagcagctcctgcaggctaagcccttccagcctgcgcttcctctggtggttcttgtgcctagcccaggaggggacgccgttgagaaggaagtagaagatggtctgatgctacaggacttggtttcagctaagctgatttcagattacactgttaccgagatccctgataccattaatgatctacaaggttcaactaaggttttgcaagcagtgcagtggctggtttcccactgcccccattcccttgacctctgctgccagactctcattcagtacgtcgaagacgggattggccatgagtttagtggccgctttttccatgacagaagagagaggcgtctgggcggtcttgcttctcaggagcctggcgccatcattgagctgtttaacagtgtgctgcagttcctggcttctgtggtgtcctctgaacagctgtgtgacctgtcctggcctgtcactgagtttgctgaggcagggggcagccggctgcttcctcacctgcactggaatgccccagagcacctggcctggctgaagcaggctgtgctcgggttccagcttccgcagatggaccttccacccctgggggccccctggctccccgtgtgctccatggttgtccagtacgcctcccagatccccagctcacgccagacacagcctgtcctccagtcccaggtggagaacctgctccacagaacctactgtaggtggaagagcaagagtccctccccagtccatggggcaggcccctcggtcatggagatcccatgggatgatcttatcgccttgtgtatcaaccacaagctgagagactggacgcccccccggcttcctgttacatcagaggcgctgagtgaagatggtcagatatgtgtgtatttttttaaaaacgatttgaaaaaatatgatgttcctttgtcgtgggaacaagccaggttgcagacgcagaaggagctacagctgagagagggacgtttggcaataaagccttttcatccttctgcaaacaattttcccataccattgcttcacatgcaccgtaactggaagaggagcacagagtgtgctcaagaggggaggattcccagcacagaggatctgatgcgaggagcttctgctgaggagctcttggcgcagtgtttgtcgagcagtctgctgctggagaaagaagagaacaagaggtttgaagatcagcttcagcaatggttgtctgaagactcaggagcatttacggatttaacttcccttcccctctatcttcctcagactctagtgtctctttctcacactattgaacctgtgatgaaaacatctgtaactactagcccacagagtgacatgatgagggagcaactgcagctgtcagaggcgacaggaacgtgtctaggcgaacgactaaagcacctggaaaggctgatccggagttcaagggaagaggaagttgcctctgagctccatctctctgcgctgctagacatggtggacatttgagcagcctgacctgtggggagggggtctctcccgaagagtttctgtttttactcaaaataatgttattctcagatgcttgatgcactgttggaaatgtgattaatttaatcatgcagataaaccatttaaatgtcagtctcccagtttttcataatgaaaagttgtttcccctgtgtgacctcttcaatattctcctatattcatgacctcctcagattgtcacccaccagcatatgctctgaggcagtttagagcttacatttccatgtataaaaggcgattcattctctcagcaaacttgcagtccttgatgtgccagacatcagtgatgcagagataaagtaagacacagggcctctgcctgctaagcccacccagcttacatccaggagagtcaggtacttatgtacataattctcagagaatgtgcatgaggcgtgggcctgaattggtagcaaggaaaaaacagaggatggaacagggtctggttgggtagaggagaaacagaattcccggagaggagtgcaggggtgtagctggagacagtgtacttgagaggacatgatgaaagcgtggaggtaccagcttggttgtgtggccaggtgaggggaacaggccagcagggtgaggtcagagattcttgtcaccttcttctgagagctgtgagaacccgttgttgaagattaggcagagaagtgatctggtcacattttcttttaagaatggcatgtagggcaggaatcttgagaggtgggtgctgcagccatccaggtgaaattcaaagggaataagcgtgagtttgttagcaattggtgtgaagagaggggataaaatttgagccatatacagaaagaggtattaatagacttggtgatgttgcgtatgaccaccaatcttaaactggcactcagcatctcctgactgtaatcctacat

SEQ ID NO: 28837 - protein, 1980 aa, Homo sapiens; identical to SEQ ID NO: 3977

SEQ ID NO: 28838 - DNA, 2805 bp, Homo sapiens
aagctctgcctcccggcttcacgtcattctcctgcttcagcctcccgagtagctgggactacaggcgcccgccaccacaccaggctaatttttttgtatttttagtagagacagggtttcaccatgttagccaggatggtctggatctcttgacctcatgatccacccgcttcggccttccaaagtgctgggattacaggcgtgagccaccgcgcctgactgactcttgcacttttcaagcaagccctcagtgtctgtgggccccaagtgcagtgtcttccatgctgattgccctgtttctaggaatgcagtagagacagaccagagggtccgtgtggcccgttgctgtgaggatgtctgtgcccacttagtggacttgtttctcgtggaggaaatcttccagactgcaaaggagaccctccaggagcttcagtgcttctgcaagtatctacagcggtggagggaagctgtcacagcccgcaagaaactgaggcgccaaatgcgggctttccctgctgcgccctgctgcgtggacgtgagcgaccggctgagggcgctggcgcccagcgcagagtgccccattgctgaagagaacctggccaggggcctcctggacctgggccatgcagggagattgggcatctcctgcaccaggttaaggcggctcagaaacaagacagctcaccagatgaaggttcagcacttctaccagcagctgctgagtgatgtggcatgggcgtctctggacctgccatccctcgtggctgagcacctccctgggaggcaggagcatgtgttttggaagctggtgctggtgttgccggatgtagaggagcagtccccagagagttgtggcagaattctagcaaattggttaaaagtcaagttcatgggagatgaaggctcagtggatgacacatccagcgatgctggtgggattcagacgctttcgcttttcaactcacttagcagcaaaggggatcagatgatttctgttaacgtgtgtataaaggtggcccatggcgccctcagtgatggtgccattgatgctgtggagacacagaaggacctcctgggagccagtgggctcatgctgctgcttccccccaaaatgaagagtgaggacatggcagaggaggacgtgtactggctgtcggccttgctgcagctcaagcagctcctgcaggctaagcccttccagcctgcgcttcctctggtggttcttgtgcctagcccaggaggggacgccgttgagaaggaagtagaagatggtctgatgctacaggacttggtttcagctaagctgatttcagattacactgttaccgagatccctgataccattaatgatctacaaggttcaactaaggttttgcaagcagtgcagtggctggtttcccactgcccccattcccttgacctctgctgccagactctcattcagtacgtcgaagacgggattggccatgagtttagtggccgctttttccatgacagaagagagaggcgtctgggcggtcttgcttctcaggagcctggcgccatcattgagctgtttaacagtgtgctgcagttcctggcttctgtggtgtcctctgaacagctgtgtgacctgtcctggcctgtcactgagtttgctgaggcagggggcagccggctgcttcctcacctgcactggaatgccccagagcacctggcctggctgaagcaggctgtgctcgggttccagcttccgcagatggaccttccacccctgggggccccctggctccccgtgtgctccatggttgtccagtacgcctcccagatccccagctcacgccagacacagcctgtcctccagtcccaggtggagaacctgctccacagaacctactgtaggtggaagagcaagagtccctccccagtccatggggcaggcccctcggtcatggagatcccatgggatgatcttatcgccttgtgtatcaaccacaagctgagagactggacgcccccccggcttcctgttacatcagaggcgctgagtgaagatggtcagatatgtgtgtatttttttaaaaacgatttgaaaaaatatgatgttcctttgtcgtgggaacaagccaggttgcagacgcagaaggagctacagctgagagagggacgtttggcaataaagccttttcatccttctgcaaacaattttcccataccattgcttcacatgcaccgtaactggaagaggagcacagagtgtgctcaagaggggaggattcccagcacagaggatctgatgcgaggagcttctgctgaggagctcttggcgcagtgtttgtcgagcagtctgctgctggagaaagaagagaacaagaggtttgaagatcagcttcagcaatggttgtctgaagactcaggagcatttacggatttaacttcccttcccctctatcttcctcagactctagtgtctctttctcacactattgaacctgtgatgaaaacatctgtaactactagcccacagagtgacatgatgagggagcaactgcagctgtcagaggcgacaggaacgtgtctaggcgaacgactaaagcacctggaaaggctgatccggagttcaagggaagaggaagttgcctctgagctccatctctctgcgctgctagacatggtggacatttgagcagcctgacctgtggggagggggtctctcccgaagagtttctgtttttactcaaaataatgttattctcagatgcttgatgcactgttggaaatgtgattaatttaatcatgcagataaaccatttaaatgtcagtctc

SEQ ID NO: 28839 - protein, 721 aa, Homo sapiens; identical to SEQ ID NO: 28831

SEQ ID NO: 28840 - DNA, 4434 bp, Homo sapiens
tgatctctaagcttgggttccgtgttgccaaagcgccttctggtggactcagcccaggaggagcccatgtgccccacgctggccatggctgtggtcatgggctgactgcatgtgtctgactgggccttcgtctgagactgcagtgatttcgctcctcctctcagatccgcaaggatgctctccgggcgctcaactttgcgtacacggtgagcacacagcgatctaccatctttcccctggatggtgtggtgcgcatgctgctgttcagagactgtgaagaggccaccgacttcctcacctgccacggcctcaccgtttccgacgggtaagagctgagaatggaactgtggggcccctgtctccttttttcttgttaattctgatgaagggctgtgaagggctggctgcttgcctgacttgaagaaggtgcattccctctgccatgcaggtgaacacacgagactcagaatggctgggggtgttcccaaggtcacatcctggctgtcagcacattgagggctcagaccaagttctttgtgactccaaaatcagtccttttcatgacttgctgacaaacctaaagataaaagttagggccttctttattctttcccttgactgcctttgccagccaatgacggacaacctctgacggctgggatggaggcacccgcaggccagccggagtcttctccggtacttaccagtcagagtggtgagactcacagacgctctctcagaaactggcagcttacactcaacacccggtgcctagttccccaccctgtctcctctaactcctcacctgcctcctgcctgtctcctccttccagttctgtctccttctagttctgtctcctccttccagttctgtcctcagaaaattagacggttttgggtgagccagcaaggaggcaggagtgagtcagcgtgcgtctgttaacacgctgggcttagtggttctagggacctacagaggctccagggtgggcggcagtgggacctggcgcctgtgctttctgttatttacacatggctgtggtgacacccaaggggcttgcagtactcggcagggcactgagggcgaagctgtcttctcccctggtgacacccctcgggggtcttttgtggtctgggtagctgtgtggagctgaaccggtctgcattcctggaaccagagggattatccaagaccaggaagtcggtgtttattactaggaagctgacggtgtcagtcggggaaattgtgaacggagggccattgccccccgtccctcgtcatacccctgtgtgcagcttcaactcccagaacaagtacatcggggagagcctggccgcggagctgcccgtcagcacccagagacccggctccgacacagtgggcggagggagaggagaggagtgtggtgtagagccggatgcacccctgtccagtctcccacagtctctaccagcccctgcgccctcaccagtgcctctgcctcctgtcctggcactgaccccgtctgtggcgcccagcctcttccagctgtctgtgcagcctgaaccaccgcctccagagcccgtgcccatgtactctgacgaggacctggcgcaggtggtggacgagctcatccaggaggccctgcagagggactgtgaggaagttggctctgcgggtgctgcctacgcagctgccgccctgggtgtttctaatgctgctatggaggatttgttaacagctgcaaccacgggcattttgaggcacattgcagctgaagaagtgtctaaggaaagagagcgaagggagcaggagaggcagcgggctgaagaggaaaggttgaaacaagagagagagctggtgttaagtgagctgagccagggcctggccgtggagctgatggaacgcgtgatgatggagtttgtgagggaaacctgctcccaggagttgaagaatgcagtagagacagaccagagggtccgtgtggcccgttgctgtgaggatgtctgtgcccacttagtggacttgtttctcgtggaggaaatcttccagactgcaaaggagaccctccaggagcttcagtgcttctgcaagtatctacagcggtggagggaagctgtcacagcccgcaagaaactgaggcgccaaatgcgggctttccctgctgcgccctgctgcgtggacgtgagcgaccggctgagggcgctggcgcccagcgcagagtgccccattgctgaagagaacctggccaggggcctcctggacctgggccatgcagggagattgggcatctcctgcaccaggttaaggcggctcagaaacaagacagctcaccagatgaaggttcagcacttctaccagcagctgctgagtgatgtggcatgggcgtctctggacctgccatccctcgtggctgagcacctccctgggaggcaggagcatgtgttttggaagctggtgctggtgttgccggatgtagaggagcagtccccagagagttgtggcagaattctagcaaattggttaaaagtcaagttcatgggagatgaaggctcagtggatgacacatccagcgatgctggtgggattcagacgctttcgcttttcaactcacttagcagcaaaggggatcagatgatttctgttaacgtgtgtataaaggtggcccatggcgccctcagtgatggtgccattgatgctgtggagacacagaaggacctcctgggagccagtgggctcatgctgctgcttccccccaaaatgaagagtgaggacatggcagaggaggacgtgtactggctgtcggccttgctgcagctcaagcagctcctgcaggctaagcccttccagcctgcgcttcctctggtggttcttgtgcctagcccaggaggggacgccgttgagaaggaagtagaagatggtctgatgctacaggacttggtttcagctaagctgatttcagattacactgttaccgagatccctgataccattaatgatctacaaggttcaactaaggttttgcaagcagtgcagtggctggtttcccactgcccccattcccttgacctctgctgccagactctcattcagtacgtcgaagacgggattggccatgagtttagtggccgctttttccatgacagaagagagaggcgtctgggcggtcttgcttctcaggagcctggcgccatcattgagctgtttaacagtgtgctgcagttcctggcttctgtggtgtcctctgaacagctgtgtgacctgtcctggcctgtcactgagtttgctgaggcagggggcagccggctgcttcctcacctgcactggaatgccccagagcacctggcctggctgaagcaggctgtgctcgggttccagcttccgcagatggaccttccacccctgggggccccctggctccccgtgtgctccatggttgtccagtacgcctcccagatccccagctcacgccagacacagcctgtcctccagtcccaggtggagaacctgctccacagaacctactgtaggtggaagagcaagagtccctccccagtccatggggcaggcccctcggtcatggagatcccatgggatgatcttatcgccttgtgtatcaaccacaagctgagagactggacgcccccccggcttcctgttacatcagaggcgctgagtgaagatggtcagatatgtgtgtatttttttaaaaacgatttgaaaaaatatgatgttcctttgtcgtgggaacaagccaggttgcagacgcagaaggagctacagctgagagagggacgtttggcaataaagccttttcatccttctgcaaacaattttcccataccattgcttcacatgcaccgtaactggaagaggagcacagagtgtgctcaagaggggaggattcccagcacagaggatctgatgcgaggagcttctgctgaggagctcttggcgcagtgtttgtcgagcagtctgctgctggagaaagaagagaacaagaggtttgaagatcagcttcagcaatggttgtctgaagactcaggagcatttacggatttaacttcccttcccctctatcttcctcagactctagtgtctctttctcacactattgaacctgtgatgaaaacatctgtaactactagcccacagagtgacatgatgagggagcaactgcagctgtcagaggcgacaggaacgtgtctaggcgaacgactaaagcacctggaaaggctgatccggagttcaagggaagaggaagttgcctctgagctccatctctctgcgctgctagacatggtggacatttgagcagcctgacctgtggggagggggtctctcccgaagagtttctgtttttactcaaaataatgttattctcagatgcttgatgcactgttggaaatgtgattaatttaatcatgcagataaaccatttaaatgtcagtctc

SEQ ID NO: 28841 - protein, 907 aa, Homo sapiens [sequence omitted]

SEQ ID NO: 28842 - DNA, 4598 bp, Homo sapiens
accacacccagctaatttttgtatttttagtagagatggggtttcaccatgttggccaggctggtctcaaactcctggcttcaagtgacccgcctgccttggcctcccaaagtgctgggattacaggcgtgagccaccacacccagccccattgtcttttttttaagacactggttctcactctgtcacctaggctggagtgcagtggtgtgatcaaggcttactgcagcctcaacctcttgggctcaagcagtcctcccactttagcctcccatgttgctgggaccacaggtgcatgccaccaagccccactaattaaaacaaatttttttttatagagaataggatgtagctatgttgcccaggctggtcttgaattcctgggctcaagtgatcctcccaccttggcctcccaaagtgctgggattacaggtatgagctactgcacctggtctctgtcttctttttttttttttaaggctcttgttagaatgccgtgaacagttgtctccaactattatatgtcattccacgggattggtttcctgctggcattccatggtctccggggtcctctgcagcaccttcctggccttttgtcatgtggatgctgcacagctgacttcacctggtcttgttgatggacagtttgtttcatgatttctcttatgaataaaaccttcacaagccatccttctctatgagagtgtttgcttggcacgcattcctgagcactgcccctgagcagaccgcctatgatctctaagcttgggttccgtgttgccaaagcgccttctggtggactcagcccaggaggagcccatgtgccccacgctggccatggctgtggtcatgggctgactgcatgtgtctgactgggccttcgtctgagactgcagtgatttcgctcctcctctcagatccgcaaggatgctctccgggcgctcaactttgcgtacacggtgagcacacagcgatctaccatctttcccctggatggtgtggtgcgcatgctgctgttcagagactgtgaagaggccaccgacttcctcacctgccacggcctcaccgtttccgacggctgtgtggagctgaaccggtctgcattcctggaaccagagggattatccaagaccaggaagtcggtgtttattactaggaagctgacggtgtcagtcggggaaattgtgaacggagggccattgccccccgtccctcgtcatacccctgtgtgcagcttcaactcccagaacaagtacatcggggagagcctggccgcggagctgcccgtcagcacccagagacccggctccgacacagtgggcggagggagaggagaggagtgtggtgtagagccggatgcacccctgtccagtctcccacagtctctaccagcccctgcgccctcaccagtgcctctgcctcctgtcctggcactgaccccgtctgtggcgcccagcctcttccagctgtctgtgcagcctgaaccaccgcctccagagcccgtgcccatgtactctgacgaggacctggcgcaggtggtggacgagctcatccaggaggccctgcagagggactgtgaggaagttggctctgcgggtgctgcctacgcagctgccgccctgggtgtttctaatgctgctatggaggatttgttaacagctgcaaccacgggcattttgaggcacattgcagctgaagaagtgtctaaggaaagagagcgaagggagcaggagaggcagcgggctgaagaggaaaggttgaaacaagagagagagctggtgttaagtgagctgagccagggcctggccgtggagctgatggaacgcgtgatgatggagtttgtgagggaaacctgctcccaggagttgaagaatgcagtagagacagaccagagggtccgtgtggcccgttgctgtgaggatgtctgtgcccacttagtggacttgtttctcgtggaggaaatcttccagactgcaaaggagaccctccaggagcttcagtgcttctgcaagtatctacagcggtggagggaagctgtcacagcccgcaagaaactgaggcgccaaatgcgggctttccctgctgcgccctgctgcgtggacgtgagcgaccggctgagggcgctggcgcccagcgcagagtgccccattgctgaagagaacctggccaggggcctcctggacctgggccatgcagggagattgggcatctcctgcaccaggttaaggcggctcagaaacaagacagctcaccagatgaaggttcagcacttctaccagcagctgctgagtgatgtggcatgggcgtctctggacctgccatccctcgtggctgagcacctccctgggaggcaggagcatgtgttttggaagctggtgctggtgttgccggatgtagaggagcagtccccagagagttgtggcagaattctagcaaattggttaaaagtcaagttcatgggagatgaaggctcagtggatgacacatccagcgatgctggtgggattcagacgctttcgcttttcaactcacttagcagcaaaggggatcagatgatttctgttaacgtgtgtataaaggtggcccatggcgccctcagtgatggtgccattgatgctgtggagacacagaaggacctcctgggagccagtgggctcatgctgctgcttccccccaaaatgaagagtgaggacatggcagaggaggacgtgtactggctgtcggccttgctgcagctcaagcagctcctgcaggctaagcccttccagcctgcgcttcctctggtggttcttgtgcctagcccaggaggggacgccgttgagaaggaagtagaagatggtttgtgaaggaagtctcgtttatgaagcagcattgtttaataaatgggtggaggccctgggtctgaggatggtccagtagtgttggggtcaggaatcactgagacagcaacccctgtggtgactgtccactgcaggactgggtggggtcagcacagtgagatatgttagcaggtgtgctgacagcagaatgcaagtgaccttcatctatgtctgtcttaaaggtctgatgctacaggacttggtttcagctaagctgatttcagattacactgttaccgagatccctgataccattaatgatctacaaggttcaactaaggttttgcaagcagtgcagtggctggtttcccactgcccccattcccttgacctctgctgccagactctcattcagtacgtcgaagacgggattggccatgagtttagtggccgctttttccatgacagaagagagaggcgtctgggcggtcttgcttctcaggagcctggcgccatcattgagctgtttaacagtgtgctgcagttcctggcttctgtggtgtcctctgaacagctgtgtgacctgtcctggcctgtcactgagtttgctgaggcagggggcagccggctgcttcctcacctgcactggaatgccccagagcacctggcctggctgaagcaggctgtgctcgggttccagcttccgcagatggaccttccacccctgggggccccctggctccccgtgtgctccatggttgtccagtacgcctcccagatccccagctcacgccagacacagcctgtcctccagtcccaggtggagaacctgctccacagaacctactgtaggtggaagagcaagagtccctccccagtccatggggcaggcccctcggtcatggagatcccatgggatgatcttatcgccttgtgtatcaaccacaagctgagagactggacgcccccccggcttcctgttacatcagaggcgctgagtgaagatggtcagatatgtgtgtatttttttaaaaacgatttgaaaaaatatgatgttcctttgtcgtgggaacaagccaggttgcagacgcagaaggagctacagctgagagagggacgtttggcaataaagccttttcatccttctgcaaacaattttcccataccattgcttcacatgcaccgtaactggaagaggagcacagagtgtgctcaagaggggaggattcccagcacagaggatctgatgcgaggagcttctgctgaggagctcttggcgcagtgtttgtcgagcagtctgctgctggagaaagaagagaacaagaggtttgaagatcagcttcagcaatggttgtctgaagactcaggagcatttacggatttaacttcccttcccctctatcttcctcagactctagtgtctctttctcacactattgaacctgtgatgaaaacatctgtaactactagcccacagagtgacatgatgagggagcaactgcagctgtcagaggcgacaggaacgtgtctaggcgaacgactaaagcacctggaaaggctgatccggagttcaagggaagaggaagttgcctctgagctccatctctctgcgctgctagacatggtggacatttgagcagcctgacctgtggggagggggtctctcccgaagagtttctgtttttactcaaaataatgttattctcagatgcttgatgcactgttggaaatgtgattaatttaatcatgcagataaaccatttaaatgtcagtctc

SEQ ID NO: 28843 - protein, 612 aa, Homo sapiens; identical to SEQ ID NO: 28835

SEQ ID NO: 28844 - DNA, 6119 bp, Homo sapiens
taatacttaattaccttctaataattggagcagaagatgaacccaactaatcctttcagtgggcagcagcctagtgctttttcggcgtcttctagtaatgtaggaacacttccatctaagccgccatttcgatttggtcaaccttctctttttggacaaaacagtaccttatctgggaagagctcgggattttcacaggtatccagctttccagcgtcttctggagtaagtcattcctcttcagtgcaaacattagggttcacccaaacctcaagtgttggacccttttctggacttgagcacacttccacctttgtggctacctctgggccttcaagttcatctgtgctgggaaacacaggatttagttttaaatcacccaccagtgttggggctttcccaagcacttctgcttttggacaagaagctggagaaatagtgaactctggttttgggaaaacagaattcagctttaaacctctggaaaatgcagtgttcaaaccaatactgggggctgaatctgagccagagaaaacccagagccaaattgcttctgggttttttacattttcccacccaattagtagtgcacctggaggcctggcccctttctcttttcctcaagtaacaagtagttcagctaccacttcaaattttaccttttcaaaacctgttagtagtaataattcattatctgcctttacccctgctttgtcaaaccaaaatgtagaggaagagaagagaggacctaagtcaatatttggaagttctaataatagcttcagtagcttccctgtatcatctgcggttttgggcgaacctttccaggctagcaaagcaggtgtcaggcaggggtgtgaagaagctgtttcccaggtggaaccacttcccagcctaatgaaaggactgaaaaggaaggaggaccaggatcgctccccaaggagacatggccacgagccagcagaagattcggatcctctgtcccggggcgatcatcctccagacaaacgacctgtccgcctgaatcgaccccggggaggtactttatttggtcggacgatacaggatgttttcaaaagcaataaggaagtaggtcgtctgggcaacaaggaggccaaaaaggaaactggctttgttgagtctgcagaaagtgaccacatggctatcccaggagggaatcagtctgtcctggcaccttcccggattccaggtgtgaataaagaggaagaaactgaaagtagagagaagaaagaagattctctaagaggaactccggcgcgtcagagtaacagaagcgagagcacagacagtcttgggggcttgtctccctctgaagtcacagccatccagtgcaagaacatccctgactacctcaacgacaggaccattctggagaaccattttggcaaaattgctaaagtgcagcgcatctttaccaggcgcagcaaaaagcttgcagtggtacatttctttgatcatgcatctgcagccctggctagaaagaaggggaaaagtttgcataaagacatggctatcttttggcacaggaagaaaataagccccaataagaaacccttttccctgaaggagaagaaaccaggtgacggtgaagtcagcccgagcacagaggatgcaccctttcagcactctcctcttggcaaggccgcagggaggactggtgctagcagcctcctgaataaaagctctccagtgaagaagccaagtcttctaaaggcccaccaattcgagggagactcttttgactcagcctccgagggctccgagggcctcgggccatgtgtgctctccctcagtaccctgataggcactgtggctgagacatccaaggagaagtaccgcctgcttgaccagagagacaggatcatgcggcaagctcgggtgaagagaaccgatctggacaaagcgaggacttttgttggcacctgcctggatatgtgtcctgagaaggagaggtacatgcgggagacccgtagccagctgagcgtgttcgaagtggtcccagggactgaccaggtggaccacgcagcagctgtgaaagagtacagtcggtcctcggcggatcaggaggagcccctgccccacgagctgcggcccttgccagtgctcagcaggaccatggactacctggtgacccagatcatggaccagaaggagggcagcctgcgggattggtatgacttcgtgtggaaccgcacgcgtggcatacggaaggatatcacgcagcagcacctctgtgaccccctgacggtgtccctgattgagaagtgcacccggtttcacatccactgtgcccacttcatgtgtgaggagcccatgtcctcctttgatgccaagatcaataatgagaacatgaccaagtgcctgcagagcctgaaggagatgtaccaggacctgagaaacaagggtgtcttctgtgccagcgaagcggagttccagggctacaatgttctgctcagtctcaacaagggagacatcctaagagaagtacaacagttccatcctgctgttagaaactcatctgaggtgaaatttgctgttcaggcttttgctgcattgaacagtaataattttgtgagatttttcaaactggtccagtcagcttcttacctgaacgcttgtcttttacactgttacttcagtcagatccgcaaggatgctctccgggcgctcaactttgcgtacacggtgagcacacagcgatctaccatctttcccctggatggtgtggtgcgcatgctgctgttcagagactgtgaagaggccaccgacttcctcacctgccacggcctcaccgtttccgacggctgtgtggagctgaaccggtctgcattcctggaaccagagggattatccaagaccaggaagtcggtgtttattactaggaagctgacggtgtcagtcggggaaattgtgaacggagggccattgccccccgtccctcgtcatacccctgtgtgcagcttcaactcccagaacaagtacatcggggagagcctggccgcggagctgcccgtcagcacccagagacccggctccgacacagtgggcggagggagaggagaggagtgtggtgtagagccggatgcacccctgtccagtctcccacagtctctaccagcccctgcgccctcaccagtgcctctgcctcctgtcctggcactgaccccgtctgtggcgcccagcctcttccagctgtctgtgcagcctgaaccaccgcctccagagcccgtgcccatgtactctgacgaggacctggcgcaggtggtggacgagctcatccaggaggccctgcagagggactgtgaggaagttggctctgcgggtgctgcctacgcagctgccgccctgggtgtttctaatgctgctatggaggatttgttaacagctgcaaccacgggcattttgaggcacattgcagctgaagaagtgtctaaggaaagagagcgaagggagcaggagaggcagcgggctgaagaggaaaggttgaaacaagagagagagctggtgttaagtgagctgagccagggcctggccgtggagctgatggaacgcgtgatgatggagtttgtgagggaaacctgctcccaggagttgaagaatgcagtagagacagaccagagggtccgtgtggcccgttgctgtgaggatgtctgtgcccacttagtggacttgtttctcgtggaggaaatcttccagactgcaaaggagaccctccaggagcttcagtgcttctgcaagtatctacagcggtggagggaagctgtcacagcccgcaagaaactgaggcgccaaatgcgggctttccctgctgcgccctgctgcgtggacgtgagcgaccggctgagggcgctggcgcccagcgcagagtgccccattgctgaagagaacctggccaggggcctcctggacctgggccatgcagggagattgggcatctcctgcaccaggttaaggcggctcagaaacaagacagctcaccagatgaaggttcagcacttctaccagcagctgctgagtgatgtggcatgggcgtctctggacctgccatccctcgtggctgagcacctccctgggaggcaggagcatgtgttttggaagctggtgctggtgttgccggatgtagaggagcagtccccagagagttgtggcagaattctagcaaattggttaaaagtcaagttcatgggagatgaaggctcagtggatgacacatccagcgatgctggtgggattcagacgctttcgcttttcaactcacttagcagcaaaggggatcagatgatttctgttaacgtgtgtataaaggtggcccatggcgccctcagtgatggtgccattgatgctgtggagacacagaaggacctcctgggagccagtgggctcatgctgctgcttccccccaaaatgaagagtgaggacatggcagaggaggacgtgtactggctgtcggccttgctgcagctcaagcagctcctgcaggctaagcccttccagcctgcgcttcctctggtggttcttgtgcctagcccaggaggggacgccgttgagaaggaagtagaagatggtctgatgctacaggacttggtttcagctaagctgatttcagattacactgttaccgagatccctgataccattaatgatctacaaggttcaactaaggttttgcaagcagtgcagtggctggtttcccactgcccccattcccttgacctctgctgccagactctcattcagtacgtcgaagacgggattggccatgagtttagtggccgctttttccatgacagaagagagaggcgtctgggcggtcttgcttctcaggagcctggcgccatcattgagctgtttaacagtgtgctgcagttcctggcttctgtggtgtcctctgaacagctgtgtgacctgtcctggcctgtcactgagtttgctgaggcagggggcagccggctgcttcctcacctgcactggaatgccccagagcacctggcctggctgaagcaggctgtgctcgggttccagcttccgcagatggaccttccacccctgggggccccctggctccccgtgtgctccatggttgtccagtacgcctcccagatccccagctcacgccagacacagcctgtcctccagtcccaggtggagaacctgctccacagaacctactgtaggtggaagagcaagagtccctccccagtccatggggcaggcccctcggtcatggagatcccatgggatgatcttatcgccttgtgtatcaaccacaagctgagagactggacgcccccccggcttcctgttacatcagaggcgctgagtgaagatggtcagatatgtgtgtatttttttaaaaacgatttgaaaaaatatgatgttcctttgtcgtgggaacaagccaggttgcagacgcagaaggagctacagctgagagagggacgtttggcaataaagccttttcatccttctgcaaacaattttcccataccattgcttcacatgcaccgtaactggaagaggagcacagagtgtgctcaagaggggaggattcccagcacagaggatctgatgcgaggagcttctgctgaggagctcttggcgcagtgtttgtcgagcagtctgctgctggagaaagaagagaacaagaggtttgaagatcagcttcagcaatggttgtctgaagactcaggagcatttacggatttaacttcccttcccctctatcttcctcagactctagtgtctctttctcacactattgaacctgtgatgaaaacatctgtaactactagcccacagagtgacatgatgagggagcaactgcagctgtcagaggcgacaggaacgtgtctaggcgaacgactaaagcacctggaaaggctgatccggagttcaagggaagaggaagttgcctctgagctccatctctctgcgctgctagacatggtggacatttgagcagcctgacctgtggggagggggtctctcccgaagagtttctgtttttactcaaaataatgttattctcagatgcttgatgcactgttggaaatgtgattaatttaatcatgcagataaaccatttaaatgtcagtctc

SEQ ID NO: 28845 - protein, 1980 aa, Homo sapiens; identical to SEQ ID NO: 3977

SEQ ID NO: 28846 - DNA, 1677 bp, Homo sapiens
ggacttcctaaagccagtccaggagcacagtttttacctgttcagtggcacatatctgtgattgaaactctgtttttgcatctttaaccactgaaggaagaatgcagcagactgctcgacaaacactgcgccaagagctcctcagcagaagctcctcgcatcagatcctctgtgctgggaatcctcccctcttgagcacactctgtgctcctcttccagttacggtgcatgtgaagcaatggtatgggaaaattgtttgcagaaggatgaaaaggctttattgccaaactaaatcatctgatcccctttgctgctaagtgagttgaaaagcgaaagcgtctgaatcccaccagcatcgctggatgtgtcatccactgagccttcatctcccatgaacttgacttttaaccaatttgctagaattctacagatttaaaaaaaacaaaaaacaaaaaaaacacttgaagaatctaattctatatttgaattataaagactttcaggaaaagaagaaagaaaaatatcacacagacctaggtccacaaataccacatcttactatgaagctgatctgtaatcccagcaccttgggaggccaaggcaggtggatcgcttgagcccagtttgagaccagcctgggcaacatcacaaaaccctgtctctacaaaatatatacaaaactaagctgggcgtggtggtgtgcgcctgtaatcccagctacttgggaggctgaggcaggaaaattgcttgaacctgagaggtggaggttgcagtgaacaaagtgtaccacacgccagcctgggcgacagagtgagactccatctaaaaaaaaaaaaaagaatacaggctttctaagtgaaaaggtgttctggaattattaacagtgatggttgcaaaaccctgtgaatatatctaaaaatcactgaaatgtacactttaaatgggtgaagtttatggtatgtgaataacatttcaataaagctattttaaaaataaactgtaagccgggtgtggtggctcacgcctgtaatcccaaaactttggtagactgaagcatgcagattgcttgagcccaggagttcaagaccagcttgggcaacatagtgaaaccccatctttaaaaaaaaaacattaaccaggcatggtggcacacgcctgtagttccagctactcaggaggctgaggtgagaagatcagttgagcccaggaggtcaaggctgcggtgagctgttatcacaccactgccctctagcctgggtgacaacaaagcaagaccctgtctcaaaaaaacacagagactgtagttgctttaaaaatatgacttctgtatgctatgtggttacagaaaataagatcatgtcaattttttcttttttaaaatgccaaaagtttctttaaggggaaaaaaatggaactatagtaaacagactataaactatcttactgaagagtctaaaatgaagcaggtctatcaatgtaccttaacacagcttgaaataacaatcaactcttaaatgcttttggtctaagactgttgccaagtaatatggtttggatttgtgtccctacccaaatctcatgttgaactgtaatccccaatgttggaggaggggcctggtgggaagtgattgtatcatgggggtggaatccccctggctgttctcatgatagtgagct

SEQ ID NO: 28847 - protein, 71 aa, Homo sapiens
MQQTARQTLRQELLSRSSSHQILCAGNPPLLSTLCAPLPVTVHVKQWYGKIVCRRMKRLYCQTKSSDPLCC

SEQ ID NO: 28848 - DNA, 2014 bp, Homo sapiens
tcttactatgaagctgatctgcacaaaacaggctgttgttttaaaatggagcaacgatctgtactcgttcttttttttttttttttttttttgagccagggtctcgctctgtcgcccaagctagagtgcaatggcacaaacttggctcaccgcagcaagcaaacctgcctcagtagctgagactacaggcacgggccaccatgcccagctaatctttccattttttttgtagagtgtcactcaaagggtctcactatgttgctcatgctggcctcaaactcctgggctcaagcaatcctccctccacagcctgtaatcccagcaccttgggaggccaaggcaggtggatcgcttgagcccagtttgagaccagcctgggcaacatcacaaaaccctgtctctacaaaatatatacaaaactaagctgggcgtggtggtgtgcgcctgtaatcccagctacttgggaggctgaggcaggaaaattgcttgaacctgagaggtggaggttgcagtgaacaaagtgtaccacacgccagcctgggcgacagagtgagactccatctaaaaaaaaaaaaaagaatacaggctttctaagtgaaaaggtgttctggaattattaacagtgatggttgcaaaaccctgtgaatatatctaaaaatcactgaaatgtacactttaaatgggtgaagtttatggtatgtgaataacatttcaataaagctattttaaaaataaactgtaagccgggtgtggtggctcacgcctgtaatcccaaaactttggtagactgaagcatgcagattgcttgagcccaggagttcaagaccagcttgggcaacatagtgaaaccccatctttaaaaaaaaaacattaaccaggcatggtggcacacgcctgtagttccagctactcaggaggctgaggtgagaagatcagttgagcccaggaggtcaaggctgcggtgagctgttatcacaccactgccctctagcctgggtgacaacaaagcaagaccctgtctcaaaaaaacacagagactgtagttgctttaaaaatatgacttctgtatgctatgtggttacagaaaataagatcatgtcaattttttcttttttaaaatgccaaaagtttctttaaggggaaaaaaatggaactatagtaaacagactataaactatcttactgaagagtctaaaatgaagcaggtctatcaatgtaccttaacacagcttgaaataacaatcaactcttaaatgcttttggtctaagactgttgccaagtaatatggtttggatttgtgtccctacccaaatctcatgttgaactgtaatccccaatgttggaggaggggcctggtgggaagtgattgtatcatgggggtggaatccccctggctgttctcatgatagtgagctctcacgagatctggttaagtgtgtgacaactccccctcactgttctcatgatagtgagctctcacgagatctggttaagtgtgtgacaactccccttcgctgttgtcatgatagtgagctctcacgagatgtggttgtgtgacaactccccctcactgttctcatgatagtgagctctcaacaagatctggttaagtgtgtggcaactcaccctcgctgttctcatgatagtgagctctcaggagatctggttaagtgtgtggaaactcccccttgctgttctcatgaaagtgagcctcgcgagacctggttaagtgtgcagcacctcccccttgctgttctcattacagtgagctgtcacgagatctggttgtttagaagtgtgtggcacctcccactttgctgttctcatgatagtgagctctcacgagatctggttaagcatgtggcatctcccccttctctctctcttcctcctgctttggccatgtaagacatgcctccctccccttagccttccaccatgattgtgggtttcctgaggcctccccagccatgcttcctgtacagccgagccaattaaacctctttataaagt

SEQ ID NO: 28849 - protein, 55 aa, Homo sapiens
MLLMLASNSWAQAILPPQPVIPAPWEAKAGGSLEPSLRPAWATSQNPVSTKYIQN

SEQ ID NO: 28850 - DNA, 884 bp, Homo sapiens
acaacagttccatcctgctgttagaaactcatctgaggtgaaatttgctgttcaggcttttgctgcattgaacagtaataattttgtgagatttttcaaactggtccagtcagcttcttacctgaacgcttgtcttttacactgttacttcagtcaggtgagtaaatgagctgtgcttgcagagttggaagaaagcaggtggttcttgtgctgtttgggtgctttcttattccaagcttttcaaaggaggtctcaggctgatgctgtgtcacccttgcagcagccccacgaagggtcggttattttgttccacttccacggaacttggggatgaggacagagcagcccctgtagcacctgctgttctaggccctgcatgattccgttcagtgcaatgtgaccaggaccgcggcccaccgcacagagcgccacctcacctcgcacacactctgctgcccattctggcagcggctccaaggaggctgccaggattccttgccacaagcccgtagtggccacagcgtggggaggatgctgcctgggagatcctgggacctgccttggttgatctgtggctccaggtcatttctttggtcacacatcagggcctcctgtaaacagtgactaaacccacagtcatgtcacagtcagaaggtcttttgcaggtttgctccttgtcagatctgcaggttgccaaacagaactgatattctggagtaaatgaaaaggttttccacaacttgccacttgtagttaatattggctgggtgctttggctcacacctgttatcctggcaccttggcaaacttgggaggtgggaaaattgcttgagctcaggagttcaaggccagcctgggcaacatagggaggccctgtctctact

SEQ ID NO: 28851 - protein, 39 aa, Homo sapiens
MLCHPCSSPTKGRLFCSTSTELGDEDRAAPVAPAVLGPA

SEQ ID NO: 28852 - DNA, 728 bp, Homo sapiens
gtagccacaaaggtggaagtgtgctcaagtccagaaaagggtccaacacttgaggtttgggtgaaccctaatgtttgcactgaagaggaatgacttactccagaagacgctggaaagctggatacctgtgaaaatcccgagctcttcccagataaggtactgttttgtccaaaaagagaaggttgaccaaatcgaaatggcggcttagatggaagtgttcctacattactagaagacgccgaaaaagcactaggctgctgcccactgaaaggattagttgggttcatcttctgctccaattattagaagccggagaattcactgtaacgctgtcaaaaccttagcgtttcgggatctcctcccacctggcttccctcggagcggctggagcgctaagcactttctcacattccttcatcgcgccctggcggccaccctcgagcgggctggaaggacgagggcgctgccacgaagctgaggcctctcggcggggacggcgtgcccggggagcctaatcttccacccagcacagcccgaaacggcggaggccacgcgctgggcccaggccggcctggccactgtcccgccccgggctcgccaggggtcgccggcgccgcaacgctccgttagcgacgatgtggaggcccgggcgcgcggagctgcgtgggggaaggaaacggcgcccctggcgccggcccagcccccacgctcaccgtctcgccccagga

SEQ ID NO: 28853 - protein, 45 aa, Homo sapiens [sequence omitted]

SEQ ID NO: 28854 - DNA, 876 bp, Homo sapiens
ggcagcgcgggcctcggggtcctggggcgagacggtgagcgtgggggctgggccggcgccaggggcgccgtttccttcccccacgcagctccgcgcgcccgggcctccacatcgtcgctaacggagcgttgcggcgccggcgacccctggcgagcccggggcgggacagtggccaggccggcctgggcccagcgcgtggcctccgccgtttcgggctgtgctgggtggaagattaggctccccgggcacgccgtccccgccgagaggcctcagcttcgtggcagcgccctcgtccttccagcccgctcgagggtggccgccagggcgcgatgaaggaatgtgagaaagtgcttagcgctccagccgctccgagggaagccaggtgggaggagatcccgaaacgctaaggttttgacagcgttacagtgaattctccggctgtagagattggaggaagtcgggagaaattcgtctctaagttgtaagcttgttctaaagacgaaggggaactccctagtgctacaggctgtttcaggaagccaattaattttgtacacataatacttaattaccttctaataattggagcagaagatgaacccaactaatcctttcagtgggcagcagcctagtgctttttcggcgtcttctagtaatgtaggaacacttccatctaagccgccatttcgatttggtcaaccttctctttttggacaaaacagtaccttatctgggaagagctcgggattttcacaggtatccagctttccagcgtcttctggagtaagtcattcctcttcagtgcaaacattagggttcacccaaacctcaagtgttggacccttttctggacttgagcacacttccacctttgtg

SEQ ID NO: 28855 - protein, 93 aa, Homo sapiens
MNPTNPFSGQQPSAFSASSSNVGTLPSKPPFRFGQPSLFGQNSTLSGKSSGFSQVSSFPASSGVSHSSSVQTLGFTQTSSVGPFSGLEHTSTF

SEQ ID NO: 28856 - DNA, 1206 bp, Homo sapiens
gaccccgaggcccgcgctgcccactggcccctcggaaagacttgaggcgcaagcacaggctgctgccgcgacactcagcgctgcgcaccgcgggcagaaaacgccgcggaccgacttccggttcgctcagcactaccggattccgccccgcccgctgcgatccggttccgctccccacaacccgctctgtggcggggcttccgccccttctctccccagccgttgcccctccccgcaccccgccgcgtccgcgcgcctctctccgcgcgcacccccaacccgcccccttttctctgggaaccgctccttccgctccgcccgcctggagtccttctggccggattccgcggcatccttccatagaccctcgttgttgcttcctccttgtggttccgttgcaaacatttttaaagggctggttattcttcctgaaatgagtttggtgattagaaatctgcagcgagtcatccccatcaggagagcgccacttcgcagtaagatcgagattgtaaggaggattttaggagtgcagaaatttgacctggggatcatctgtgttgacaacaagaatattcagcacattaatagaatctacagagatagaaatgtcccaaccgatgtgctttcttttccatttcatgagcatctgaaagcaggtgaatttccccagcctgattttccagatgactacaatttgggagacattttcctaggagtggagtatatcttccatcagtgtaaagaaaatgaagattacaatgacgtcctgactgtgacggccacccacggactctgtcacttgctgggattcacacacggcacggaggcagagtggcagcaggaactggacctcagacctgcccttgtaaaaatgacacagatgtttgctttcaacaccgggctccccaaatacttccagctgaatgtgttcactaaggaaagcggccccgcttattctcccggcctgtggcggttcgtgcactcgctgagctcaggttctggtgaaggtgcccggagccggatgttccagaaggagaaggcggtgctggacgagctgggccgacgcacggggacccggctgcagcccctgacccggggcctcttcggagggagctgagggccgcgttccttctgaaagcgggacgcgggaggggtggaggctgcggggagccggggtcgcacacgaataaataacgaatgaacgta

SEQ ID NO: 28857 - protein, 227 aa, Homo sapiens
MSLVIRNLQRVIPIRRAPLRSKIEIVRRILGVQKFDLGIICVDNKNIQHINRIYRDRNVPTDVLSFPFHEHLKAGEFPQPDFPDDYNLGDIFLGVEYIFHQCKENEDYNDVLTVTATHGLCHLLGFTHGTEAEWQQELDLRPALVKMTQMFAFNTGLPKYFQLNVFTKESGPAYSPGLWRFVHSLSSGSGEGARSRMFQKEKAVLDELGRRTGTRLQPLTRGLFGGS

SEQ ID NO: 28858 - DNA, 744 bp, Homo sapiens
cccacaacccgctctgtggcggggcttccggtcgggagggtccgcccgctctcgcgtcctttgctgggtccagacaccggttccgttgcaaacatttttaaagggctggttattcttcctgaaatgagtttggtgattagaaatctgcagcgagtcatccccatcaggagagcgccacttcgcagtaagatcgagattgtaaggaggattttaggagtgcagaaatttgacctggggatcatctgtgttgacaacaagaatattcagcacattaatagaatctacagagatagaaatgtcccaaccgatgtgctttcttttccatttcatgagcatctgaaagcaggtgaatttccccagcctgattttccagatgactacaatttgggagacattttcctaggagtggagtatatcttccatcagtgtaaagaaaatgaagattacaatgacgtcctgactgtgacggccacccacggactctgtcacttgctgggattcacacacggcacggaggcagagtggcagcagatgttccagaaggagaaggcggtgctggacgagctgggccgacgcacggggacccggctgcagcccctgacccggggcctcttcggagggagctgagggccgcgttccttctgaaagcgggacgcgggaggggtggaggctgcggggagccggggtcgcacacgaataaataacgaatgaacgtacgaggggaacctcctcttatttccttca

SEQ ID NO: 28859 - protein, 167 aa, Homo sapiens; identical to SEQ ID NO: 5260

SEQ ID NO: 28860 - DNA, 593 bp, Homo sapiens
tggcggggcttccggtcgggagggtccgcccgctctcgcgtcctttgctgggtccagacaccggtacgtccgggcgggtttttagtctcccaagcgagagcgtcgcattcacccgcgtgggtctgcgggcgccccagaccccagaggacccggcccccaacgcttacctgtcccctctcctgtccctcccccattccagccccttctctccccagccgttgcccctccccagcacccggcctaaatttcatgtattaattatattataggctaggctccatggtgcctataagtatatatgttacagacatgatttttaattttaattttgaaaattttcaaatatacacaaaagtagagagagcagtatattcagcctccactgatcgaggcccatcacccagagtctacaattacactggtaacccagcaggaaaaagaaaggtgacagccgagcgcgatggctcatacccataatcccagcactttgggagcccgaggcgggtggttcacctgaggtcaggagttcgagatcagcctggccaacatggtgaaaccctgcctctactaaaaacacaaagaattagctgggt

SEQ ID NO: 28861 - protein, 65 aa, Homo sapiens [sequence omitted]

SEQ ID NO: 28862 - DNA, 918 bp, Homo sapiens
gcggggcttccggtcgggagggtccgcccgctctcgcgtcctttgctgggtccagacaccggttccgttgcaaacatttttaaagggctggttattcttcctgaaatgagtttggtgattagaaatctgcagcgagtcatccccatcaggagagcgccacttcgcagtaagatcgagattgtaaggaggattttaggagtgcagaaatttgacctggggatcatctgtgttgacaacaagaatattcagcacattaatagaatctacagagatagaaatgtcccaaccgatgtgctttcttttccatttcatgagcatctgaaagcaggtgaatttccccagcctgattttccagatgactacaatttgggagacattttcctaggagtggagtatatcttccatcagtgtaaagaaaatgaagattacaatgacgtcctgactgtaagcggggatgctgaaatcatataacctggctcatggaacatgggccttgcaaaggggtcaagatcacaaccctgcatccatgtgtgtccgtgggtaccgtaagggctactgggggaagaacctgtaagcagggtgtgaggagcacccaggctgggtagggactgcatgccccatgccacagttgaaggagggagagaacacgctgtgaaaacacagaagctcccagagaagccttctcagcttttatctctggagtagagcagactatgttgagctaacacagacctgctgaatcagcttctttctgagctgccagaagtacagaagttggagcctccaccaccttccagatctgtttctcctcagtgtaatccacctatgggttcttcctgcccactgcacagacaaaaccaattcactgcaattgtggtattgcagtagagaaagagtttaacacagagctagccaagc

SEQ ID NO: 28863 - protein, 121 aa, Homo sapiens; identical to SEQ ID NO: 5258

SEQ ID NO: 28864 - DNA, 1421 bp, Homo sapiens
gcggggcttccggtcgggagggtccgcccgctctcgcgtcctttgctgggtccagacaccggttccgttgcaaacatttttaaagggctggttattcttcctgaaatgagtttggtgattagaaatctgcagcgagtcatccccatcaggagagcgccacttcgcagtaagatcgagattgtaaggaggattttaggagtgcagaaatttgacctggggatcatctgtgttgacaacaagaatattcagcacattaatagaatctacagagatagaaatgtcccaaccgatgtgctttcttttccatttcatgagcatctgaaagcaggtgaatttccccagcctgattttccagatgactacaatttgggagacattttcctaggagtggagtatatcttccatcagtgtaaagaaaatgaagattacaatgacgtcctgactgtaagcggggatgctgaaatcatataacctggctcatggaacatgggccttgcaaaggggtcaagatcacaaccctgcatccatgtgtgtccgtgggtaccgtaagggctactgggggaagaacctgtaagcagggtgtgaggagcacccaggctgggtagggactgcatgccccatgccacagttgaaggagggagagaacacgctgtgaaaacacagaagctcccagagaagccttctcagcttttatctctggagtagagcagactatgttgagctaacacagacctgctgaatcagcttctttctgagctgccagaagtacagaagttggagcctccaccaccttccagatctgtttctcctcagtgtaatccacctatgggttcttcctgcccactgcacagacaaaaccaattcactgcaattgtggtattgcagtagagaaagagtttaacacagagctagccaagcagaaaggctggagttattattcaactcaatctcccagagaactcagaggctacagtttctacaggcaatttggcaggcaggggctagggaatgcctgctgctgatcggctgcagacggaccatggggtgtcaacgatttttgtcccctgagtccgcctctgcgtggagccacgggatcagctgagtcatgagtctcaggtccaggtggagtctgtaggttgccagaactcaaaagtctgaaaaacatcccaaaagaccattcttaggttgtactattgacgttatcttattggggagcaattggggcggtcacaaatctcgtgacctctggctgcgtgagtcctgagcagtagggaattacagcagggcaagctggggaagcaaggcctgcgggctggttctcctcaggacacctacatctgagcagaattcaggcccctcccatcatcctaatcttgtggcccttcacaagcttcacagaggtggcttcggtcttgagcaag

SEQ ID NO: 28865 - protein, 121 aa, Homo sapiens; identical to SEQ ID NO: 5258

SEQ ID NO: 28866 - DNA, 411 bp, Homo sapiens
ccgcccgctctcgcgtcctttgctgggtccagacaccggttccgttgcaaacatttttaaagggctggttattcttcctgaaatgagtttggtgattagaaatctgcagcgagtcatccccatcaggagagcgccacttcgcagtaagatcgagattgtgacggccacccacggactctgtcacttgctgggattcacacacggcacggaggcagagtggcagcagatgttccagaaggagaaggcggtgctggacgagctgggccgacgcacggggacccggctgcagcccctgacccggggcctcttcggagggagctgagggccgcgttccttctgaaagcgggacgcgggaggggtggaggctgcggggagccggggtcgcacacgaataaataacgaatgaacgta

SEQ ID NO: 28867 - protein, 79 aa, Homo sapiens
MSLVIRNLQRVIPIRRAPLRSKIEIVTATHGLCHLLGFTHGTEAEWQQMFQKEKAVLDELGRRTGTRLQPLTRGLFGGS

SEQ ID NO: 28868 - DNA, 566 bp, Homo sapiens
cgcccgctctcgcgtcctttgctgggtccagacaccggttccgttgcaaacatttttaaagggctggttattcttcctgaaatgagtttggtgattagaaatctgcagcgagtcatccccatcaggagagcgccacttcgcagtaagatcgagattcatctgaaagcaggtgaatttccccagcctgattttccagatgactacaatttgggagacattttcctaggagtggagtatatcttccatcagtgtaaagaaaatgaagattacaatgacgtcctgactgtgacggccacccacggactctgtcacttgctgggattcacacacggcacggaggcagagtggcagcagatgttccagaaggagaaggcggtgctggacgagctgggccgacgcacggggacccggctgcagcccctgacccggggcctcttcggagggagctgagggccgcgttccttctgaaagcgggacgcgggaggggtggaggctgcggggagccggggtcgcacacgaataaataacgaatgaacgtacgaggggaacctcctcttatttccttc

SEQ ID NO: 28869 - protein, 122 aa, Homo sapiens
MSLVIRNLQRVIPIRRAPLRSKIEIHLKAGEFPQPDFPDDYNLGDIFLGVEYIFHQCKENEDYNDVLTVTATHGLCHLLGFTHGTEAEWQQMFQKEKAVLDELGRRTGTRLQPLTRGLFGGS

SEQ ID NO: 28870 - DNA, 862 bp, Homo sapiens
gctctcgcgtcctttgctgggtccagacaccggtacgtccgggcgggtttttagtctcccaagcgagagcgtcgcattcacccgcgtgggtctgcgggcgccccagaccccagaggacccggcccccaacgcttacctgtcccctctcctgtccctcccccattccagccccttctctccccagccgttgcccctccccgcaccccgccgcgtccgcgcgcctctctccgcgcgcacccccaacccgcccccttttctctgggaaccgctccttccgctccgcccgcctggagtccttctggccggattccgcggcatccttccatagaccctcgttgttgcttcctccttgtggttccgttgcaaacatttttaaagggctggttattcttcctgaaatgagtttggtgattagaaatctgcagcgagtcatccccatcaggagagcgccacttcgcagtaagatcgagattgtaaggaggattttaggagtgcagaaatttgacctggggatcatctgtgttgacaacaagaatattcagcacattaatagaatctacagagatagaaatgtcccaaccgatgtgctttcttttccatttcatgaggtgacggccacccacggactctgtcacttgctgggattcacacacggcacggaggcagagtggcagcagatgttccagaaggagaaggcggtgctggacgagctgggccgacgcacggggacccggctgcagcccctgacccggggcctcttcggagggagctgagggccgcgttccttctgaaagcgggacgcgggaggggtggaggctgcggggagccggggtcgcacacgaataaataacgaatgaacgta

SEQ ID NO: 28871 - protein, 124 aa, Homo sapiens
MSLVIRNLQRVIPIRRAPLRSKIEIVRRILGVQKFDLGIICVDNKNIQHINRIYRDRNVPTDVLSFPFHEVTATHGLCHLLGFTHGTEAEWQQMFQKEKAVLDELGRRTGTRLQPLTRGLFGGS

SEQ ID NO: 28872 - DNA, 1018 bp, Homo sapiens
gctctcgcgtcctttgctgggtccagacaccggtacgtccgggcgggtttttagtctcccaagcgagagcgtcgcattcacccgcgtgggtctgcgggcgccccagaccccagaggacccggcccccaacgcttacctgtcccctctcctgtccctcccccattccagccccttctctccccagccgttgcccctccccgcaccccgccgcgtccgcgcgcctctctccgcgcgcacccccaacccgcccccttttctctgggaaccgctccttccgctccgcccgcctggagtccttctggccggattccgcggcatccttccatagaccctcgttgttgcttcctccttgtggttccgttgcaaacatttttaaagggctggttattcttcctgaaatgagtttggtgattagaaatctgcagcgagtcatccccatcaggagagcgccacttcgcagtaagatcgagattgtaaggaggattttaggagtgcagaaatttgacctggggatcatctgtgttgacaacaagaatattcagcacattaatagaatctacagagatagaaatgtcccaaccgatgtgctttcttttccatttcatgagcatctgaaagcaggtgaatttccccagcctgattttccagatgactacaatttgggagacattttcctaggagtggagtatatcttccatcagtgtaaagaaaatgaagattacaatgacgtcctgactgtgacggccacccacggactctgtcacttgctgggattcacacacggcacggaggcagagtggcagcagatgttccagaaggagaaggcggtgctggacgagctgggccgacgcacggggacccggctgcagcccctgacccggggcctcttcggagggagctgagggccgcgttccttctgaaagcgggacgcgggaggggtggaggctgcggggagccggggtcgcacacgaataaataacgaatgaacgtacgaggggaacctcctcttatttccttc

SEQ ID NO: 28873 - protein, 167 aa, Homo sapiens; identical to SEQ ID NO: 5260

SEQ ID NO: 28874 - DNA, 1402 bp, Homo sapiens
gtcgcattcacccgcgtgggtctgcgggcgccccagaccccagaggacccggcccccaacgcttacctgtcccctctcctgtccctcccccattccagccccttctctccccagccgttgcccctccccgcaccccgccgcgtccgcgcgcctctctccgcgcgcacccccaacccgcccccttttctctgggaaccgctccttccgctccgcccgcctggagtccttctggccggattccgcggcatccttccatagaccctcgttgttgcttcctccttgtggttccgttgcaaacatttttaaagggctggttattcttcctgaaatgagtttggtgattagaaatctgcagcgagtcatccccatcaggagagcgccacttcgcagtaagatcgagattgtaaggaggattttaggagtgcagaaatttgacctggggatcatctgtgttgacaacaagaatattcagcacattaatagaatctacagagatagaaatgtcccaaccgatgtgctttcttttccatttcatgagcatctgaaagcaggtgaatttccccagcctgattttccagatgactacaatttgggagacattttcctaggagtggagtatatcttccatcagtgtaaagaaaatgaagattacaatgacgtcctgactgtaagcggggatgctgaaatcatataacctggctcatggaacatgggccttgcaaaggggtcaagatcacaaccctgcatccatgtgtgtccgtgggtaccgtaagggctactgggggaagaacctgtaagcagggtgtgaggagcacccaggctgggtagggactgcatgccccatgccacagttgaaggagggagagaacacgctgtgaaaacacagaagctcccagagaagccttctcagcttttatctctggagtagagcagactatgttgagctaacacagacctgctgaatcagcttctttctgagctgccagaagtacagaagttggagcctccaccaccttccagatctgtttctcctcagtgtaatccacctatgggttcttcctgcccactgcacagacaaaaccaattcactgcaattgtggtattgcagtagagaaagagtttaacacagagctagccaagcagaaaggctggagttattattcaactcaatctcccagagaactcagaggctacagtttctacaggcaatttggcaggcaggggctagggaatgcctgctgctgatcggctgcagacggaccatggggtgtcaacgatttttgtcccctgagtccgcctctgcgtggagccacgggatcagctgagtcatgagtctcaggtccaggtggagtctgtaggttgccagaactcaaaagtctgaaaaacatcccaaaagaccatt

SEQ ID NO: 28875 - protein, 121 aa, Homo sapiens; identical to SEQ ID NO: 5258

SEQ ID NO: 28876 - DNA, 1140 bp, Homo sapiens
tcgcattcacccgcgtgggtctgcgggcgccccagaccccagaggacccggcccccaacgcttacctgtcccctctcctgtccctcccccattccagccccttctctccccagccgttgcccctccccgcaccccgccgcgtccgcgcgcctctctccgcgcgcacccccaacccgcccccttttctctgggaaccgctccttccgctccgcccgcctggagtccttctggccggattccgcggcatccttccatagaccctcgttgttgcttcctccttgtggttccgttgcaaacatttttaaagggctggttattcttcctgaaatgagtttggtgattagaaatctgcagcgagtcatccccatcaggagagcgccacttcgcagtaagatcgagattgtaaggaggattttaggagtgcagaaatttgacctggggatcatctgtgttgacaacaagaatattcagcacattaatagaatctacagagatagaaatgtcccaaccgatgtgctttcttttccatttcatgagcatctgaaagcaggtgaatttccccagcctgattttccagatgactacaatttgggagacattttcctaggagtggagtatatcttccatcagtgtaaagaaaatgaagattacaatgacgtcctgactgtaagcggggatgctgaaatcatataacctggctcatggaacatgggccttgcaaaggggtcaagatcacaaccctgcatccatgtgtgtccgtgggtaccgtaagggctactgggggaagaacctgtaagcagggtgtgaggagcacccaggctgggtagggactgcatgccccatgccacagttgaaggagggagagaacacgctgtgaaaacacagaagctcccagagaagccttctcagcttttatctctggagtagagcagactatgttgagctaacacagacctgctgaatcagcttctttctgagctgccagaagtacagaagttggagcctccaccaccttccagatctgtttctcctcagtgtaatccacctatgggttcttcctgcccactgcacagacaaaaccaattcactgcaattgtggtattgcagtagagaaagagtttaacacagagctagccaagc

SEQ ID NO: 28877 - protein, 121 aa, Homo sapiens; identical to SEQ ID NO: 5258

SEQ ID NO: 28878 - DNA, 1643 bp, Homo sapiens
tcgcattcacccgcgtgggtctgcgggcgccccagaccccagaggacccggcccccaacgcttacctgtcccctctcctgtccctcccccattccagccccttctctccccagccgttgcccctccccgcaccccgccgcgtccgcgcgcctctctccgcgcgcacccccaacccgcccccttttctctgggaaccgctccttccgctccgcccgcctggagtccttctggccggattccgcggcatccttccatagaccctcgttgttgcttcctccttgtggttccgttgcaaacatttttaaagggctggttattcttcctgaaatgagtttggtgattagaaatctgcagcgagtcatccccatcaggagagcgccacttcgcagtaagatcgagattgtaaggaggattttaggagtgcagaaatttgacctggggatcatctgtgttgacaacaagaatattcagcacattaatagaatctacagagatagaaatgtcccaaccgatgtgctttcttttccatttcatgagcatctgaaagcaggtgaatttccccagcctgattttccagatgactacaatttgggagacattttcctaggagtggagtatatcttccatcagtgtaaagaaaatgaagattacaatgacgtcctgactgtaagcggggatgctgaaatcatataacctggctcatggaacatgggccttgcaaaggggtcaagatcacaaccctgcatccatgtgtgtccgtgggtaccgtaagggctactgggggaagaacctgtaagcagggtgtgaggagcacccaggctgggtagggactgcatgccccatgccacagttgaaggagggagagaacacgctgtgaaaacacagaagctcccagagaagccttctcagcttttatctctggagtagagcagactatgttgagctaacacagacctgctgaatcagcttctttctgagctgccagaagtacagaagttggagcctccaccaccttccagatctgtttctcctcagtgtaatccacctatgggttcttcctgcccactgcacagacaaaaccaattcactgcaattgtggtattgcagtagagaaagagtttaacacagagctagccaagcagaaaggctggagttattattcaactcaatctcccagagaactcagaggctacagtttctacaggcaatttggcaggcaggggctagggaatgcctgctgctgatcggctgcagacggaccatggggtgtcaacgatttttgtcccctgagtccgcctctgcgtggagccacgggatcagctgagtcatgagtctcaggtccaggtggagtctgtaggttgccagaactcaaaagtctgaaaaacatcccaaaagaccattcttaggttgtactattgacgttatcttattggggagcaattggggcggtcacaaatctcgtgacctctggctgcgtgagtcctgagcagtagggaattacagcagggcaagctggggaagcaaggcctgcgggctggttctcctcaggacacctacatctgagcagaattcaggcccctcccatcatcctaatcttgtggcccttcacaagcttcacagaggtggcttcggtcttgagcaag

SEQ ID NO: 28879 - protein, 121 aa, Homo sapiens; identical to SEQ ID NO: 5258

SEQ ID NO: 28880 - DNA, 1266 bp, Homo sapiens
gttagcctgacccgtgcccgggactcagtggggacagccacgcaagttagactctagattaaattcctcccgcggttagcctgacccgtgcccgggactcagtggagtcagccacacaagttaaactctagattaaattcctcccgcggttagcctgacccgtgcccgggactcagtggagtcagccacgcaagttaaactctagattaaattcctcccgcggttagcctgacccgtgcccgggactcagtggggacagccacacaagttagactctagattaaattcctcccgcggttagcctgacccgtgcccgggactcagtggggacagccacacaagttaaactctagattaaattcctcccgcggttagcctgacctgtgcccgggactcagtggggacagccacgcaagttaaactctagattaaattcctcccgcggttagcctgacccgtgcccgggactcagtggagtcagccacacaagttaaactctagattaaattcctcccgcggttagcctgacccgtgcccgggactcagtggggacagccacgcaagttaaactctagattaaattcctcccgcggttagcctgacccgtgcccgggactcagtggggacagccacacaagttaaactctagattaaattcctcccgcggttagcctgacccgtgcccgggactcagtggagtcagccacgcaagttagactctagattaaattcctcccgcggttagcctgacccgtgcccgggactcagtggagtcagccacacaagttagactctagattaaattcctcccgcggttagcctgacccgtgcccgggactcagtggggacagccacacaagttagactctagattaaattcctcccgcggttagcctgacccgtgcccgggactcagtggagtcagccacgcaagttagactctagattaaattcctcccgcggttagcctgacccgtgcccgggactcagtggagtcagccacgcaagttagactctagattaaattcctcccgcggttagcctgacccgtgcccgggactcagtggagtcagccacgcaagttagactctagattaaattcctcccgcggttagcctgacccgtgcccgggactcagtggagtcagccacgcaagttagactctagattaaattcctcccgcggttagcctgacccgtgcccgggactcagtggagtcagccacgcaagttaaactctagattaaattcctcccgcggttagcct

SEQ ID NO: 28881 - DNA, 1282 bp, Homo sapiens
gttagcctgacccgtgcccgggactcagtggggacagccacgcaagttagactctagattaaattcctcccgcggttagcctgacccgtgcccgggactcagtggagtcagccacacaagttaaactctagattaaattcctcccgcggttagcctgacccgtgcccgggactcagtggagtcagccacgcaagttaaactctagattaaattcctcccgcggttagcctgacccgtgcccgggactcagtggggacagccacacaagttagactctagattaaattcctcccgcggttagcctgacccgtgcccgggactcagtggggacagccacacaagttaaactctagattaaattcctcccgcggttagcctgacctgtgcccgggactcagtggggacagccacgcaagttaaactctagattaaattcctcccgcggttagcctgacccgtgcccgggactcagtggagtcagccacacaagttaaactctagattaaattcctcccgcggttagcctgacccgtgcccgggactcagtggggacagccacgcaagttaaactctagattaaattcctcccgcggttagcctgacccgtgcccgggactcagtggggacagccacacaagttaaactctagattaaattcctcccgcggttagcctgacccgtgcccgggactcagtggagtcagccacgcaagttagactctagattaaattcctcccgcggttagcctgacccgtgcccgggactcagtggagtcagccacacaagttagactctagattaaattcctcccgcggttagcctgacccgtgcccgggactcagtggggacagccacacaagttagactctagattaaattcctcccgcggttagcctgacccgtgcccgggactcagtggagtcagccacgcaagttagactctagattaaattcctcccgcggttagcctgacccgtgcccgggactcagtggggacagccacgcaagttagactctagattaaattcctcccgcggttagcctgacccgtgcccgggatcagtggggacagccacgcaagttagactctagattaaattcctcccgcggttagcctgacccgtgcccgggactcagtggggacagccacacaagttagactctagattaaattcctcccgcggttagcctgacccgtgcccgggactcatggagtcagccacgcaagttaaactctagattaaattcctcccgcggttagcctgacccgtgcccgggactc

SEQ ID NO: 28882 - DNA, 796 bp, Homo sapiens
ccgtgcccgggactcagtggggacagccacgcaagttagactctagattaaattcctcccgcggttagcctgacccgtgcccgggactcagtggagtcagccacacaagttaaactctagattaaattcctcccgcggttagcctgacccgtgcccgggactcagtggagtcagccacgcaagttaaactctagattaaattcctcccgcggttagcctgacccgtgcccgggactcagtggggacagccacacaagttagactctagattaaattcctcccgcggttagcctgacccgtgcccgggatcagtggggacagccacgcaagttaaactctagattaaattcctcccgcggttagcctgacccgtgcccgggactcagtggagtcagccacacaagttaaactctagattaaattcctcccgcggttagcctgacccgtgcccgggactcagtggggacagccacgcaagttaaactctagattaaattcctcccgcggttagcctgacccgtgcccgggactcagtggggacagccacacaagttaaactctagattaaattcctcccgcggttagcctgacccgtgcccgggactcagtggagtcagccacgcaagttagactctagattaaattcctcccgcggttagcctgacccgtgcccgggactcagtggagtcagccacacaagttagactctagattaaattcctcccgcggttagcctgacccgtgcccgggatcagtggagtcagccacacaagttagactctagattaaattcctc

SEQ ID NO: 28883 - DNA, 1673 bp, Homo sapiens
aaagaggagaggaaaaaaagttaaccagttcaacgaaaaggagaatctggcaaggaagcatctctgatgtgggcagagcctgcagcagcagatgtggagggcttctcacaagtgacagcaagactgtctgtaaaacggccactttgacctggtggtgttctgctcttttcatggccatagagtactctggctggtctccaggaggtaaggcccgccctgcaggcaacaccggtgcttgggctcctgctgagcagttctttcctgcgagtaacagaaccagggagggaggtgggctgtggcctcccctgcccctacagtcgtctcctgcagctcccaccatgctggactcatcagcagcagagcaagtgacccgactgacgctgaagctcttgggacagaaagcctcttagtcattcctggagcacacagggcctttgcgtggagccaccgtctctgtcacggtctctcttcctcacagaagctggagcaagaacggcagaacgtggaagggggacctgagggcctccacctcgagccaggaaatgaggaccggccggacgatgccctgcagactgctctgaagagaaggagggaccttctgcagagactccgggaggccaccctcatgcacataaccctggaagggtcttccagtcatggccatcctgcccggagaggcgcctgtacctggcccaggctggcctgagcctgatgctgggggtgcctctgtggcgttggggctccccgtccccgtgtgcagcagctctgcatcggccttgcaggaacaacacctcctggacgagctctctcgggcccaggcctggagcgggccaagcagaggagccctcgggtcagccctgcccccagagctgccccccacgggcatcctacccactgcctccccatccccgctggccccagacccgccaaggatcatcctgcctacggtcccccagcctcctgccaccatcattcagcagctccctcagcagccactcatagcacagattcctcctccccaggccttccctactcaacggtcaggaagtattaaggaagacatggtggagctgctgctgctgcagaacgcacaggtgcaccagttggtcctgcagaactggatgctcaaggccctgcccccagccctgcaggacccgccacatgtgcccccgagggtcccacgagctgccaggccaaggctgcctgccgtgcaccaccaccaccaccaccaccatgctgtgtggccacctggggctgccactgtcctccagcccgcccccagcctgtggacgcctggcccaccctgagtgacagattctttcattcctgaagttccgcacaaggaggaaccctgtcccagtgcttccatctttgaaagtttgcaggtaggagacaggatgaccagagagttgccactgagctgcagagctccccagggacagccacctggtgctgacatggacgggcaggtgtgaacaccgaagggcccagcgcagctactggcagtaacactcacttctctcagaaccatcttttcgtgcctcttgaaggtgattccagagactctgtgctctcgttaaaagctcaaaccaaagctcagactccatttcctcttttcaaggtgactttccagcatggcatttctttctttctattaaaaatgtttttttttg

SEQ ID NO: 28884 - protein, 216 aa, Homo sapiens
MAILPGEAPVPGPGWPEPDAGGASVALGLPVPVCSSSASALQEQHLLDELSRAQAWSGPSRGALGSALPPELPPTGILPTASPSPLAPDPPRIILPTVPQPPATIIQQLPQQPLIAQIPPPQAFPTQRSGSIKEDMVELLLLQNAQVHQLVLQNWMLKALPPALQDPPHVPPRVPRAARPRLPAVHHHHHHHHAVWPPGAATVLQPAPSLWTPGPP

SEQ ID NO: 28885 - DNA, 1291 bp, Homo sapiens
gtagatactggagacactttcttcaaggacatatgcagatagctaatcacctggctgttcctaggtcccccagcctcctgccaccatcattcagcagctccctcagcagccactcatagcacagattcctcctccccaggccttccctactcaacggtcaggaagtattaaggaagacatggtggagctgctgctgctgcagaacgcacaggtgcaccagttggtcctgcagaactggatgctcaaggccctgcccccagccctgcaggacccgccacatgtgcccccgagggtcccacgagctgccaggccaaggctgcctgccgtgcaccaccaccaccaccaccaccatgctgtgtggccacctggggctgccactgtcctccagcccgcccccagcctgtggacgcctggcccaccctgagtgtgagtcacagagaccctggccggggcaccctccacccccaggcttcctcagggctgtgggctgtggcgggactatggaagggagcagggagagaccctgccaccacccggagtggctacgcgagtgtggactgcaggctcctcctggggaagctgggcaggctcgctttctggtcacggggccattccagggggcatcccttgctccgggtcccctgcagtgaggggcctgtgaaccccaccagggcaacagcccctcccagggacccctcctttcctgtagggcggcgccggcccacctgggagcctcagatccccctcttccatcacggaggtaaagttgaggccgtggacgccaccagcctgatgaaataaagatttcatccagaaagagtttaagaaaatctcagctcaggagccagaacagaaaagatcaatagctttagccacatggaagtgtgaacatcctgatggggaaaataccacaaagtctaatttaataactagggacacctgtgtccacagctgtggcacagactcccactaaagaagtaggggtgcatggctcatgcctgtaatcccagcactttaagaggctgaggcaggaggatcacttgagctcaggaattcgagaccagcctgggtcacatagcaagaccccgtctctacaaaaaataaatttaaaaaactagccaggtgtggtgatatgcgcctgttatctcagcagctctgggggctgaggtgggaggattgcttgagcccaggagttagaagctgcagtgagctctgatggaaccactgcactatagcctggaccacagagcaggcccctgtctcaaaaataaaataaaaaagtgaaagaagc

SEQ ID NO: 28886 - protein, 81 aa, Homo sapiens
MVELLLLQNAQVHQLVLQNWMLKALPPALQDPPHVPPRVPRAARPRLPAVHHHHHHHHAVWPPGAATVLQPAPSLWTPGPP

SEQ ID NO: 28887 - DNA, 3010 bp, Homo sapiens
ggccagcaggagtaaggtgcgcccctccaaggatctccatgagctgcctctgtgagcctgacctcctacgggctagccagccttcacccaatcactcactggtccagcttcagggtccctacatggatgtgggttggaagacaggacaggcacacaaccatagatactgatggacatgggccatttacagaactgagggcaagagagcaattttggccactgaggcaagttcctgggttagctgcaccgaggagggtgctgacctctgcccctcgggtccacaggtctgggcccctgctgctgacatcccccacatgtcagtctgcctgctagtgggattgactaactcatcaacgtggagtttaatgcccaaccaagtgcagaccacgctcctgttttgcgtcaccctctgcgaagcttcctgcaaacttgactccctgcccagtgcccccagccccaaggtgggacatatcccctgggcaccccctctggtcctgctaaagcccagcccctctgcaggtcacaacccctcctctgtcctaccccttctgctgcctgcaatttcctgaactccttggtaggcagtctcctcaccctgtcctcccagtgtctccccaccctgtcttccctgcttgctctgagggtccctaggagggaggtattaacaccctggaggcagtacacaggtggggcgccctcccctgacacacaggttcttctggactgggtcctgaggctggtggtgcatagggggtcacgactgcccttcccccaggtctgagggttctgcccctctgcctcagctgctgcccacttttttgccttcccatgaagcccagctggccacacctggggatgagtgtttaccggtagcctgaggacgcacagtggaaacctggcaacctggggcctccctgtgtctggcagcctggcaactgtcacgcggcgcccagcgctggcttctggggcactgcagtccagggagggtgtggctatcttcccacagggctcttctcttccctcaggctggtctccaggaggtaaggcccgccctgcaggcaacaccggtgcttgggctcctgctgagcagttctttcctgcgagtaacagaaccagggagggaggtgggctgtggcctcccctgcccctacagtcgtctcctgcagctcccaccatgctggactcatcagcagcagagcaagtgacccgactgacgctgaagctcttgggacagaaagcctcttagtcattcctggagcacacagggcctttgcgtggagccaccgtctctgtcacggtctctcttcctcacagaagctggagcaagaacggcagaacgtggaagggggacctgagggcctccacctcgagccaggaaatgaggaccggccggacgatgccctgcagactgctctgaagagaaggagggaccttctgcagagactccgggaggccaccctcatgcacataaccctggaagggtcttccagtcatggccatcctgcccggagaggcgcctgtacctggcccaggctggcctgagcctgatgctgggggtgcctctgtggcgttggggctccccgtccccgtgtgcagcagctctgcatcggccttgcaggaacaacacctcctggacgagctctctcgggcccaggcctggagcgggccaagcagaggagccctcgggtcagccctgcccccagagctgccccccacgggcatcctacccactgcctccccatccccgctggccccagacccgccaaggatcatcctgcctacggtcccccagcctcctgccaccatcattcagcagctccctcagcagccactcatagcacagattcctcctccccaggccttccctactcaacggtcaggaagtattaaggaagacatggtggagctgctgctgctgcagaacgcacaggtgcaccagttggtcctgcagaactggatgctcaaggccctgcccccagccctgcaggacccgccacatgtgcccccgagggtcccacgagctgccaggccaaggctgcctgccgtgcaccaccaccaccaccaccaccatgctgtgtggccacctggggctgccactgtcctccagcccgcccccagcctgtggacgcctggcccaccctgagtgtgagtcacagagaccctggccggggcaccctccacccccaggcttcctcagggctgtgggctgtggcgggactatggaagggagcagggagagaccctgccaccacccggagtggctacgcgagtgtggactgcaggctcctcctggggaagctgggcaggctcgctttctggtcacggggccattccagggggcatcccttgctccgggtcccctgcagtgaggggcctgtgaaccccaccagggcaacagcccctcccagggacccctcctttcctgtagggcggcgccggcccacctgggagcctcagatccccctcttccatcacggaggtaaagttgaggccgtggacgccaccagcctgatgaaataaagatttcatccagaaagagtttaagaaaatctcagctcaggagccagaacagaaaagatcaatagctttagccacatggaagtgtgaacatcctgatggggaaaataccacaaagtctaatttaataactagggacacctgtgtccacagctgtggcacagactcccactaaagaagtaggggtgcatggctcatgcctgtaatcccagcactttaagaggctgaggcaggaggatcacttgagctcaggaattcgagaccagcctgggtcacatagcaagaccccgtctctacaaaaaataaatttaaaaaactagccaggtgtggtgatatgcgcctgttatctcagcagctctgggggctgaggtgggaggattgcttgagcccaggagttagaagctgcagtgagctctgatggaaccactgcactatagcctggaccacagagcaggcccctgtctcaaaaataaaataaaaaagtgaaagaagc

SEQ ID NO: 28888 - protein, 216 aa, Homo sapiens; identical to SEQ ID NO: 28884

SEQ ID NO: 28889 - DNA, 3608 bp, Homo sapiens
cgctgattggctgtggccgcggcgggggcgggacctggcggagagcggcggattcaagatggcggcggccaggaggcggcttccagcggagccggcgggaaaaagcgagacctccgcggcggcttccgccggaccgcgtcctctcctggcagggggcggtggcgggcaccggagccgcccttaggacttcacgccagagcagctagagaagaagcccctaatgtttaccttcgtcctcccggcctccacctttctgcgccgctgctcttgctcaacttccatctccctcagactccgcgcgggccgcccggcggtgacggggctgacacagagcagccttcgctctatttacactccctcccccgcgcttgggctcgccctccccccgcgacaactgtcacgcagccgcggccccgcccccgacacgcgccgccaatcagggggctgcgtttccggtctcgcgcacgcgcgctctgggcggtgcagcctgggcggagccccgccctttacgctcgccggccacagattggtgcgctcacgtacccgcctcctacggcaggaccagtaagcggaaagcggaggcctggcgcccgctgtgattggccgattttaaaatcccctgccaggctggccgagcggcaaaaagttcgcgctgctggtcccgcgcgggcggcccctgggctttgtgtccaccaggacagcgggccgggctccctgcaggcgcgggcggcgccgaacggtgctcagcaaccacccggacagggccaggccgttttctcccgctcaggcattagtcgttggctgtgggccgccgcgggaagttgaggcctaccacggaggaggctgctgaggtggatctcaggggatccgcaagggctccctcacccttgccgggaccctgggaacccgaaacaaaatcctacgccaccagcccgccgaatgcgccccctcggccgggggtcctgggtcttcagagaagaactcggccgaatgcggtcagaaagcccgcgaaccgcctggacctgcaggccccgccgcttggagctcccgcctttcccgaccgagcccgtgtctgctcgtgtgtctcactgatgtcttaggtctcaaaaaaaaaagaaaagaaaaggtttttagtagacagaagagaaatggggccgtgggttcgtggtcccagggggaaactgacgtcgcatgaggtcgtcgtccctcagcttgagctcagcggaacataagcttgcagaggtggaaaccacggaaggtttgggtgtcttggagctctctggacaccgaagcccggacacagtcccggggtccgcaccgcctgtgacctgtggcgggaccgccggggtgggcgttttctcagctggcgcgcgcgtaggtggaacttgggaaactaactggagcgaagtggcaaaaaaccaagacagggccggtgacctcgcgcaggccgtccttaactgtggagtattccttcagctaacccctttatttcatgtgtccaagtctggtttctgggtttctttgtagtcctccgggcctgttcgtgcgccttcacttgcaaaaggttcgtcgtggagggccgtgtgcttgtttgcagcagtaacgatgcccttcccgagcgtgctggagtggctcctcgctgacgcaagctcaccttgcagcctcctcagcaactgcaacttaaacgcgccctcaggaagccctggaatctcgctcagaattttttttctttttttgagacagtctcgctgcgacgcccaggctatagcgcaatggcgcgatctcggctccctgcaacctccctcaggaagccgtggaagctcgaccgccagaaacttccttctcctgactcaggccacagtcttctgtgtggctggtctccaggaggtaaggcccgccctgcaggcaacaccggtgcttgggctcctgctgagcagttctttcctgcgagtaacagaaccagggagggaggtgggctgtggcctcccctgcccctacagtcgtctcctgcagctcccaccatgctggactcatcagcagcagagcaagtgacccgactgacgctgaagctcttgggacagaagctggagcaagaacggcagaacgtggaagggggacctgagggcctccacctcgagccaggaaatgaggaccggccggacgatgccctgcagactgctctgaagagaaggagggaccttctgcagagactccgggaacaacacctcctggacgagctctctcgggcccaggcctggagcgggccaagcagaggagccctcgggtcagccctgcccccagagctgccccccacgggcatcctacccactgcctccccatccccgctggccccagacccgccaaggatcatcctgcctacggtcccccagcctcctgccaccatcattcagcagctccctcagcagccactcatagcacagattcctcctccccaggccttccctactcaacggtcaggaagtattaaggaagacatggtggagctgctgctgctgcagaacgcacaggtgcaccagttggtcctgcagaactggatgctcaaggccctgcccccagccctgcaggacccgccacatgtgcccccgagggtcccacgagctgccaggccaaggctgcctgccgtgcaccaccaccaccaccaccaccatgctgtgtggccacctggggctgccactgtcctccagcccgcccccagcctgtggacgcctggcccaccctgagtgtgagtcacagagaccctggccggggcaccctccacccccaggcttcctcagggctgtgggctgtggcgggactatggaagggagcagggagagaccctgccaccacccggagtggctacgcgagtgtggactgcaggctcctcctggggaagctgggcaggctcgctttctggtcacggggccattccagggggcatcccttgctccgggtcccctgcagtgaggggcctgtgaaccccaccagggcaacagcccctcccagggacccctcctttcctgtagggcggcgccggcccacctgggagcctcagatccccctcttccatcacggaggtaaagttgaggccgtggacgccaccagcctgatgaaataaagatttcatccagaaagagtttaagaaaatctcagctcaggagccagaacagaaaagatcaatagctttagccacatggaagtgtgaacatcctgatggggaaaataccacaaagtctaatttaataactagggacacctgtgtccacagctgtggcacagactcccactaaagaagtaggggtgcatggctcatgcctgtaatcccagcactttaagaggctgaggcaggaggatcacttgagctcaggaattcgagaccagcctgggtcacatagcaagaccccgtctctacaaaaaataaatttaaaaaactagccaggtgtggtgatatgcgcctgttatctcagcagctctgggggctgaggtgggaggattgcttgagcccaggagttagaagctgcagtgagctctgatggaaccactgcactatagcctggaccacagagcaggcccctgtctcaaaaataaaataaaaaagtgaaagaagc

SEQ ID NO: 28890 - protein, 322 aa, Homo sapiens; identical to SEQ ID NO: 3979

SEQ ID NO: 28891 - DNA, 3279 bp, Homo sapiens
cgctgattggctgtggccgcggcgggggcgggacctggcggagagcggcggattcaagatggcggcggccaggaggcggcttccagcggagccggcgggaaaaagcgagacctccgcggcggcttccgccggaccgcgtcctctcctggcagggggcggtggcgggcaccggagccgcccttaggacttcacgccagagcagctagagaagaagcccctaatgtttaccttcgtcctcccggcctccacctttctgcgccgctgctcttgctcaacttccatctccctcagactccgcgcgggccgcccggcggtgacggggctgacacagagcagccttcgctctatttacactccctcccccgcgcttgggctcgccctccccccgcgacaactgtcacgcagccgcggccccgcccccgacacgcgccgccaatcagggggctgcgtttccggtctcgcgcacgcgcgctctgggcggtgcagcctgggcggagccccgccctttacgctcgccggccacagattggtgcgctcacgtacccgcctcctacggcaggaccagtaagcggaaagcggaggcctggcgcccgctgtgattggccgattttaaaatcccctgccaggctggccgagcggcaaaaagttcgcgctgctggtcccgcgcgggcggcccctgggctttgtgtccaccaggacagcgggccgggctccctgcaggcgcgggcggcgccgaacggtgctcagcaaccacccggacagggccaggccgttttctcccgctcaggcattagtcgttggctgtgggccgccgcgggaagttgaggcctaccacggaggaggctgctgaggtggatctcaggggatccgcaagggctccctcacccttgccgggaccctgggaacccgaaacaaaatcctacgccaccagcccgccgaatgcgccccctcggccgggggtcctgggtcttcagagaagaactcggccgaatgcggtcagaaagcccgcgaaccgcctggacctgcaggccccgccgcttggagctcccgcctttcccgaccgagcccgtgtctgctcgtgtgtctcactgatgtcttaggtctcaaaaaaaaaagaaaagaaaaggtttttagtagacagaagagaaatggggccgtgggttcgtggtcccagggggaaactgacgtcgcatgaggtcgtcgtccctcagcttgagctcagcggaacataagcttgcagaggtggaaaccacggaaggtttgggtgtcttggagctctctggacaccgaagcccggacacagtcccggggtccgcaccgcctgtgacctgtggcgggaccgccggggtgggcgttttctcagctggcgcgcgcgctggtctccaggaggtaaggcccgccctgcaggcaacaccggtgcttgggctcctgctgagcagttctttcctgcgagtaacagaaccagggagggaggtgggctgtggcctcccctgcccctacagtcgtctcctgcagctcccaccatgctggactcatcagcagcagagcaagtgacccgactgacgctgaagctcttgggacagaagctggagcaagaacggcagaacgtggaagggggacctgagggcctccacctcgagccaggaaatgaggaccggccggacgatgccctgcagactgctctgaagagaaggagggaccttctgcagagactccgggaggccaccctcatgcacataaccctggaagggtcttccagtcatggccatcctgcccggagaggcgcctgtacctggcccaggctggcctgagcctgatgctgggggtgcctctgtggcgttggggctccccgtccccgtgtgcagcagctctgcatcggccttgcaggaacaacacctcctggacgagctctctcgggcccaggcctggagcgggccaagcagaggagccctcgggtcagccctgcccccagagctgccccccacgggcatcctacccactgcctccccatccccgctggccccagacccgccaaggatcatcctgcctacggtcccccagcctcctgccaccatcattcagcagctccctcagcagccactcatagcacagattcctcctccccaggccttccctactcaacggtcaggaagtattaaggaagacatggtggagctgctgctgctgcagaacgcacaggtgcaccagttggtcctgcagaactggatgctcaaggccctgcccccagccctgcaggacccgccacatgtgcccccgagggtcccacgagctgccaggccaaggctgcctgccgtgcaccaccaccaccaccaccaccatgctgtgtggccacctggggctgccactgtcctccagcccgcccccagcctgtggacgcctggcccaccctgagtgtgagtcacagagaccctggccggggcaccctccacccccaggcttcctcagggctgtgggctgtggcgggactatggaagggagcagggagagaccctgccaccacccggagtggctacgcgagtgtggactgcaggctcctcctggggaagctgggcaggctcgctttctggtcacggggccattccagggggcatcccttgctccgggtcccctgcagtgaggggcctgtgaaccccaccagggcaacagcccctcccagggacccctcctttcctgtagggcggcgccggcccacctgggagcctcagatccccctcttccatcacggaggtaaagttgaggccgtggacgccaccagcctgatgaaataaagatttcatccagaaagagtttaagaaaatctcagctcaggagccagaacagaaaagatcaatagctttagccacatggaagtgtgaacatcctgatggggaaaataccacaaagtctaatttaataactagggacacctgtgtccacagctgtggcacagactcccactaaagaagtaggggtgcatggctcatgcctgtaatcccagcactttaagaggctgaggcaggaggatcacttgagctcaggaattcgagaccagcctgggtcacatagcaagaccccgtctctacaaaaaataaatttaaaaaactagccaggtgtggtgatatgcgcctgttatctcagcagctctgggggctgaggtgggaggattgcttgagcccaggagttagaagctgcagtgagctctgatggaaccactgcactatagcctggaccacagagcaggcccctgtctcaaaaataaaataaaaaagtgaaagaagc

SEQ ID NO: 28892 - protein, 216 aa, Homo sapiens; identical to SEQ ID NO: 28884

SEQ ID NO: 28893 - DNA, 3574 bp, Homo sapiens
cgctgattggctgtggccgcggcgggggcgggacctggcggagagcggcggattcaagatggcggcggccaggaggcggcttccagcggagccggcgggaaaaagcgagacctccgcggcggcttccgccggaccgcgtcctctcctggcagggggcggtggcgggcaccggagccgcccttaggacttcacgccagagcagctagagaagaagcccctaatgtttaccttcgtcctcccggcctccacctttctgcgccgctgctcttgctcaacttccatctccctcagactccgcgcgggccgcccggcggtgacggggctgacacagagcagccttcgctctatttacactccctcccccgcgcttgggctcgccctccccccgcgacaactgtcacgcagccgcggccccgcccccgacacgcgccgccaatcagggggctgcgtttccggtctcgcgcacgcgcgctctgggcggtgcagcctgggcggagccccgccctttacgctcgccggccacagattggtgcgctcacgtacccgcctcctacggcaggaccagtaagcggaaagcggaggcctggcgcccgctgtgattggccgattttaaaatcccctgccaggctggccgagcggcaaaaagttcgcgctgctggtcccgcgcgggcggcccctgggctttgtgtccaccaggacagcgggccgggctccctgcaggcgcgggcggcgccgaacggtgctcagcaaccacccggacagggccaggccgttttctcccgctcaggcattagtcgttggctgtgggccgccgcgggaagttgaggcctaccacggaggaggctgctgaggtggatctcaggggatccgcaagggctccctcacccttgccgggaccctgggaacccgaaacaaaatcctacgccaccagcccgccgaatgcgccccctcggccgggggtcctgggtcttcagagaagaactcggccgaatgcggtcagaaagcccgcgaaccgcctggacctgcaggccccgccgcttggagctcccgcctttcccgaccgagcccgtgtctgctcgtgtgtctcactgatgtcttaggtctcaaaaaaaaaagaaaagaaaaggtttttagtagacagaagagaaatggggccgtgggttcgtggtcccagggggaaactgacgtcgcatgaggtcgtcgtccctcagcttgagctcagcggaacataagcttgcagaggtggaaaccacggaaggtttgggtgtcttggagctctctggacaccgaagcccggacacagtcccggggtccgcaccgcctgtgacctgtggcgggaccgccggggtgggcgttttctcagctggcgcgcgcgtaggtggaacttgggaaactaactggagcgaagtggcaaaaaaccaagacagggccggtgacctcgcgcaggccgtccttaactgtggagtattccttcagctaacccctttatttcatgtgtccaagtctggtttctgggtttctttgtagtcctccgggcctgttcgtgcgccttcacttgcaaaaggttcgtcgtggagggccgtgtgcttgtttgcagcagtaacgatgcccttcccgagcgtgctggagtggctcctcgctgacgcaagctcaccttgcagcctcctcagcaactgcaacttaaacgcgccctcaggaagccctggaatctcgctcagaattttttttctttttttgagacagtctcgctgcgacgcccaggctatagcgcaatggcgcgatctcggctccctgcaacctccctcaggaagccgtggaagctcgaccgccagaaacttccttctcctgactcaggccacagtcttctgtgtggctggtctccaggaggtaaggcccgccctgcaggcaacaccggtgcttgggctcctgctgagcagttctttcctgcgagtaacagaaccagggagggaggtgggctgtggcctcccctgcccctacagtcgtctcctgcagctcccaccatgctggactcatcagcagcagagcaagtgacccgactgacgctgaagctcttgggacagaaagcctcttagtcattcctggagcacacagggcctttgcgtggagccaccgtctctgtcacggtctctcttcctcacagaagctggagcaagaacggcagaacgtggaagggggacctgagggcctccacctcgagccaggaaatgaggaccggccggacgatgccctgcagactgctctgaagagaaggagggaccttctgcagagactccgggaggccaccctcatgcacataaccctggaagggtcttccagtcatggccatcctgcccggagaggcgcctgtacctggcccaggctggcctgagcctgatgctgggggtgcctctgtggcgttggggctccccgtccccgtgtgcagcagctctgcatcggccttgcaggaacaacacctcctggacgagctctctcgggcccaggcctggagcgggccaagcagaggagccctcgggtcagccctgcccccagagctgccccccacgggcatcctacccactgcctccccatccccgctggccccagacccgccaaggatcatcctgcctacggtcccccagcctcctgccaccatcattcagcagctccctcagcagccactcatagcacagattcctcctccccaggccttccctactcaacggtcaggaagtattaaggaagacatggtggagctgctgctgctgcagaacgcacaggtgcaccagttggtcctgcagaactggatgctcaaggccctgcccccagccctgcaggacccgccacatgtgcccccgagggtcccacgagctgccaggccaaggctgcctgccgtgcaccaccaccaccaccaccaccatgctgtgtggccacctggggctgccactgtcctccagcccgcccccagcctgtggacgcctggcccaccctgagtggcggcgccggcccacctgggagcctcagatccccctcttccatcacggaggtaaagttgaggccgtggacgccaccagcctgatgaaataaagatttcatccagaaagagtttaagaaaatctcagctcaggagccagaacagaaaagatcaatagctttagccacatggaagtgtgaacatcctgatggggaaaataccacaaagtctaatttaataactagggacacctgtgtccacagctgtggcacagactcccactaaagaagtaggggtgcatggctcatgcctgtaatcccagcactttaagaggctgaggcaggaggatcacttgagctcaggaattcgagaccagcctgggtcacatagcaagaccccgtctctacaaaaaataaatttaaaaaactagccaggtgtggtgatatgcgcctgttatctcagcagctctgggggctgaggtgggaggattgcttgagcccaggagttagaagctgcagtgagctctgatggaaccactgcactatagcctggaccacagagcaggcccctgtctcaaaaataaaataaaaaagtgaaagaagc

SEQ ID NO: 28894 - protein, 216 aa, Homo sapiens; identical to SEQ ID NO: 28884

SEQ ID NO: 28895 - DNA, 871 bp, Homo sapiens
gtagaccacacatagccacttcctcccaaagagtgcaataaagaaaaggagggaaagagccactttattgtggagaaaactggcagactccacctcagccaagtgacgcaggtcagcctcacagttatagtcgaggtgacagtgtgtgtccctgatgtgatggggtgacagtggcacttcacccctagatgcttcctttctgtaacctgcagtcccagtctaaccaggagataatagacacattttaattgagggacattcttcaaaatatctgcccagtactcttcgaaactgtcaaggtcatcaaaaacgaggaaagtctgagaaggagcctaaagacacataactcaatgtaatggggtgttctgatggataccacattagggacatgaggcaaacctaaggaaactgtcaaagtgtggacttcagttacttgtgtctcaatattggttcattaatcataacaaatgggccaggtgcactggctttcactcaaaaattagctgggcatgatggcacgtacctgtagtcccagctactcgagaggctgaggcagaagaatcgcttgaaactgggaagcagaggttgcagtgagccaagattgcaccattgcactctagcctgggcgtcgcagcgagactctgtctcaaaaaaaatatatatatatataacatatgtagcacactaaggtctgggcccctgctgctgacatcccccacatgtcagtctgcctgctagtgggattgactaactcatcaacgtggagtttaatgcccaaccaagtgcagaccacgctcctgttttgcgtcaccctctgcgaagcttcctgcaaacttgactccctgcccagtgcccccagccccaaggtggg

SEQ ID NO: 28896 - protein, 49 aa, Homo sapiens
MSVCLLVGLTNSSTWSLMPNQVQTTLLFCVTLCEASCKLDSLPSAPSPK

SEQ ID NO: 28897 - DNA, 1641 bp, Homo sapiens
cgctgctggtcccgcgcgggcggcccctgggctttgtgtccaccaggacagcgggccgggctccctgcaggcgcgggcggcgccgaacggtgctcagcaaccacccggacagggccaggccgttttctcccgctcaggcattagtcgttggctgtgggccgccgcgggaagttgaggcctaccacggaggaggctgctgaggtggatctcaggggatccgcaagggctccctcacccttgccgggaccctgggaacccgaaacaaaatcctacgccaccagcccgccgaatgcgccccctcggccgggggtcctgggtcttcagagaagaactcggccgaatgcggtcagaaagcccgcgaaccgcctggacctgcaggccccgccgcttggagctcccgcctttcccgaccgagcccgtgtctgctcgtgtgtctcactgatgtcttaggtctcaaaaaaaaaagaaaagaaaaggtttttagtagacagaagagaaatggggccgtgggttcgtggtcccagggggaaactgacgtcgcatgaggtcgtcgtccctcagcttgagctcagcggaacataagcttgcagaggtggaaaccacggaaggtttgggtgtcttggagctctctggacaccgaagcccggacacagtcccggggtccgcaccgcctgtgacctgtggcgggaccgccggggtgggcgttttctcagctggcgcgcgcgtaggtggaacttgggaaactaactggagcgaagtggcaaaaaaccaagacagggccggtgacctcgcgcaggccgtccttaactgtggagtattccttcagctaacccctttatttcatgtgtccaagtctggtttctgggtttctttgtagtcctccgggcctgttcgtgcgccttcacttgcaaaaggttcgtcgtggagggccgtgtgcttgtttgcagcagtaacgatgcccttcccgagcgtgctggagtggctcctcgctgacgcaagctcaccttgcagcctcctcagcaactgcaacttaaacgcgccctcaggaagccctggaatctcgctcagaattttttttctttttttgagacagtctcgctgcgacgcccaggctatagcgcaatggcgcgatctcggctccctgcaacctccctcaggaagccgtggaagctcgaccgccagaaacttccttctcctgactcaggccacagtcttctgtgtggtgagcggggtgtccagcggtctcctggttcccagactcggaattgggtggtttgagcaaactctgggcagtgggctcattagagcaggggccaggcaggcaacacagccaagcgagcaggggctgcacccacaggatcacactttccaggaacagagacccagaccgcgcctgaatctcacaactgttacgtgttacaatacatttacaactgtgggactgaggggatgtgcccaggtctgggcccctgctgctgacatcccccacatgtcagtctgcctgctagtgggattgactaactcatcaacgtggagtttaatgcccaaccaagtgcagaccacgctcctgttttgcgtcaccctctgcgaagcttcctgcaaacttgactccctgcccagtgcccccagccccaaggtggg

SEQ ID NO: 28898 - protein, 227 aa, Homo sapiens
MPFPSVLEWLLADASSPCSLLSNCNLNAPSGSPGISLRIFFLFLRQSRCDAQAIAQWRDLGSLQPPSGSRGSSTARNFLLLTQATVFCVVSGVSSGLLVPRLGIGWFEQTLGSGLIRAGARQATQPSEQGLHPQDHTFQEQRPRPRLNLTTVTCYNTFTTVGLRGCAQVWAPAADIPHMSVCLLVGLTNSSTWSLMPNQVQTTLLFCVTLCEASCKLDSLPSAPSPK

SEQ ID NO: 28899 - DNA, 1334 bp, Homo sapiens
gcaaaaagttcgcgctgctggtcccgcgcgggcggcccctgggctttgtgtccaccaggacagcgggccgggctccctgcaggcgcgggcggcgccgaacggtgctcagcaaccacccggacagggccaggccgttttctcccgctcaggcattagtcgttggctgtgggccgccgcgggaagttgaggcctaccacggaggaggctgctgaggtggatctcaggggatccgcaagggctccctcacccttgccgggaccctgggaacccgaaacaaaatcctacgccaccagcccgccgaatgcgccccctcggccgggggtcctgggtcttcagagaagaactcggccgaatgcggtcagaaagcccgcgaaccgcctggacctgcaggccccgccgcttggagctcccgcctttcccgaccgagcccgtgtctgctcgtgtgtctcactgatgtcttaggtctcaaaaaaaaaagaaaagaaaaggtttttagtagacagaagagaaatggggccgtgggttcgtggtcccagggggaaactgacgtcgcatgaggtcgtcgtccctcagcttgagctcagcggaacataagcttgcagaggtggaaaccacggaaggtttgggtgtcttggagctctctggacaccgaagcccggacacagtcccggggtccgcaccgcctgtgacctgtggcgggaccgccggggtgggcgttttctcagctggcgcgcgcgtaggtggaacttgggaaactaactggagcgaagtggcaaaaaaccaagacagggccggtgacctcgcgcaggccgtccttaactgtggagtattccttcagctaacccctttatttcatgtgtccaagtctggtttctgggtttctttgtagtcctccgggcctgttcgtgcgccttcacttgcaaaaggttcgtcgtggagggccgtgtgcttgtttgcagcagtaacgatgcccttcccgagcgtgctggagtggctcctcgctgacgcaagctcaccttgcagcctcctcagcaactgcaacttaaacgcgccctcaggaagccctggaatctcgctcagaattttttttctttttttgagacagtctcgctgcgacgcccaggctatagcgcaatggcgcgatctcggctccctgcaacctccctcaggaagccgtggaagctcgaccgccagaaacttccttctcctgactcaggccacagtcttctgtgtggtctgggcccctgctgctgacatcccccacatgtcagtctgcctgctagtgggattgactaactcatcaacgtggagtttaatgcccaaccaagtgcaga

SEQ ID NO: 28900 - protein, 121 aa, Homo sapiens
MPFPSVLEWLLADASSPCSLLSNCNLNAPSGSPGISLRIFFLFLRQSRCDAQAIAQWRDLGSLQPPSGSRGSSTARNFLLLTQATVFCVVWAPAADIPHMSVCLLVGLTNSSTWSLMPNQV

SEQ ID NO: 28901 - DNA, 2286 bp, Homo sapiens
aagcgcgggggagggagtgtaaatagagcgaaggctgctctgtgtcagccccgtcaccgccgggcggcccgcgcggagtctgagggagatggaagttgagcaagagcagcggcgcagaaaggtggaggccgggaggacgaagcttgctcacttccgacagagaaaaacaaaaggtgacagttcgcattcggagaaaaagacggcgaagaggaagggctcggctgtcgatgcgtctgtccaggaggagagtccggtaaccaaggaggacagcgcactctgtggaggaggggacatttgcaaaagcacatcatgtgacgacacccctgatggggcaggaggggcctttgcagctcagccggaggactgtgatggagagaagagagaggacttggaacagctgcagcagaagcaagtcaatgaccatcctccagagcagtgtgggatgttcacagtcagtgaccacccaccagaacagcatgggatgttcacagtcggtgaccacccaccagaacagcgtgggatgttcacagtcagtgaccacccaccagaacagcatgggatgttcacagtcagtgaccacccaccagaacagcgtgggatgttcacaatcagtgaccaccaaccggaacagcgtgggatgttcacagtcagtgaccacacaccagaacagcgtgggatcttcacaatcagagtgtgaacaagaatgtgaacttgccattactgacctggagagcggccgtgaagatgaggctggcctgcatcagagtcaggccgtgcatggccttgagctggaggcgctgcgcctgagtctgagcaacatgcacacggcgcagctggagctgacacaggccaacctccagaaggagaaggagacggcattgacggagctgcgggagatgctcaacagccggcgtgcccaggagctggccctgctacagagcaggcagcagcacgagctggagctcctcagggagcagcacgcacgggagaaggaggaggtggtgctcaggtgtggacaggaagcagctgagctgaaggagaagttacaatcagaaatggagaaaaacgcccagatagtaaagaccctgaaggaagattgggaatctgaaaaagatttatgtttagaaaatctacgcaaagaactgtctgcaaagcatcaatcagaaatggaggatttacaaaaccagtttcagaaagaattggcagaacagagagctgagttggagaagatttttcaagacaaaaaccaggctgaacgggcccttaggaacctggagagtcatcatcaagcagccattgagaagttacgtgaagacctgcagtccgagcacggccggtgtttagaagacttggagttcaagttcaaagagagcgagaaagaaaaacagctggagttagagaatcttcaagcatcatatgaagacctgaaggcacaatcacaagaagagatcaggcgcttgtggtcccagcttgattctgccaggaccagtagacaggaattgagtgagctacatgagcaactcctggcgcgcacctctcgtgtggaagatttagaacagctgaagcagcgagaaaaaacccagcatgagtccgaactggagcaactgaggatttattttgaaaagaagttaagggatgctgagaaaacttaccaagaagacctaaccctgttacagcagaggctgcagggggcgagggaagatgctcttctggactctgtggaagttgggttgtcctgtgtgggtttagaagagaaacctgagaaaggaagaaaagatcacgttgatgaactcgagcctgagcgacataaggagagcctgccacgcttccaggcggagttagaagaaagccacaggcaccagctggaagcgctggagtctcccctctgcatccagcacgaggggcatgtctcagacagatgctgcgtagagacttcagcattgggacacgagtggcgtctggaaccctctgaagggcacagccaagagcttccctgggtgcatctccagggtgtgcaggacggggacttggaggccgacacagagcgggcagccagagtcttgggtctggaaactgagcacaaggtgcaactttcgcttcttcagactgagctcaaagaagaaattgaactcctaaaaatagaaaatagaaatttgtatgggaagttgcagcatgaaactcgtctgaaggacgatttggagaaggtaaaacacaatctaattgaagaccaccagaaggaactaaataatgctaagcaaaagactgagctgatgaaacaggaattcc

SEQ ID NO: 28902 - protein, 652 aa, Homo sapiens
MGQEGPLQLSRRTVMERRERTWNSCSRSKSMTILQSSVGCSQSVTTHQNSMGCSQSVTTHQNSVGCSQSVTTHQNSMGCSQSVTTHQNSVGCSQSVTTNRNSVGCSQSVTTHQNSVGSSQSECEQECELAITDLESGREDEAGLHQSQAVHGLELEALRLSLSNMHTAQLELTQANLQKEKETALTELREMLNSRRAQELALLQSRQQHELELLREQHAREKEEVVLRCGQEAAELKEKLQSEMEKNAQIVKTLKEDWESEKDLCLENLRKELSAKHQSEMEDLQNQFQKELAEQRAELEKIFQDKNQAERALRNLESHHQAAIEKLREDLQSEHGRCLEDLEFKFKESEKEKQLELENLQASYEDLKAQSQEEIRRLWSQLDSARTSRQELSELHEQLLARTSRVEDLEQLKQREKTQHESELEQLRIYFEKKLRDAEKTYQEDLTLLQQRLQGAREDALLDSVEVGLSCVGLEEKPEKGRKDHVDELEPERHKESLPRFQAELEESHRHQLEALESPLCIQHEGHVSDRCCVETSALGHEWRLEPSEGHSQELPWVHLQGVQDGDLEADTERAARVLGLETEHKVQLSLLQTELKEEIELLKIENRNLYGKLQHETRLKDDLEKVKHNLIEDHQKELNNAKQKTELMKQE

SEQ ID NO: 28903 - DNA, 8192 bp, Homo sapiens
aagcgcgggggagggagtgtaaatagagcgaaggctgctctgtgtcagccccgtcaccgccgggcggcccgcgcggagtctgagggagatggaagttgagcaagagcagcggcgcagaaaggtggaggccgggaggacgaagcttgctcacttccgacagagaaaaacaaaaggtgacagttcgcattcggagaaaaagacggcgaagaggaagggctcggctgtcgatgcgtctgtccaggaggagagtccggtaaccaaggaggacagcgcactctgtggaggaggggacatttgcaaaagcacatcatgtgacgacacccctgatggggcaggaggggcctttgcagctcagccggaggactgtgatggagagaagagagaggacttggaacagctgcagcagaagcaagtcaatgaccatcctccagagcagtgtgggatgttcacagtcagtgaccacccaccagaacagcatgggatgttcacagtcggtgaccacccaccagaacagcgtgggatgttcacagtcagtgaccacccaccagaacagcatgggatgttcacagtcagtgaccacccaccagaacagcgtgggatgttcacaatcagtgaccaccaaccggaacagcgtgggatgttcacagtcagtgaccacacaccagaacagcgtgggatcttcacaatcagtgaccacccagcagaacagcgtgggatgttcacaaaggagtgtgaacaagaatgtgaacttgccattactgacctggagagcggccgtgaagatgaggctggcctgcatcagagtcaggccgtgcatggccttgagctggaggcgctgcgcctgagtctgagcaacatgcacacggcgcagctggagctgacacaggccaacctccagaaggagaaggagacggcattgacggagctgcgggagatgctcaacagccggcgtgcccaggagctggccctgctacagagcaggcagcagcacgagctggagctcctcagggagcagcacgcacgggagaaggaggaggtggtgctcaggtgtggacaggaagcagctgagctgaaggagaagttacaatcagaaatggagaaaaacgcccagatagtaaagaccctgaaggaagattgggaatctgaaaaagatttatgtttagaaaatctacgcaaagaactgtctgcaaagcatcaatcagaaatggaggatttacaaaaccagtttcagaaagaattggcagaacagagagctgagttggagaagatttttcaagacaaaaaccaggctgaacgggcccttaggaacctggagagtcatcatcaagcagccattgagaagttacgtgaagacctgcagtccgagcacggccggtgtttagaagacttggagttcaagttcaaagagagcgagaaagaaaaacagctggagttagagaatcttcaagcatcatatgaagacctgaaggcacaatcacaagaagagatcaggcgcttgtggtcccagcttgattctgccaggaccagtagacaggaattgagtgagctacatgagcaactcctggcgcgcacctctcgtgtggaagatttagaacagctgaagcagcgagaaaaaacccagcatgagtccgaactggagcaactgaggatttattttgaaaagaagttaagggatgctgagaaaacttaccaagaagacctaaccctgttacagcagaggctgcagggggcgagggaagatgctcttctggactctgtggaagttgggttgtcctgtgtgggtttagaagagaaacctgagaaaggaagaaaagatcacgttgatgaactcgagcctgagcgacataaggagagcctgccacgcttccaggcggagttagaagaaagccacaggcaccagctggaagcgctggagtctcccctctgcatccagcacgaggggcatgtctcagacagatgctgcgtagagacttcagcattgggacacgagtggcgtctggaaccctctgaagggcacagccaagagcttccctgggtgcatctccagggtgtgcaggacggggacttggaggccgacacagagcgggcagccagagtcttgggtctggaaactgagcacaaggtgcaactttcgcttcttcagactgagctcaaagaagaaattgaactcctaaaaatagaaaatagaaatttgtatgggaagttgcagcatgaaactcgtctgaaggacgatttggagaaggtaaaacacaatctaattgaagaccaccagaaggaactaaataatgctaagcaaaagactgagctgatgaaacaggaattccaaagaaaagaaacggactggaaagttatgaaggaggagctacagcgggaagctgaggagaagttaacattgatgctacttgaactgagagaaaaggctgaatccgagaaacagaccatcataaacaagtttgagcttcgagaagctgaaatgaggcagcttcaggaccaacaggcagcccagatcctggatctggagaggtccttgacggagcagcagggccgcctgcagcagctggaacaggacctcacttcagacgacgccctgcattgcagccagtgtgggcgggagccgcccacagcccaggacggggagcttgctgcgctccacgtgaaggaagactgcgccctgcagctgatgctggcccggagcaggtttttagaggaacgtaaagagatcaccgagaaattcagtgcggaacaagatgccttcctgcaggaggcccaggagcagcatgcccgtgagctgcagctcctccaggagagacaccagcagcagctcctgtcagtgacggcggagctcgaggccagacaccaggccgcgttgggcgagctgacagcctccttagagagcaagcagggggctctgctggctgcacgtgtggccgaactgcagacaaaacacgctgccgacctcggcgctctggagaccagacatctgtccagccttgattctttggaatcctgttacctctctgaatttcagaccatccgtgaggagcacaggcaggccctagagctcttacgagcagactttgaggaacaactgtggaaaaaggactctcttcaccaaacgattttgactcaagagttggagaaactgaagcggaaacacgaaggggagctacagtctgtgcgggaccacctgcgaaccgaagtgagcacagagctcgccggaaccgtggctcacgagctgcagggagtgcaccagggtgaatttggaagtgaaaagaaaactgctttgcatgaaaaagaggagacacttcggcttcagagtgcacaggcacagccttttcaccaagaggagaaagagtctttgtctctgcagcttcaaaagaagaatcaccaagtccagcagctgaaagaccaggttttatccttaagtcacgagatagaagagtgccgctccgagttggaggtgctgcagcagaggcgggagcgggagaaccgggaaggcgcaaacctcctctccatgctcaaggccgacgtcaacctgtcccacagcgaaagaggggccctccaggacgccctgcgcaggctgctgggtttgtttggagagacgctgagggcagccgtcaccctgaggagccggatcggggagcgcgtggggctctgcctggatgacgcgggcgcaggcctggccctgtcgacagctctggcgctggaggagatgtggtctgatgtggccctcccggagttggacagaactttgtctgaatgtgcagagatgtcttccgtggctgaaattagcagccacatgtgtgaaagctttctcatgagcccagaaagtgtacgggagtgtgagcaacccatccggagggtcttccagagcctcagcctggccgtggacggcctcatggagatggccctggactccagcagccactggaagaagcacgccaaattcattctcgttttgaaaaagaatttagttttaagaatgaggagacagcacaggttgtcaggaagcaccaggagctgctggagtgtttgaaggaggagagcgcagcaaaggcagagctggcgctggagctgcacaagactcagggtacccttgagggattcaaggtggagacagcagatctgaaggaggtgctggccgggaaggaggattccgagcaccgtctggtgctggagctggagagcctgagacggcagctgcagcaggcggcccaggagcaggcggcgctgagggaggagtgcacccgtctgtggagtcggggggaggccacagccacggacgccgaggccagagaagctgctctccggaaggaagtggaggatctgaccaaagaacagtcggagaccaggaagcaggctgagaaggaccgctcagccctgctctcccagatgaagattttggagtctgagttagaagaacagctgtctcagcatcgcgggtgtgccaagcaggcggaggccgtcactgccctggaacagcaggtggcatctctggacaagcatttgcgcaaccagcggcaattcatggatgagcaggcagccgagcgggagcacgagcgcgaggagttccagcaggagattcagaggctggaggggcagctccgccaggcggccaagccgcagccctggggccctcgcgacagccagcaggcgccgctggatggagaggttgagttgttacaacaaaagttgagagaaaagttggatgaatttaatgaattggctatacagaaagagtcggcagatagacaagtgttaatgcaggaagaagaaattaaacgtctggaggagatgaacatcaacatcaggaaaaaagtggcccagctccaggaagaagtggaaaaacagaaaaacatcgtgaaagggctggaacaggataaagaggtgttaaagaaacagcagatgagtagcttgcttctggcgtccacgttgcagtctacactagatgcaggcagatgtcccgagcctccttcgggcagccctcctgagggtccagaaatacagttagaggtgacacagagagcactcctgcggcgcgagagcgaggttttggacttaaaagaacagctagaaaagatgaaaggtgacttagaaagtaaaaatgaagaaatactacatctgaacttaaaattggacatgcagaacagccagactgctgtcagcctcagagaacttgaggaagagaacacgagcttgaaggtcatatataccagaagttctgagattgaagagctgaaagccactattgaaaatctgcaagagaatcagaaacgattacaaaaggagaaagcagaggaaattgaacaactccatgaagtcattgagaagctgcagcacgagctgtccctcatggggcctgtggtgcacgaagtcagcgacagtcaggctggcagtctgcagagcgagctgctctgctcccaggccgggggccctcgtgggcaggccctacagggcgagctcgaggctgcgctggaagccaaggaggccctgagccggctgctggctgaccaggagcgcaggcacagccaggccctggaggccctgcagcagcgcctccagggcgcagaggaggctgcggagctacagctggctgagctggagcgcaatgtagccctcagggaggctgaggtcgaagacatggcctcccggatccaggagttcgaagcggccctgaaagcaaaggaagcgacgattgccgagagaaatttagaaatcgacgctctgaaccagcggaaggcggcccactctgccgagctggaggccgtcctgttggccttggcccgcatccgccgcgccctggagcagcagcccctggcagccggggcggcgcctcccgagctgcagtggctccgagcgcagtgtgcccgcctcagccgccagctgcaggtgctgcaccagcggttcctgaggtgccaggtggagctggacaggcggcaggcccgcagagccacagctcacacacgggtgcccggggcccacccacagcctcgcatggatggtggcgccaaggcccaggtcaccggcgacgtggaggcctcccatgatgctgctttggagccggttgtccctgacccacagggtgatctgcagcctgtcctggtgacgttgaaggatgcacctctctgcaagcaagaaggcgtgatgtcagtgctcaccgtctgccagaggcagctgcagtcggagctgctcttggtgaaaaatgaaatgcgcctgagtctggaggacggcggcaagggtaaagaaaaagtactggaagattgtcagctgccgaaggtcgatctcgtagctcaggtgaaacagcttcaggaaaaactgaaccgtttgctgtattccatgaccttccagaatgtggatgctgccgacaccaaatctctgtggcccatggcctcagcacacctgttggagagcagctggagtgatgattcctgtgacggagaagagcctgacatatcaccccacatagacacatgtgatgccaatacagccacggggggtgtaactgatgttatcaaaaatcaggccatagacgcgtgtgatgccaatacaaccccagggggtgtaactgatgttatcaaaaattgggattccttgataccagatgaaatgccagattctcccattcaagaaaaatcagaatgtcaggacatgtctctttcttcaccgaccagcgtacttggtggctcccgccaccagagccacactgcagaggctgggccccggaagagcccggtcgggatgctggacctgtcttcctggagctcccctgaggtcctcaggaaggactggaccctggagccctggcccagcctccccgtgacaccccactcaggagccctgagcctgtgcagtgccgacacatccctgggggacagggcggacacctcgctgccacagacccaggggccggggctgctttgttccccaggcgtgtctgcagcagcgctggcactgcagtgggccgagtctccgccggctgacgaccaccatgtgcagaggacggctgtggagaaagatgtcgaagattttatcacaacatcctttgattctcaagaaacattaagttcacctcctcctggattagaaggaaaagctgatagaagtgagaaaagtgacggctcgggttttggagcaagactgagcccggggtcaggaggccctgaggctcaaactgctggtcctgtgacccctgcttccatctctggaaggtttcagccgctgccggaagccatgaaggagaaggaagtgcgtccgaagcacgtgaaggctttactgcagatggtgcgtgacgagagccaccagatcctggcgctgtcagaaggccttgcacccccaagcggcgagccacacccaccccggaaggaagacgagatacaggacatctcgctccatgggggaaagacgcaggaagtgcccaccgcgtgccccgattggagaggggaccttctgcaggttgtgcaagaggcctttgaaaaagagcaggagatgcagggggttgagctgcagccccgactcagtggctcagatctggggggtcacagctccctgctcgaaaggctggagaagatcatccgtgagcagggagacctgcaggaaaagtccctggagcatcttcgcttgccggaccggagcagcctgctgtccgagatccaggcgctgcgtgcccagctgcgcatgacgcacctgcagaaccaggagaagctgcagcacttgcgcacggcgctgacaagcgcagaggcgcgcgggagccagcaggagcaccagctgcgcaggcaggttgaactgctggcttataaagtagagcaggagaagtgcattgctggtgacttgcagaagacgctgagtgaagagcaagagaaggcaaacagcgtgcagaagctcctggcggcggagcagactgtagtgcgagatttgaagtccgacctctgtgagagcaggcagaagagcgaacagctgtcccggtccctctgcgaggtgcagcaggaggtcctccagctgagatccatgctgagcagtaaggagaacgagctgaaggccgcgcttcaggagctggagagtgagcaggggaaggggcgtgccctgcagagccagctggaggaggagcagctgcggcacctgcagagggagagccagagtgccaaggccctggaggagctgcgggcgtctttggagacacagcgtgctcagagcag

SEQ ID NO: 28904 - protein, 1901 aa, Homo sapiens
MKILESELEEQLSQHRGCAKQAEAVTALEQQVASLDKHLRNQRQFMDEQAAEREHEREEFQQEIQRLEGQLRQAAKPQPWGPRDSQQAPLDGEVELLQQKLREKLDEFNELAIQKESADRQVLMQEEEIKRLEEMNINIRKKVAQLQEEVEKQKNIVKGLEQDKEVLKKQQMSSLLLASTLQSTLDAGRCPEPPSGSPPEGPEIQLEVTQRALLRRESEVLDLKEQLEKMKGDLESKNEEILHLNLKLDMQNSQTAVSLRELEEENTSLKVIYTRSSEIEELKATIENLQENQKRLQKEKAEEIEQLHEVIEKLQHELSLMGPVVHEVSDSQAGSLQSELLCSQAGGPRGQALQGELEAALEAKEALSRLLADQERRHSQALEALQQRLQGAEEAAELQLAELERNVALREAEVEDMASRIQEFEAALKAKEATIAERNLEIDALNQRKAAHSAELEAVLLALARIRRALEQQPLAAGAAPPELQWLRAQCARLSRQLQVLHQRFLRCQVELDRRQARRATAHTRVPGAHPQPRMDGGAKAQVTGDVEASHDAALEPVVPDPQGDLQPVLVTLKDAPLCKQEGVMSVLTVCQRQLQSELLLVKNEMRLSLEDGGKGKEKVLEDCQLPKVDLVAQVKQLQEKLNRLLYSMTFQNVDAADTKSLWPMASAHLLESSWSDDSCDGEEPDISPHIDTCDANTATGGVTDVIKNQAIDACDANTTPGGVTDVIKNWDSLIPDEMPDSPIQEKSECQDMSLSSPTSVLGGSRHQSHTAEAGPRKSPVGMLDLSSWSSPEVLRKDWTLEPWPSLPVTPHSGALSLCSADTSLGDRADTSLPQTQGPGLLCSPGVSAAALALQWAESPPADDHHVQRTAVEKDVEDFITTSFDSQETLSSPPPGLEGKADRSEKSDGSGFGARLSPGSGGPEAQTAGPVTPASISGRFQPLPEAMKEKEVRPKHVKALLQMVRDESHQILALSEGLAPPSGEPHPPRKEDEIQDISLHGGKTQEVPTACPDWRGDLLQVVQEAFEKEQEMQGVELQPRLSGSDLGGHSSLLERLEKIIREQGDLQEKSLEHLRLPDRSSLLSEIQALRAQLRMTHLQNQEKLQHLRTALTSAEARGSQQEHQLRRQVELLAYKVEQEKCIAGDLQKTLSEEQEKANSVQKLLAAEQTVVRDLKSDLCESRQKSEQLSRSLCEVQQEVLQLRSMLSSKENELKAALQELESEQGKGRALQSQLEEEQLRHLQRESQSAKALEELRASLETQRAQSSRLCVALKHEQTAKDNLQKELRIEHSRCEALLAQERSQLSELQKDLAAEKSRTLELSEALRHERLLTEQLSQRTQEACVHQDTQAHHALLQKLKEEKSRVVDLQAMLEKVQQQALHSQQQLEAEAQKHCEALRREKEVSATLKSTVEALHTQKRELRCSLEREREKPAWLQAELEQSHPRLKEQEGRKAARRSAEARQSPAAAEQWRKWQRDKEKLRELELQRQRDLHKIKQLQQTVRDLESKDEVPGSRLHLGSARRAAGSDADHLREQQRELEAMRQRLLSAARLLTSFTSQAVDRTVNDWTSSNEKAVMSLLHTLEELKSDLSRPTSSQKKMAAELQFQFVDVLLKDNVSLTKALSTVTQEKLELSRAVSKLEKLLKHHLQKGCSPSRSERSAWKPDETAPQSSLRRPDPGRLPPAASEEAHTSNVKMEKLYLHYLRAESFRKALIYQKKYLLLLIGGFQDSEQETLSMIAHLGVFPSKAERKITSRPFTRFRTAVRVVIAILRLRFLVKKWQEVDRKGALAQGKAPRPGPRARQPQSPPRTRESPPTRDVPSGHTRDPARGRRLAAAASPHSGGRATPSPNSRLERSLTASQDPEHSLTEYIHHLEVIQQRLGGVLPDSTSKKSCHPMIKQ

SEQ ID NO: 28905 - DNA, 8192 bp, Homo sapiens
gctctgtgtcagccccgtcaccgccgggcggcccgcgcggagtctgagggagatggaagttgagcaagagcagcggcgcagaaaggtggaggccgggaggacgaagcttgctcacttccgacagagaaaaacaaaaggtgacagttcgcattcggagaaaaagacggcgaagaggaagggctcggctgtcgatgcgtctgtccaggaggagagtccggtaaccaaggaggacagcgcactctgtggaggaggggacatttgcaaaagcacatcatgtgacgacacccctgatggggcaggaggggcctttgcagctcagccggaggactgtgatggagagaagagagaggacttggaacagctgcagcagaagcaagtcaatgaccatcctccagagcagtgtgggatgttcacagtcagtgaccacccaccagaacagcatgggatgttcacagtcggtgaccacccaccagaacagcgtgggatgttcacagtcagtgaccacccaccagaacagcatgggatgttcacagtcagtgaccacccaccagaacagcgtgggatgttcacaatcagtgaccaccaaccggaacagcgtgggatgttcacagtcagtgaccacacaccagaacagcgtgggatcttcacaatcagtgaccacccagcagaacagcgtgggatgttcacaaaggagtgtgaacaagaatgtgaacttgccattactgacctggagagcggccgtgaagatgaggctggcctgcatcagagtcaggccgtgcatggccttgagctggaggcgctgcgcctgagtctgagcaacatgcacacggcgcagctggagctgacacaggccaacctccagaaggagaaggagacggcattgacggagctgcgggagatgctcaacagccggcgtgcccaggagctggccctgctacagagcaggcagcagcacgagctggagctcctcagggagcagcacgcacgggagaaggaggaggtggtgctcaggtgtggacaggaagcagctgagctgaaggagaagttacaatcagaaatggagaaaaacgcccagatagtaaagaccctgaaggaagattgggaatctgaaaaagatttatgtttagaaaatctacgcaaagaactgtctgcaaagcatcaatcagaaatggaggatttacaaaaccagtttcagaaagaattggcagaacagagagctgagttggagaagatttttcaagacaaaaaccaggctgaacgggcccttaggaacctggagagtcatcatcaagcagccattgagaagttacgtgaagacctgcagtccgagcacggccggtgtttagaagacttggagttcaagttcaaagagagcgagaaagaaaaacagctggagttagagaatcttcaagcatcatatgaagacctgaaggcacaatcacaagaagagatcaggcgcttgtggtcccagcttgattctgccaggaccagtagacaggaattgagtgagctacatgagcaactcctggcgcgcacctctcgtgtggaagatttagaacagctgaagcagcgagaaaaaacccagcatgagtccgaactggagcaactgaggatttattttgaaaagaagttaagggatgctgagaaaacttaccaagaagacctaaccctgttacagcagaggctgcagggggcgagggaagatgctcttctggactctgtggaagttgggttgtcctgtgtgggtttagaagagaaacctgagaaaggaagaaaagatcacgttgatgaactcgagcctgagcgacataaggagagcctgccacgcttccaggcggagttagaagaaagccacaggcaccagctggaagcgctggagtctcccctctgcatccagcacgaggggcatgtctcagacagatgctgcgtagagacttcagcattgggacacgagtggcgtctggaaccctctgaagggcacagccaagagcttccctgggtgcatctccagggtgtgcaggacggggacttggaggccgacacagagcgggcagccagagtcttgggtctggaaactgagcacaaggtgcaactttcgcttcttcagactgagctcaaagaagaaattgaactcctaaaaatagaaaatagaaatttgtatgggaagttgcagcatgaaactcgtctgaaggacgatttggagaaggtaaaacacaatctaattgaagaccaccagaaggaactaaataatgctaagcaaaagactgagctgatgaaacaggaattccaaagaaaagaaacggactggaaagttatgaaggaggagctacagcgggaagctgaggagaagttaacattgatgctacttgaactgagagaaaaggctgaatccgagaaacagaccatcataaacaagtttgagcttcgagaagctgaaatgaggcagcttcaggaccaacaggcagcccagatcctggatctggagaggtccttgacggagcagcagggccgcctgcagcagctggaacaggacctcacttcagacgacgccctgcattgcagccagtgtgggcgggagccgcccacagcccaggacggggagcttgctgcgctccacgtgaaggaagactgcgccctgcagctgatgctggcccggagcaggtttttagaggaacgtaaagagatcaccgagaaattcagtgcggaacaagatgccttcctgcaggaggcccaggagcagcatgcccgtgagctgcagctcctccaggagagacaccagcagcagctcctgtcagtgacggcggagctcgaggccagacaccaggccgcgttgggcgagctgacagcctccttagagagcaagcagggggctctgctggctgcacgtgtggccgaactgcagacaaaacacgctgccgacctcggcgctctggagaccagacatctgtccagccttgattctttggaatcctgttacctctctgaatttcagaccatccgtgaggagcacaggcaggccctagagctcttacgagcagactttgaggaacaactgtggaaaaaggactctcttcaccaaacgattttgactcaagagttggagaaactgaagcggaaacacgaaggggagctacagtctgtgcgggaccacctgcgaaccgaagtgagcacagagctcgccggaaccgtggctcacgagctgcagggagtgcaccagggtgaatttggaagtgaaaagaaaactgctttgcatgaaaaagaggagacacttcggcttcagagtgcacaggcacagccttttcaccaagaggagaaagagtctttgtctctgcagcttcaaaagaagaatcaccaagtccagcagctgaaagaccaggttttatccttaagtcacgagatagaagagtgccgctccgagttggaggtgctgcagcagaggcgggagcgggagaaccgggaaggcgcaaacctcctctccatgctcaaggccgacgtcaacctgtcccacagcgaaagaggggccctccaggacgccctgcgcaggctgctgggtttgtttggagagacgctgagggcagccgtcaccctgaggagccggatcggggagcgcgtggggctctgcctggatgacgcgggcgcaggcctggccctgtcgacagctccggcgctggaggagacatggtctgatgtggccctcccggagttggacagaactttgtctgaatgtgcagagatgtcttccgtggctgaaattagcagccacatgcgtgaaagctttctcatgagcccagaaagtgtgcgggagtgtgagcagcccatccggagggtcttccagagcctcagcctggccgtggacggcctcatggagatggccctggactccagcaggcagctggaagaagcacgccaaattcattctcgttttgaaaaagaatttagttttaagaatgaggagacagcacaggttgtcaggaagcaccaggagctgctggagtgtttgaaggaggagagcgcagcaaaggcagagctggcgctggagctgcacaagactcagggtacccttgagggattcaaggtggagacagcagatctgaaggaggtgctggccgggaaggaggattccgagcaccgtctggtgctggagctggagagcctgagacggcagctgcagcaggcggcccaggagcaggcggcgctgagggaggagtgcacccgtctgtggagtcggggggaggccacagccacggacgccgaggccagagaagctgctctccggaaggaagtggaggatctgaccaaagaacagtcggagaccaggaagcaggctgagaaggaccgctcagccctgctctcccagatgaagattttggagtctgagttagaagaacagctgtctcagcatcgcgggtgtgccaagcaggcggaggccgtcactgccctggaacagcaggtggcatctctggacaagcatttgcgcaaccagcggcaattcatggatgagcaggcagccgagcgggagcacgagcgcgaggagttccagcaggagattcagaggctggaggggcagctccgccaggcggccaagccgcagccctggggccctcgcgacagccagcaggcgccgctggatggagaggttgagttgttacaacaaaagttgagagaaaagttggatgaatttaatgaattggctatacagaaagagtcggcagatagacaagtgttaatgcaggaagaagaaattaaacgtctggaggagatgaacatcaacatcaggaaaaaagtggcccagctccaggaagaagtggaaaaacagaaaaacatcgtgaaagggctggaacaggataaagaggtgttaaagaaacagcagatgagtagcttgcttctggcgtccacgttgcagtctacactagatgcaggcagatgtcccgagcctccttcgggcagccctcctgagggtccagaaatacagttagaggtgacacagagagcactcctgcggcgcgagagcgaggttttggacttaaaagaacagctagaaaagatgaaaggtgacttagaaagtaaaaatgaagaaatactacatctgaacttaaaattggacatgcagaacagccagactgctgtcagcctcagagaacttgaggaagagaacacgagcttgaaggtcatatataccagaagttctgagattgaagagctgaaagccactattgaaaatctgcaagagaatcagaaacgattacaaaaggagaaagcagaggaaattgaacaactccatgaagtcattgagaagctgcagcacgagctgtccctcatggggcctgtggtgcacgaagtcagcgacagtcaggctggcagtctgcagagcgagctgctctgctcccaggccgggggccctcgtgggcaggccctacagggcgagctcgaggctgcgctggaagccaaggaggccctgagccggctgctggctgaccaggagcgcaggcacagccaggccctggaggccctgcagcagcgcctccagggcgcagaggaggctgcggagctacagctggctgagctggagcgcaatgtagccctcagggaggctgaggtcgaagacatggcctcccggatccaggagttcgaagcggccctgaaagcaaaggaagcgacgattgccgagagaaatttagaaatcgacgctctgaaccagcggaaggcggcccactctgccgagctggaggccgtcctgttggccttggcccgcatccgccgcgccctggagcagcagcccctggcagccggggcggcgcctcccgagctgcagtggctccgagcgcagtgtgcccgcctcagccgccagctgcaggtgctgcaccagcggttcctgaggtgccaggtggagctggacaggcggcaggcccgcagagccacagctcacacacgggtgcccggggcccacccacagcctcgcatggatggtggcgccaaggcccaggtcaccggcgacgtggaggcctcccatgatgctgctttggagccggttgtccctgacccacagggtgatctgcagcctgtcctggtgacgttgaaggatgcacctctctgcaagcaagaaggcgtgatgtcagtgctcaccgtctgccagaggcagctgcagtcggagctgctcttggtgaaaaatgaaatgcgcctgagtctggaggacggcggcaagggtaaagaaaaagtactggaagattgtcagctgccgaaggtcgatctcgtagctcaggtgaaacagcttcaggaaaaactgaaccgtttgctgtattccatgaccttccagaatgtggatgctgccgacaccaaatctctgtggcccatggcctcagcacacctgttggagagcagctggagtgatgattcctgtgacggagaagagcctgacatatcaccccacatagacacatgtgatgccaatacagccacggggggtgtaactgatgttatcaaaaatcaggccatagacgcgtgtgatgccaatacaaccccagggggtgtaactgatgttatcaaaaattgggattccttgataccagatgaaatgccagattctcccattcaagaaaaatcagaatgtcaggacatgtctctttcttcaccgaccagcgtacttggtggctcccgccaccagagccacactgcagaggctgggccccggaagagcccggtcgggatgctggacctgtcttcctggagctcccctgaggtcctcaggaaggactggaccctggagccctggcccagcctccccgtgacaccccactcaggagccctgagcctgtgcagtgccgacacatccctgggggacagggcggacacctcgctgccacagacccaggggccggggctgctttgttccccaggcgtgtctgcagcagcgctggcactgcagtgggccgagtctccgccggctgacgaccaccatgtgcagaggacggctgtggagaaagatgtcgaagattttatcacaacatcctttgattctcaagaaacattaagttcacctcctcctggattagaaggaaaagctgatagaagtgagaaaagtgacggctcgggttttggagcaagactgagcccggggtcaggaggccctgaggctcaaactgctggtcctgtgacccctgcttccatctctggaaggtttcagccgctgccggaagccatgaaggagaaggaagtgcgtccgaagcacgtgaaggctttactgcagatggtgcgtgacgagagccaccagatcctggcgctgtcagaaggccttgcacccccaagcggcgagccacacccaccccggaaggaagacgagatacaggacatctcgctccatgggggaaagacgcaggaagtgcccaccgcgtgccccgattggagaggggaccttctgcaggttgtgcaagaggcctttgaaaaagagcaggagatgcagggggttgagctgcagccccgactcagtggctcagatctggggggtcacagctccctgctcgaaaggctggagaagatcatccgtgagcagggagacctgcaggaaaagtccctggagcatcttcgcttgccggaccggagcagcctgctgtccgagatccaggcgctgcgtgcccagctgcgcatgacgcacctgcagaaccaggagaagctgcagcacttgcgcacggcgctgacaagcgcagaggcgcgcgggagccagcaggagcaccagctgcgcaggcaggttgaactgctggcttataaagtagagcaggagaagtgcattgctggtgacttgcagaagacgctgagtgaagagcaagagaaggcaaacagcgtgcagaagctcctggcggcggagcagactgtagtgcgagatttgaagtccgacctctgtgagagcaggcagaagagcgaacagctgtcccggtccctctgcgaggtgcagcaggaggtcctccagctgagatccatgctgagcagtaaggagaacgagctgaaggccgcgcttcaggagctggagagtgagcaggggaaggggcgtgccctgcagagccagctggaggaggagcagctgcggcacctgcagagggagagccagagtgccaaggccctggaggagctgcgggcgtctttggagacacagcgtgctcagagcagtcgactctgcgtggcactgaaacacgagcagacgg

SEQ ID NO: 28906 - protein, 3336 aa, Homo sapiens; identical to SEQ ID NO: 3983

SEQ ID NO: 28907 - DNA, 8192 bp, Homo sapiens; identical to SEQ ID NO: 28905

SEQ ID NO: 28908 - protein, 3336 aa, Homo sapiens; identical to SEQ ID NO: 3983

SEQ ID NO: 28909 - DNA, 525 bp, Homo sapiens
gcgcgcacctcgcagaggccggcctgctcccgcggttccgcctcgcgctttcgggactccctttctcctgcccccgagtcatgggctctgcgcgctttattcccacgaaacctaggacagtggccatcaaaccgagcgctttttcacggagaaacccggggcgggagaaagacgggagcgcgtcccttgaaggcgcccggcgccagcgccgcgtgggttcccggcagcgtacgccaggcccggacgggcaggacgcgagcccaagggcgcgggaagaagacggcggccgggagcgccgcgggggcctttcacacagtaaggactgcaacgccgcgagaaacgcgcggggaaagcatctccgacggacgaggcgaaggcgcaccctggggagccactggaagatccagcctggggtccagcgcctgccgcgccccaccccctccgtgcagccacgccacgcccctgtagccccgccctgcagccacaccccgccccggcgtgcaccgcgcccagcccgcgccccac

SEQ ID NO: 28910 - protein, 147 aa, Homo sapiens
MGSARFIPTKPRTVAIKPSAFSRRNPGREKDGSASLEGARRQRRVGSRQRTPGPDGQDASPRAREEDGGRERRGGLSHSKDCNAARNARGKHLRRTRRRRTLGSHWKIQPGVQRLPRPTPSVQPRHAPVAPPCSHTPPRRAPRPARA

SEQ ID NO: 28911 - DNA, 8192 bp, Homo sapiens
gcgttgcagtccttactgtgtgaaaggcccccgcggcgctcccggccgccgtcttcttcccgcgcccttgggctcgcgtcctgcccgtccgggcctggcgtacgctgccgggaacccacgcggcgctggcgccgggcgccttcaagggacgcgctcccgtctttctcccgccccgggtttctccgtgaaaaagcgctcggtttgatggccactgtcctaggtttcgtgggaataaagcgcgcagagcccatgactcgggggcaggagaaagggagtcccgaaagcgcgaggcggaaccgcgggagcaggccggcctctgcgagcttgctcacttccgacagagaaaaacaaaaggtgacagttcgcattcggagaaaaagacggcgaagaggaagggctcggctgtcgatgcgtctgtccaggaggagagtccggtaaccaaggaggacagcgcactctgtggaggaggggacatttgcaaaagcacatcatgtgacgacacccctgatggggcaggaggggcctttgcagctcagccggaggactgtgatggagagaagagagaggacttggaacagctgcagcagaagcaagtcaatgaccatcctccagagcagtgtgggatgttcacagtcagtgaccacccaccagaacagcatgggatgttcacagtcggtgaccacccaccagaacagcgtgggatgttcacagtcagtgaccacccaccagaacagcatgggatgttcacagtcagtgaccacccaccagaacagcgtgggatgttcacaatcagtgaccaccaaccggaacagcgtgggatgttcacagtcagtgaccacacaccagaacagcgtgggatcttcacaatcagtgaccacccagcagaacagcgtgggatgttcacaaaggagtgtgaacaagaatgtgaacttgccattactgacctggagagcggccgtgaagatgaggctggcctgcatcagagtcaggccgtgcatggccttgagctggaggcgctgcgcctgagtctgagcaacatgcacacggcgcagctggagctgacacaggccaacctccagaaggagaaggagacggcattgacggagctgcgggagatgctcaacagccggcgtgcccaggagctggccctgctacagagcaggcagcagcacgagctggagctcctcagggagcagcacgcacgggagaaggaggaggtggtgctcaggtgtggacaggaagcagctgagctgaaggagaagttacaatcagaaatggagaaaaacgcccagatagtaaagaccctgaaggaagattgggaatctgaaaaagatttatgtttagaaaatctacgcaaagaactgtctgcaaagcatcaatcagaaatggaggatttacaaaaccagtttcagaaagaattggcagaacagagagctgagttggagaagatttttcaagacaaaaaccaggctgaacgggcccttaggaacctggagagtcatcatcaagcagccattgagaagttacgtgaagacctgcagtccgagcacggccggtgtttagaagacttggagttcaagttcaaagagagcgagaaagaaaaacagctggagttagagaatcttcaagcatcatatgaagacctgaaggcacaatcacaagaagagatcaggcgcttgtggtcccagcttgattctgccaggaccagtagacaggaattgagtgagctacatgagcaactcctggcgcgcacctctcgtgtggaagatttagaacagctgaagcagcgagaaaaaacccagcatgagtccgaactggagcaactgaggatttattttgaaaagaagttaagggatgctgagaaaacttaccaagaagacctaaccctgttacagcagaggctgcagggggcgagggaagatgctcttctggactctgtggaagttgggttgtcctgtgtgggtttagaagagaaacctgagaaaggaagaaaagatcacgttgatgaactcgagcctgagcgacataaggagagcctgccacgcttccaggcggagttagaagaaagccacaggcaccagctggaagcgctggagtctcccctctgcatccagcacgaggggcatgtctcagacagatgctgcgtagagacttcagcattgggacacgagtggcgtctggaaccctctgaagggcacagccaagagcttccctgggtgcatctccagggtgtgcaggacggggacttggaggccgacacagagcgggcagccagagtcttgggtctggaaactgagcacaaggtgcaactttcgcttcttcagactgagctcaaagaagaaattgaactcctaaaaatagaaaatagaaatttgtatgggaagttgcagcatgaaactcgtctgaaggacgatttggagaaggtaaaacacaatctaattgaagaccaccagaaggaactaaataatgctaagcaaaagactgagctgatgaaacaggaattccaaagaaaagaaacggactggaaagttatgaaggaggagctacagcgggaagctgaggagaagttaacattgatgctacttgaactgagagaaaaggctgaatccgagaaacagaccatcataaacaagtttgagcttcgagaagctgaaatgaggcagcttcaggaccaacaggcagcccagatcctggatctggagaggtccttgacggagcagcagggccgcctgcagcagctggaacaggacctcacttcagacgacgccctgcattgcagccagtgtgggcgggagccgcccacagcccaggacggggagcttgctgcgctccacgtgaaggaagactgcgccctgcagctgatgctggcccggagcaggtttttagaggaacgtaaagagatcaccgagaaattcagtgcggaacaagatgccttcctgcaggaggcccaggagcagcatgcccgtgagctgcagctcctccaggagagacaccagcagcagctcctgtcagtgacggcggagctcgaggccagacaccaggccgcgttgggcgagctgacagcctccttagagagcaagcagggggctctgctggctgcacgtgtggccgaactgcagacaaaacacgctgccgacctcggcgctctggagaccagacatctgtccagccttgattctttggaatcctgttacctctctgaatttcagaccatccgtgaggagcacaggcaggccctagagctcttacgagcagactttgaggaacaactgtggaaaaaggactctcttcaccaaacgattttgactcaagagttggagaaactgaagcggaaacacgaaggggagctacagtctgtgcgggaccacctgcgaaccgaagtgagcacagagctcgccggaaccgtggctcacgagctgcagggagtgcaccagggtgaatttggaagtgaaaagaaaactgctttgcatgaaaaagaggagacacttcggcttcagagtgcacaggcacagccttttcaccaagaggagaaagagtctttgtctctgcagcttcaaaagaagaatcaccaagtccagcagctgaaagaccaggttttatccttaagtcacgagatagaagagtgccgctccgagttggaggtgctgcagcagaggcgggagcgggagaaccgggaaggcgcaaacctcctctccatgctcaaggccgacgtcaacctgtcccacagcgaaagaggggccctccaggacgccctgcgcaggctgctgggtttgtttggagagacgctgagggcagccgtcaccctgaggagccggatcggggagcgcgtggggctctgcctggatgacgcgggcgcaggcctggccctgtcgacagctccggcgctggaggagacatggtctgatgtggccctcccggagttggacagaactttgtctgaatgtgcagagatgtcttccgtggctgaaattagcagccacatgcgtgaaagctttctcatgagcccagaaagtgtgcgggagtgtgagcagcccatccggagggtcttccagagcctcagcctggccgtggacggcctcatggagatggccctggactccagcaggcagctggaagaagcacgccaaattcattctcgttttgaaaaagaatttagttttaagaatgaggagacagcacaggttgtcaggaagcaccaggagctgctggagtgtttgaaggaggagagcgcagcaaaggcagagctggcgctggagctgcacaagactcagggtacccttgagggattcaaggtggagacagcagatctgaaggaggtgctggccgggaaggaggattccgagcaccgtctggtgctggagctggagagcctgagacggcagctgcagcaggcggcccaggagcaggcggcgctgagggaggagtgcacccgtctgtggagtcggggggaggccacagccacggacgccgaggccagagaagctgctctccggaaggaagtggaggatctgaccaaagaacagtcggagaccaggaagcaggctgagaaggaccgctcagccctgctctcccagatgaagattttggagtctgagttagaagaacagctgtctcagcatcgcgggtgtgccaagcaggcggaggccgtcactgccctggaacagcaggtggcatctctggacaagcatttgcgcaaccagcggcaattcatggatgagcaggcagccgagcgggagcacgagcgcgaggagttccagcaggagattcagaggctggaggggcagctccgccaggcggccaagccgcagccctggggccctcgcgacagccagcaggcgccgctggatggagaggttgagttgttacaacaaaagttgagagaaaagttggatgaatttaatgaattggctatacagaaagagtcggcagatagacaagtgttaatgcaggaagaagaaattaaacgtctggaggagatgaacatcaacatcaggaaaaaagtggcccagctccaggaagaagtggaaaaacagaaaaacatcgtgaaagggctggaacaggataaagaggtgttaaagaaacagcagatgagtagcttgcttctggcgtccacgttgcagtctacactagatgcaggcagatgtcccgagcctccttcgggcagccctcctgagggtccagaaatacagttagaggtgacacagagagcactcctgcggcgcgagagcgaggttttggacttaaaagaacagctagaaaagatgaaaggtgacttagaaagtaaaaatgaagaaatactacatctgaacttaaaattggacatgcagaacagccagactgctgtcagcctcagagaacttgaggaagagaacacgagcttgaaggtcatatataccagaagttctgagattgaagagctgaaagccactattgaaaatctgcaagagaatcagaaacgattacaaaaggagaaagcagaggaaattgaacaactccatgaagtcattgagaagctgcagcacgagctgtccctcatggggcctgtggtgcacgaagtcagcgacagtcaggctggcagtctgcagagcgagctgctctgctcccaggccgggggccctcgtgggcaggccctacagggcgagctcgaggctgcgctggaagccaaggaggccctgagccggctgctggctgaccaggagcgcaggcacagccaggccctggaggccctgcagcagcgcctccagggcgcagaggaggctgcggagctacagctggctgagctggagcgcaatgtagccctcagggaggctgaggtcgaagacatggcctcccggatccaggagttcgaagcggccctgaaagcaaaggaagcgacgattgccgagagaaatttagaaatcgacgctctgaaccagcggaaggcggcccactctgccgagctggaggccgtcctgttggccttggcccgcatccgccgcgccctggagcagcagcccctggcagccggggcggcgcctcccgagctgcagtggctccgagcgcagtgtgcccgcctcagccgccagctgcaggtgctgcaccagcggttcctgaggtgccaggtggagctggacaggcggcaggcccgcagagccacagctcacacacgggtgcccggggcccacccacagcctcgcatggatggtggcgccaaggcccaggtcaccggcgacgtggaggcctcccatgatgctgctttggagccggttgtccctgacccacagggtgatctgcagcctgtcctggtgacgttgaaggatgcacctctctgcaagcaagaaggcgtgatgtcagtgctcaccgtctgccagaggcagctgcagtcggagctgctcttggtgaaaaatgaaatgcgcctgagtctggaggacggcggcaagggtaaagaaaaagtactggaagattgtcagctgccgaaggtcgatctcgtagctcaggtgaaacagcttcaggaaaaactgaaccgtttgctgtattccatgaccttccagaatgtggatgctgccgacaccaaatctctgtggcccatggcctcagcacacctgttggagagcagctggagtgatgattcctgtgacggagaagagcctgacatatcaccccacatagacacatgtgatgccaatacagccacggggggtgtaactgatgttatcaaaaatcaggccatagacgcgtgtgatgccaatacaaccccagggggtgtaactgatgttatcaaaaattgggattccttgataccagatgaaatgccagattctcccattcaagaaaaatcagaatgtcaggacatgtctctttcttcaccgaccagcgtacttggtggctcccgccaccagagccacactgcagaggctgggccccggaagagcccggtcgggatgctggacctgtcttcctggagctcccctgaggtcctcaggaaggactggaccctggagccctggcccagcctccccgtgacaccccactcaggagccctgagcctgtgcagtgccgacacatccctgggggacagggcggacacctcgctgccacagacccaggggccggggctgctttgttccccaggcgtgtctgcagcagcgctggcactgcagtgggccgagtctccgccggctgacgaccaccatgtgcagaggacggctgtggagaaagatgtcgaagattttatcacaacatcctttgattctcaagaaacattaagttcacctcctcctggattagaaggaaaagctgatagaagtgagaaaagtgacggctcgggttttggagcaagactgagcccggggtcaggaggccctgaggctcaaactgctggtcctgtgacccctgcttccatctctggaaggtttcagccgctgccggaagccatgaaggagaaggaagtgcgtccgaagcacgtgaaggctttactgcagatggtgcgtgacgagagccaccagatcctggcgctgtcagaaggccttgcacccccaagcggcgagccacacccaccccggaaggaagacgagatacaggacatctcgctccatgggggaaagacgcaggaagtgcccaccgcgtgccccgattggagaggggaccttctgcaggttgtgcaagaggcctttgaaaaagagcaggagatgcagggggttgagctgcagccccgactcagtggctcagatctggggggtcacagctccctgctcgaaaggctggagaagatcatccgtgagcagggagacctgcaggaaaagtccctggagcatcttcgcttgccggaccggagcagcctgctgtccgagatccaggcgctgcgtgcccagctgcgcatgacgcacctgcagaaccaggagaagctgcagcacttgcgcacggcgctgacaagcgcagaggcgcgcgggagccagcaggagcaccagctgcgcaggcaggttgaactgctggcttataaagtagagcaggagaagtgcattgctggtgacttgcagaagacgctgagtgaagagcaagagaaggcaaacagcgtgcagaagctcctggcggcggagcagactgtagtgcgagatttgaagtccgacctctgtgagagcaggcagaagagcgaacagctgtcccggtccctctgcgaggtgcagcaggaggtcctccagctgagatccatgctg

SEQ ID NO: 28912 - protein, 3139 aa, Homo sapiens
MFTVSDHPPEQHGMFTVGDHPPEQRGMFTVSDHPPEQHGMFTVSDHPPEQRGMFTISDHQPEQRGMFTVSDHTPEQRGIFTISDHPAEQRGMFTKECEQECELAITDLESGREDEAGLHQSQAVHGLELEALRLSLSNMHTAQLELTQANLQKEKETALTELREMLNSRRAQELALLQSRQQHELELLREQHAREKEEVVLRCGQEAAELKEKLQSEMEKNAQIVKTLKEDWESEKDLCLENLRKELSAKHQSEMEDLQNQFQKELAEQRAELEKIFQDKNQAERALRNLESHHQAAIEKLREDLQSEHGRCLEDLEFKFKESEKEKQLELENLQASYEDLKAQSQEEIRRLWSQLDSARTSRQELSELHEQLLARTSRVEDLEQLKQREKTQHESELEQLRIYFEKKLRDAEKTYQEDLTLLQQRLQGAREDALLDSVEVGLSCVGLEEKPEKGRKDHVDELEPERHKESLPRFQAELEESHRHQLEALESPLCIQHEGHVSDRCCVETSALGHEWRLEPSEGHSQELPWVHLQGVQDGDLEADTERAARVLGLETEHKVQLSLLQTELKEEIELLKIENRNLYGKLQHETRLKDDLEKVKHNLIEDHQKELNNAKQKTELMKQEFQRKETDWKVMKEELQREAEEKLTLMLLELREKAESEKQTIINKFELREAEMRQLQDQQAAQILDLERSLTEQQGRLQQLEQDLTSDDALHCSQCGREPPTAQDGELAALHVKEDCALQLMLARSRFLEERKEITEKFSAEQDAFLQEAQEQHARELQLLQERHQQQLLSVTAELEARHQAALGELTASLESKQGALLAARVAELQTKHAADLGALETRHLSSLDSLESCYLSEFQTIREEHRQALELLRADFEEQLWKKDSLHQTILTQELEKLKRKHEGELQSVRDHLRTEVSTELAGTVAHELQGVHQGEFGSEKKTALHEKEETLRLQSAQAQPFHQEEKESLSLQLQKKNHQVQQLKDQVLSLSHEIEECRSELEVLQQRRERENREGANLLSMLKADVNLSHSERGALQDALRRLLGLFGETLRAAVTLRSRIGERVGLCLDDAGAGLALSTAPALEETWSDVALPELDRTLSECAEMSSVAEISSHMRESFLMSPESVRECEQPIRRVFQSLSLAVDGLMEMALDSSRQLEEARQIHSRFEKEFSFKNEETAQVVRKHQELLECLKEESAAKAELALELHKTQGTLEGFKVETADLKEVLAGKEDSEHRLVLELESLRRQLQQAAQEQAALREECTRLWSRGEATATDAEAREAALRKEVEDLTKEQSETRKQAEKDRSALLSQMKILESELEEQLSQHRGCAKQAEAVTALEQQVASLDKHLRNQRQFMDEQAAEREHEREEFQQEIQRLEGQLRQAAKPQPWGPRDSQQAPLDGEVELLQQKLREKLDEFNELAIQKESADRQVLMQEEEIKRLEEMNINIRKKVAQLQEEVEKQKNIVKGLEQDKEVLKKQQMSSLLLASTLQSTLDAGRCPEPPSGSPPEGPEIQLEVTQRALLRRESEVLDLKEQLEKMKGDLESKNEEILHLNLKLDMQNSQTAVSLRELEEENTSLKVIYTRSSEIEELKATIENLQENQKRLQKEKAEEIEQLHEVIEKLQHELSLMGPVVHEVSDSQAGSLQSELLCSQAGGPRGQALQGELEAALEAKEALSRLLADQERRHSQALEALQQRLQGAEEAAELQLAELERNVALREAEVEDMASRIQEFEAALKAKEATIAERNLEIDALNQRKAAHSAELEAVLLALARIRRALEQQPLAAGAAPPELQWLRAQCARLSRQLQVLHQRFLRCQVELDRRQARRATAHTRVPGAHPQPRMDGGAKAQVTGDVEASHDAALEPVVPDPQGDLQPVLVTLKDAPLCKQEGVMSVLTVCQRQLQSELLLVKNEMRLSLEDGGKGKEKVLEDCQLPKVDLVAQVKQLQEKLNRLLYSMTFQNVDAADTKSLWPMASAHLLESSWSDDSCDGEEPDISPHIDTCDANTATGGVTDVIKNQAIDACDANTTPGGVTDVIKNWDSLIPDEMPDSPIQEKSECQDMSLSSPTSVLGGSRHQSHTAEAGPRKSPVGMLDLSSWSSPEVLRKDWTLEPWPSLPVTPHSGALSLCSADTSLGDRADTSLPQTQGPGLLCSPGVSAAALALQWAESPPADDHHVQRTAVEKDVEDFITTSFDSQETLSSPPPGLEGKADRSEKSDGSGFGARLSPGSGGPEAQTAGPVTPASISGRFQPLPEAMKEKEVRPKHVKALLQMVRDESHQILALSEGLAPPSGEPHPPRKEDEIQDISLHGGKTQEVPTACPDWRGDLLQVVQEAFEKEQEMQGVELQPRLSGSDLGGHSSLLERLEKIIREQGDLQEKSLEHLRLPDRSSLLSEIQALRAQLRMTHLQNQEKLQHLRTALTSAEARGSQQEHQLRRQVELLAYKVEQEKCIAGDLQKTLSEEQEKANSVQKLLAAEQTVVRDLKSDLCESRQKSEQLSRSLCEVQQEVLQLRSMLSSKENELKAALQELESEQGKGRALQSQLEEEQLRHLQRESQSAKALEELRASLETQRAQSSRLCVALKHEQTAKDNLQKELRIEHSRCEALLAQERSQLSELQKDLAAEKSRTLELSEALRHERLLTEQLSQRTQEACVHQDTQAHHALLQKLKEEKSRVVDLQAMLEKVQQQALHSQQQLEAEAQKHCEALRREKERELELQRQRDLHKIKQLQQTVRDLESKDEVPGSRLHLGSARRAAGSDADHLREQQRELEAMRQRLLSAARLLTSFTSQAVDRTVNDWTSSNEKAVMSLLHTLEELKSDLSRPTSSQKKMAAELQFQFVDVLLKDNVSLTKALSTVTQEKLELSRAVSKLEKLLKHHLQKGCSPSRSERSAWKPDETAPQSSLRRPDPGRLPPAASEEAHTSNVKMEKLYLHYLRAESFRKALIYQKKYLLLLIGGFQDSEQETLSMIAHLGVFPSKAERKITSRPFTRFRTAVRVVIAILRLRFLVKKWQEVDRKGALAQGKAPRPGPRARQPQSPPRTRESPPTRDVPSGHTRDPARGRRLAAAASPHSGGRATPSPNSRLERSLTASQDPEHSLTEYIHHLEVIQQRLGGVLPDSTSKKSCHPMIKQ

SEQ ID NO: 28913 - DNA, 593 bp, Homo sapiens
agaaccccatggcagtgaacagaaccccacagcagtgaatagaaccccacagcagtgaatgaatagaaccccatggcagtgaacagaaccccacgacagtgagtgaatagaaccccacggcagtgaacagaaccctgtggcagtgaacgtgaatagaaccccacagcagtgaacagaaccccacagcagtgaggagaaccccatggcagtgaatgaatagaacccccatggcagtgaatagaaccccatggcaggcagtgaatagaaccccatggcagtgatcagaaagaaccccacggcagtgatcagaaccccacggcagtgaatagaaccccatggcagtgaatagaaccccatggcagtgaatagaaccccatggcagtgaatagaaccctatgggagtgaacagaactccatgggagtgaatgaatagaaccccacggcagtgaacagaaccccacagcagtgaatagaaccccacggcagtgaggagaaccccatggcagtgaatgaatagaacccccatggcagtgaatgaatagaaccccatggaagtgaatagaaccccgtggcagtgaattaaggaggtgcag

SEQ ID NO: 28914 - DNA, 917 bp, Homo sapiens
tctgcttaccacgggccgtggggccgccttccctgaacgcatgggtccaggccacatcctgccttggtgcctcctcacctgcagtgatgctgtccagcaggcttgtctgcccttttgtcgcgtgtggggtcttgagaaactttttgctcctctgacaccatggaggtttttcccaggtcacctcacagggttttaagttttgcttttgtgtgactctggggtgagcctgcagagttgttcttgcttgcacctgtctgggcagtggactcggcactgtgttgccaaacgcagcctccccttggtgcgcgtcctccccgtccccttgtgtgggtctttggctgctcccattggcgtgtccccgcccgaggcctctgtgtcctgctgctgctcccatctgtgtgtccccgctgaggcttctgggtccagccactgctcccgtctgtctgtccccgccccaggcctctgagtcctgctgctgctcccgtctttgtgtccccactcgaggcctctgggttgtgctgctgtgtcctgaagctctgaactggtttggctctgctctggagaccacccagggtccggagaccaggtcgggcttatgggaccctctgagctcacagctgtttctggagcattggtgtctgtcatgctgagggtccatccgtgtgtggggggtgtctgtgcaggtctctctttgttcttttcatcaagttttgtgatttttctgtgaggaccttgccttctgtagcacttggctgtgggtgtctcgtagcttggtgctgactctctccagtcacccagaggggccctccaggacgccctgcgcaggctgctgggtttgtttggagagacgctgagggcagccgtcaccctgaggagccggatcggggagcgcgtggggctctgcctggatgacgcgg

SEQ ID NO: 28915 - protein, 51 aa, Homo sapiens
MGPGHILPWCLLTCSDAVQQACLPFCRVWGLEKLFAPLTPWRFFPGHLTGF

SEQ ID NO: 28916 - DNA, 392 bp, Homo sapiens
tacagaaggccgagaccggggtttgggctaaatttgtcagctcccgtggacgtggcgctgactcatctcggctggggcgacgtcttccgtggctgaaattagcagccacatgcgtgaaagctttctcatgagcccagaaagtgtgcgggagtgtgagcagcccatccggagggtcttccagagcctcagcctggccgtggacggcctcatggagatggccctggactccagcaggcaggtgaggcccaggctcccggggtcctgtggagatgtgaacaactgagtagctgatgatgccacacgagcctggtggatgccggtgccaacgacgctcgcacgggtttctccccaaggaggaggcttttctgaaccagatctttgaggaagtgggc

SEQ ID NO: 28917 - protein, 57 aa, Homo sapiens
MRESFLMSPESVRECEQPIRRVFQSLSLAVDGLMEMALDSSRQVRPRLPGSCGDVNN

SEQ ID NO: 28918 - DNA, 926 bp, Homo sapiens
gagtggggcaggtatcaccctgacaaacagtttgggaagatcaggaaaggcaggtgagacctggtgcagaatccaggttgggtaatagatacatcgtcgaagatgtagcaagcaaagtaatatactcaactctggaacattgcacagaagcttttaaagcactctgtgacactttttgtaatgagggatctgaaggaaacggccccagagtcacccatccccacgggtctggttggcggggctggtgcctttcttctgcactcagtcaccatggctccgtctgtcaaactcaactctttttttttttttttttcttctcttggtgtggtaatttgtttgaagagccactccatccccaaattcaagattagaaagatccctgactgcttctcaagatccagaacattccttgacagagtatattcaccatttagaagtgatccagcaaagattgggaggggtactaccagattctacttcaaagaaatcctgccacccgatgattaaacagtgaataaaatgtcatggctctttcctgcgacaattctatttgaggaaaagatttgtttttcccttttcccaaggaagctcgtgggacagcatgggcactactcttcatgtgcggtgacaccagcccccagatgccttgaattaagtgtcctcacctttatgcatgactgcaaagccagctggagcattttctatggagcctccgtatgttttaggcccatgaccttcgtgaggtgacgggcactcactcccatgagccctggctgtgtgctgttgtgtgcctatcggcagatccatccttcctgcctccaaggaggatacacagagaatggcttcctgttgttttgtttattttcttaacgtgtacagatggaaacttcatttaaaaataaaaacaaaacaactcaaaaaggaat

SEQ ID NO: 28919 - protein, 108 aa, Homo sapiens
MRDLKETAPESPIPTGLVGGAGAFLLHSVTMAPSVKLNSFFFFFSSLGVVICLKSHSIPKFKIRKIPDCFSRSRTFLDRVYSPFRSDPAKIGRGTTRFYFKEILPPDD

SEQ ID NO: 28920 - DNA, 956 bp, Homo sapiens
gagtggggcaggtatcaccctgacaaacagtttgggaagatcaggaaaggcaggtgagacctggtgcagaatccaggttgggtaatagatacatcgtcgaagatgtagcaagcaaagtaatatactcaactctggaacattgcacagaagcttttaaagcactctgtgacactttttgtaatgagggatctgaaggaaacggccccagagtcacccatccccacgggtctggttggcggggctggtgcctttcttctgcactcagtcaccatggctccgtctgtcaaactcaactctttttttttttttttttcttctcttggtgtggtaatttgtttgaagagccactccatccccaaattcaagattagaaagatccctgactgcttctcaagatccagaacattccttgacagagtatattcaccatttagaagtgatccagcaaagattgggaggggtactaccagattctacttcaaagaaatcctgccacccgatgattaaacagtgaataaaatgtcatggctctttcctgcgacaattctatttgaggaaaagatttgtttttcccttttcccaaggaagctcgtgggacagcatgggcactactcttcatgtgcggtgacaccagcccccagatgccttgaattaagtgtcctcacctttatgcatgactgcaaagccagctggagcattttctatggagcctccgtatgttttaggcccatgaccttcgtgaggtgacgggcactcactcccatgagccctggctgtgtgctgttgtgtgcctatcggcagatccatccttcctgcctccaaggaggatacacagagaatggcttcctgttgttttgtttattttcttaacgtgtacagatggaaacttcatttaaaaataaaaacaaaacaactcaaaaaggaataaaatttaatcactgttttgtttgtgaata

SEQ ID NO: 28921 - protein, 108 aa, Homo sapiens; identical to SEQ ID NO: 28919

SEQ ID NO: 28922 - DNA, 728 bp, Homo sapiens
gcgggcaggctgcttagttgcggcccgaggcgcctaagtggggatgaccaacccgtgggcgttggcgctgacccctaggcgccgctggtggccccgcgcgcggccctccggccagccccgcccctctcggggctcctccttggtccccgcgccatggcgcgtccgcgttgaccgctgtcttccctttcgggctgtgctgatcgcgaacgctgcgcagtccgtggtggcgtcgaggcacctttctcgtgcctttacctgtgttcactcctttgctttaaaaaacagccctagaagtacacatcgttggccccgaaggagccccagcagccatgtcggaccgcgaggtgaccttggagggcgggaggacggacgaggggcctggcggagctagactgagagggcgccgccggcgtcctgaaggccctgctccccgaatgtgtgggagtgtgtctgacggtgcgagggtggctgtggcggggcctgagcagcgtgtccgtgtcccgatgccgcccgcctgttactgagttaggcaggagtgcccgagtctggcgaacttcagcagttctcgttccagagctccacacgagactggccgacacttagggaaaatagaaagaacctacgttgaaatattggggatgggttcccccgatagtgctgggagggcagcacgcctgcagtggacacagaagctctgagccccatacctgtcctgctcacctcttcca

SEQ ID NO: 28923 - protein, 115 aa, Homo sapiens
MTNPWALALTPRRRWWPRARPSGQPRPSRGSSLVPAPWRVRVDRCLPFRAVLIANAAQSVVASRHLSRAFTCVHSFALKNSPRSTHRWPRRSPSSHVGPRGDLGGREDGRGAWRS

SEQ ID NO: 28924 - DNA, 1570 bp, Homo sapiens
cgggcttgaggcgggcaggctgcttagttgcggcccgaggcgcctaagtggggatgaccaacccgtgggcgttggcgctgacccctaggcgccgctggtggccccgcgcgcggccctccggccagccccgcccctctcggggctcctccttggtccccgcgccatggcgcgtccgcgttgaccgctgtcttccctttcgggctgtgctgatcgcgaacgctgcgcagtccgtggtggcgtcgaggcacctttctcgtgcctttacctgtgttcactcctttgctttaaaaaacagccctagaagtacacatcgttggccccgaaggagccccagcagccatgtcggaccgcgaggtgaccttggagggcgggaggacggacgaggggcctggcggagctagactgagagggcgccgccggcgtcctgaaggccctgctccccgaatgtgtgggagtgtgtctgacggtgcgagggtggctgtggcggggcctgagcagcgtgtccgtgtcccgatgccgcccgcctgttactgagttaggcaggagtgcccgagtctggcgaacttcagcagttctcgttccagagctccacacgagtgtctgaggcctcagctggagcagttcagaggctagaggttggaatgagtgaaggttcatctgctcgaatgtctgacagctgatactggagattggctgcagcccagattggggatgtcagccagcacacccctacacggccggtccctgtggccgaggctttctcacaatatgatggctggattccaagggcaatctaaagacaaaggacaaaagaaagctgtatcctttttgtgaaccagcctcagaagttgcataccatcacttcggctacttcctatttggaagaaatgagtcactaaattacccatattcaaaaggagaggaattaggcttcatcttctaaagggaagaatatcaaaaaatttgccagtatatttttaaaacaccacacttggaaaaagccatgggccatggtaagcaaaattgaaatggcaaaattgctatggcagacagtggtggaagggagtaaaaggttcaggggtgtgggcatgttgaaatttatatactccgtgcatctagaagacatttgagacgatcatattccacatgaaggtgtaaataacacgtcatttataaagatcattagacataggatgatgaaaggggcactgatgtcactaaaatattcagtgatggctcatctctgtaggcaagaatgacaatagaaaggctgttccagaacttggctgggtgatagcactggggatgataggatcctaagacaaaagaggccattctgggacatagtggggaccaaagaaaaaaacccaagaagccaaaggcaacacttagctggcagaagtcagaggattgcaattatagcagccagcagggtctgagtggcagccaaggggacctcacttgtatggttatagaactggtcaataaacatggcatccctggaggcaaaacaggtgggcagctaagaagggtactactcagctggcaaaaaaaaaaaaaaaaaaaaaaa

SEQ ID NO: 28925 - protein, 115 aa, Homo sapiens; identical to SEQ ID NO: 28923

SEQ ID NO: 28926 - DNA, 378 bp, Homo sapiens
tcatctgctcgaatgtctgacagctgatactggagattggctgcagtaaaatattcagtgatggctcatctctgtaggcaagaatgacaatagaaaggctgttccagaacttggctgggtgatagcactggggatgataggatcctaagacaaaagaggccattctgggacatagtggggaccaaagaaaaaaacccaagaagccaaaggcaacacttagctggcagaagtcagaggattgcaattatagcagccagcagggtctgagtggcagccaaggggacctcacttgtatggttatagaactggtcaataaacatggcatccctggaggcaaaacaggtgggcagctaagaagggtactactcagctggcaaa

SEQ ID NO: 28927 - protein, 57 aa, Homo sapiens
KGCSRTWLGDSTGDDRILRQKRPFWDIVGTKEKNPRSQRQHLAGRSQRIAIIAASRV

SEQ ID NO: 28928 - DNA, 2953 bp, Homo sapiens
cgcggggcagcggcggcgcggcggagccatccgcgctcgtgcccgcgcgggtgcgttgctgtcctggccgcgcccctgtcccgccgcctcccgctcctcgcctggcggatgtaggttgttggcctgaggggagctacgtagccgaggtttgcgctgccgccgccaggcccggtccggttccagcctctgcccggacgctagccggcctggccatggctgaccgcgggtgcccgctggaggcggcgccgctgcctgccgaggtgcgggagagcctggctgagctggagctggagctgtcggaaggtgacatcactcaaaaaggatatgaaaagaaaagggcaaagctgcttgcacgttatataccgcttattcaaggaatagacccatctctgcaagcagagaatagaattcctgggccctcacaaaccacggccgctgcacccaagcagcagaagtctcggcccaccgcctcgagggatgagcgcttccggtcagatgtccacactgaagccgtgcaagcagctttggccaaatacaaagagaggaagatgcctatgccttcgaagagacgttctgtccttgtgcattcgtctgtggaaacctacacccctccagacacgtcgtctgcctcagaagatgagggctctttacggcgacccgggcgactcacctccactccgctccagagccattccagcgtcgagccctggctcgaccgggtcattcagggctcgtccacctcatcctctgcatcctccacctcatctcacccgggagggagacccaccactgctcccagtgctgcagccacgccgggggccgccgctaccactgcactcgcaggcctcgaggcccacacccacatagatctgcattctgcccctcctgatgtcaccacgggcctcgtggagcattcgtactttgagcgtccacaggtggcttctgtgagaagtgttcctcgggggtgcagcgggagcatgctggaaacagcagatggtgtccctgtgaacagcagagtgtcctccaaaatccagcagcttctgaacaccctgaagaggccaaagcgccctccactgaaggagttctttgtggatgattttgaggaattgttggaagttcagcaaccagatccaaatcagccaaagcctgagggaagcgagacgagtgtgctgagaggggagcctctcactgcaggtgtcccccgaccgccgtcgctgttggccaccttgcagcgctggggcacaacacagcccaaatccccctgtctgactgccttggatacaactgggaaagccgtctacactctcacctatggtaaactttggagtcggagtttaaaactagcttatactctacttaataaactgacaagtaagaatgaacctctacttaaacctggagacagagtggcgctcgtgtttccgaatagtgaccctgtgatgttcatggttgcattttatgggtgtctcctggcagagctggttcctgtccccatagaagtgccattaacaagaaaggatgcaggcagccagcaggttgggtttctgctgggcagctgtggagtcttcttggccctgaccacagacgcttgtcagaaaggcctccccaaggcacagacaggagaggtggcagctttcaaaggttggcccccgctctcctggctagtgattgatgggaagcatctagccaagcccccaaaggactggcaccctctggcccaggacacagggactgggactgcctacattgagtataaaaccagcaaagaaggcagtacggtgggggtcacagtgtcccacgcatccctgctggcacagtgccgggctctgacccaggcgtgcgggtactcagaagctgaaacattaacaaacgtgctggatttcaaaagggatgctggtctgtggcatggcgtgttaacaagcgtcatgaacaggatgcacgtggtcagcgtcccctacgcgctgatgaaggcgaacccactctcctggatccagaaagtgtgcttctataaagctcgggccgcgctggtgaagtcgcgagacatgcactggtctctcctagctcagcggggccagagggacgtcagcctcagctcactgcgcatgctgattgtggccgatggtgccaacccgtggtcgatctcctcctgtgacgccttcctcaacgtcttccagtccagaggtctgaggccagaggtcatctgtccttgtgcaagttctcctgaggcgctgactgtcgccatccgcaggccacctgatctgggaggaccacctccaagaaaagcagtcctgtcgatgaacggtctaagttatggtgttatcagagtggatactgaagaaaagttgtcagtccttactgttcaggacgttggtcaggtgatgcctggagctaatgtatgtgttgtgaagttagaaggtaccccttatctttgtaaaactgatgaagtgggagaaatatgcgtcagttccagtgcaactggcacagcgtactatggattgcttggaatcacgaagaatgtgtttgaggcagttccggtcaccacaggaggagcacccatctttgacaggccattcaccaggacaggcctgctgggcttcatcgggcctgtgagtatgtcctcctgtaccagcactggcagtcagagaaggtagggggtgtggctaagggacacctcgttgcagccccacccttgtcctggccgttcctgacctcccatgtggccttggtcggtggcgctgacctccctgcccatcaccctacctgtgtgcagggccatccacacctccgagactggtgcacagtcctgcacacaggcctgagtcgggggtccccggggtggatgaggatgttttgctttttatatggagtggcaggtttgtgagtattcattatatcattctttaccattttggatgtctaaactattcaaaaataaatgcttctatttgtaaca

SEQ ID NO: 28929 - protein, 812 aa, Homo sapiens; identical to SEQ ID NO: 3991

SEQ ID NO: 28930 - DNA, 2769 bp, Homo sapiens
cgcggggcagcggcggcgcggcggagccatccgcgctcgtgcccgcgcgggtgcgttgctgtcctggccgcgcccctgtcccgccgcctcccgctcctcgcctggcggatgtaggttgttggcctgaggggagctacgtagccgaggtttgcgctgccgccgccaggcccggtccggttccagcctctgcccggacgctagccggcctggccatggctgaccgcgggtgcccgctggaggcggcgccgctgcctgccgaggtgcgggagagcctggctgagctggagctggagctgtcggaaggtgacatcactcaaaaaggatatgaaaagaaaagggcaaagctgcttgcacgttatataccgcttattcaaggaatagacccatctctgcaagcagagaatagaattcctgggccctcacaaaccacggccgctgcacccaagcagcagaagtctcggcccaccgcctcgagggatgagcgcttccggtcagatgtccacactgaagccgtgcaagcagctttggccaaatacaaagagaggaagatgcctatgccttcgaagagacgttctgtccttgtgcattcgtctgtggaaacctacacccctccagacacgtcgtctgcctcagaagatgagggctctttacggcgacccgggcgactcacctccactccgctccagagccattccagcgtcgagccctggctcgaccgggtcattcagggctcgtccacctcatcctctgcatcctccacctcatctcacccgggagggagacccaccactgctcccagtgctgcagccacgccgggggccgccgctaccactgcactcgcaggcctcgaggcccacacccacataggtgtccctgtgaacagcagagtgtcctccaaaatccagcagcttctgaacaccctgaagaggccaaagcgccctccactgaaggagttctttgtggatgattttgaggaattgttggaagttcagcaaccagatccaaatcagccaaagcctgagggaagcgagacgagtgtgctgagaggggagcctctcactgcaggtgtcccccgaccgccgtcgctgttggccaccttgcagcgctggggcacaacacagcccaaatccccctgtctgactgccttggatacaactgggaaagccgtctacactctcacctatggtaaactttggagtcggagtttaaaactagcttatactctacttaataaactgacaagtaagaatgaacctctacttaaacctggagacagagtggcgctcgtgtttccgaatagtgaccctgtgatgttcatggttgcattttatgggtgtctcctggcagagctggttcctgtccccatagaagtgccattaacaagaaaggatgcaggcagccagcaggttgggtttctgctgggcagctgtggagtcttcttggccctgaccacagacgcttgtcagaaaggcctccccaaggcacagacaggagaggtggcagctttcaaaggttggcccccgctctcctggctagtgattgatgggaagcatctagccaagcccccaaaggactggcaccctctggcccaggacacagggactgggactgcctacattgagtataaaaccagcaaagaaggcagtacggtgggggtcacagtgtcccacgcatccctgctggcacagtgccgggctctgacccaggcgtgcgggtactcagaagctgaaacattaacaaacgtgctggatttcaaaagggatgctggtctgtggcatggcgtgttaacaagcgtcatgaacaggatgcacgtggtcagcgtcccctacgcgctgatgaaggcgaacccactctcctggatccagaaagtgtgcttctataaagctcgggccgcgctggtgaagtcgcgagacatgcactggtctctcctagctcagcggggccagagggacgtcagcctcagctcactgcgcatgctgattgtggccgatggtgccaacccgtggtcgatctcctcctgtgacgccttcctcaacgtcttccagtccagaggtctgaggccagaggtcatctgtccttgtgcaagttctcctgaggcgctgactgtcgccatccgcaggccacctgatctgggaggaccacctccaagaaaagcagtcctgtcgatgaacggtctaagttatggtgttatcagagtggatactgaagaaaagttgtcagtccttactgttcaggacgttggtcaggtgatgcctggagctaatgtatgtgttgtgaagttagaaggtaccccttatctttgtaaaactgatgaagtgggagaaatatgcgtcagttccagtgcaactggcacagcgtactatggattgcttggaatcacgaagaatgtgtttgaggcagttccggtcaccacaggaggagcacccatctttgacaggccattcaccaggacaggcctgctgggcttcatcgggcctgacaacctggtcttcatcgtgggcaaactggacgggctgatggtcactggagttcgcagacacaatgcagatgacgttgtggccaccgcactggccgtggagcccatgaagtttgtctacagaggcaggtgatgcgctgcggacccccacgccgggagtagattccttcatttgcagctcgggaagtctttgtgcagtagatggaaagcccagcaaacttgaattcacaaagcctaaaaattgttgtacatcagaaaactcctaaagtaaaaggaaaatatttgcagcaatg

SEQ ID NO: 28931 - protein, 798 aa, Homo sapiens
MADRGCPLEAAPLPAEVRESLAELELELSEGDITQKGYEKKRAKLLARYIPLIQGIDPSLQAENRIPGPSQTTAAAPKQQKSRPTASRDERFRSDVHTEAVQAALAKYKERKMPMPSKRRSVLVHSSVETYTPPDTSSASEDEGSLRRPGRLTSTPLQSHSSVEPWLDRVIQGSSTSSSASSTSSHPGGRPTTAPSAAATPGAAATTALAGLEAHTHIGVPVNSRVSSKIQQLLNTLKRPKRPPLKEFFVDDFEELLEVQQPDPNQPKPEGSETSVLRGEPLTAGVPRPPSLLATLQRWGTTQPKSPCLTALDTTGKAVYTLTYGKLWSRSLKLAYTLLNKLTSKNEPLLKPGDRVALVFPNSDPVMFMVAFYGCLLAELVPVPIEVPLTRKDAGSQQVGFLLGSCGVFLALTTDACQKGLPKAQTGEVAAFKGWPPLSWLVIDGKHLAKPPKDWHPLAQDTGTGTAYIEYKTSKEGSTVGVTVSHASLLAQCRALTQACGYSEAETLTNVLDFKRDAGLWHGVLTSVMNRMHVVSVPYALMKANPLSWIQKVCFYKARAALVKSRDMHWSLLAQRGQRDVSLSSLRMLIVADGANPWSISSCDAFLNVFQSRGLRPEVICPCASSPEALTVAIRRPPDLGGPPPRKAVLSMNGLSYGVIRVDTEEKLSVLTVQDVGQVMPGANVCVVKLEGTPYLCKTDEVGEICVSSSATGTAYYGLLGITKNVFEAVPVTTGGAPIFDRPFTRTGLLGFIGPDNLVFIVGKLDGLMVTGVRRHNADDVVATALAVEPMKFVYRGR

SEQ ID NO: 28932 - DNA, 2898 bp, Homo sapiens
cgcggggcagcggcggcgcggcggagccatccgcgctcgtgcccgcgcgggtgcgttgctgtcctggccgcgcccctgtcccgccgcctcccgctcctcgcctggcggatgtaggttgttggcctgaggggagctacgtagccgaggtttgcgctgccgccgccaggcccggtccggttccagcctctgcccggacgctagccggcctggccatggctgaccgcgggtgcccgctggaggcggcgccgctgcctgccgaggtgcgggagagcctggctgagctggagctggagctgtcggaaggtgacatcactcaaaaaggatatgaaaagaaaagggcaaagctgcttgcacgttatataccgcttattcaaggaatagacccatctctgcaagcagagaatagaattcctgggccctcacaaaccacggccgctgcacccaagcagcagaagtctcggcccaccgcctcgagggatgagcgcttccggtcagatgtccacactgaagccgtgcaagcagctttggccaaatacaaagagaggaagatgcctatgccttcgaagagacgttctgtccttgtgcattcgtctgtggaaacctacacccctccagacacgtcgtctgcctcagaagatgagggctctttacggcgacccgggcgactcacctccactccgctccagagccattccagcgtcgagccctggctcgaccgggtcattcagggctcgtccacctcatcctctgcatcctccacctcatctcacccgggagggagacccaccactgctcccagtgctgcagccacgccgggggccgccgctaccactgcactcgcaggcctcgaggcccacacccacatagatctgcattctgcccctcctgatgtcaccacgggcctcgtggagcattcgtactttgagcgtccacaggtggcttctgtgagaagtgttcctcgggggtgcagcgggagcatgctggaaacagcagatggtgtccctgtgaacagcagagtgtcctccaaaatccagcagcttctgaacaccctgaagaggccaaagcgccctccactgaaggagttctttgtggatgattttgaggaattgttggaagttcagcaaccagatccaaatcagccaaagcctgagggaagcgagacgagtgtgctgagaggggagcctctcactgcaggtgtcccccgaccgccgtcgctgttggccaccttgcagcgctggggcacaacacagcccaaatccccctgtctgactgccttggatacaactgggaaagccgtctacactctcacctatggtaaactttggagtcggagtttaaaactagcttatactctacttaataaactgacaagtaagaatgaacctctacttaaacctggagacagagtggcgctcgtgtttccgaatagtgaccctgtgatgttcatggttgcattttatgggtgtctcctggcagagctggttcctgtccccatagaagtgccattaacaagaaaggatgcaggcagccagcaggttgggtttctgctgggcagctgtggagtcttcttggccctgaccacagacgcttgtcagaaaggcctccccaaggcacagacaggagaggtggcagctttcaaaggttggcccccgctctcctggctagtgattgatgggaagcatctagccaagcccccaaaggactggcaccctctggcccaggacacagggactgggactgcctacattgagtataaaaccagcaaagaaggcagtacggtgggggtcacagtgtcccacgcatccctgctggcacagtgccgggctctgacccaggcgtgcgggtactcagaagctgaaacattaacaaacgtgctggatttcaaaagggatgctggtctgtggcatggcgtgttaacaagcgtcatgaacaggatgcacgtggtcagcgtcccctacgcgctgatgaaggcgaacccactctcctggatccagaaagtgtgcttctataaagctcgggccgcgctggtgaagtcgcgagacatgcactggtctctcctagctcagcggggccagagggacgtcagcctcagctcactgcgcatgctgattgtggccgatggtgccaacccgtggtcgatctcctcctgtgacgccttcctcaacgtcttccagtccagaggtctgaggccagaggtcatctgtccttgtgcaagttctcctgaggcgctgactgtcgccatccgcaggccacctgatctgggaggaccacctccaagaaaagcagtcctgtcgatgaacggtctaagttatggtgttatcagagtggatactgaagaaaagttgtcagtccttactgttcaggacgttggtcaggtgatgcctggagctaatgtatgtgttgtgaagttagaaggtaccccttatctttgtaaaactgatgaagtgggagaaatatgcgtcagttccagtgcaactggcacagcgtactatggattgcttggaatcacgaagaatgtgtttgaggcagttccggtcaccacaggaggagcacccatctttgacaggccattcaccaggacaggcctgctgggcttcatcgggcctgacaacctggtcttcatcgtgggcaaactggacgggctgatggtcactggagttcgcagacacaatgcagatgacgttgtggccaccgcactggccgtggagcccatgaagtttgtctacagaggcaggtgatgcgctgcggacccccacgccgggagtagattccttcatttgcagctcgggaagtctttgtgcagtagatggaaagcccagcaaacttgaattcacaaagcctaaaaattgttgtacatcagaaaactcctaaagtaaaaggaaaatatttgcagcaatg

SEQ ID NO: 28933 - protein, 841 aa, Homo sapiens; identical to SEQ ID NO: 3989

SEQ ID NO: 28934 - DNA, 3092 bp, Homo sapiens
cgcggggcagcggcggcgcggcggagccatccgcgctcgtgcccgcgcgggtgcgttgctgtcctggccgcgcccctgtcccgccgcctcccgctcctcgcctggcggatgtaggttgttggcctgaggggagctacgtagccgaggtttgcgctgccgccgccaggcccggtccggttccagcctctgcccggacgctagccggcctggccatggctgaccgcgggtgcccgctggaggcggcgccgctgcctgccgaggtgcgggagagcctggctgagctggagctggagctgtcggaaggtgacatcactcaaaaaggatatgaaaagaaaagggcaaagctgcttgcacgttatataccgcttattcaaggaatagacccatctctgcaagcagagaatagaattcctgggccctcacaaaccacggccgctgcacccaagcagcagaagtctcggcccaccgcctcgagggatgagcgcttccggtcagatgtccacactgaagccgtgcaagcagctttggccaaatacaaagagaggaagatgcctatgccttcgaagagacgttctgtccttgtgcattcgtctgtggaaacctacacccctccagacacgtcgtctgcctcagaagatgagggctctttacggcgacccgggcgactcacctccactccgctccagagccattccagcgtcgagccctggctcgaccgggtcattcagggctcgtccacctcatcctctgcatcctccacctcatctcacccgggagggagacccaccactgctcccagtgctgcagccacgccgggggccgccgctaccactgcactcgcaggcctcgaggcccacacccacatagatctgcattctgcccctcctgatgtcaccacgggcctcgtggagcattcgtactttgagcgtccacaggtggcttctgtgagaagtgttcctcgggggtgcagcgggagcatgctggaaacagcagatggtgtccctgtgaacagcagagtgtcctccaaaatccagcagcttctgaacaccctgaagaggccaaagcgccctccactgaaggagttctttgtggatgattttgaggaattgttggaagttcagcaaccagatccaaatcagccaaagcctgagggaagcgagacgagtgtgctgagaggggagcctctcactgcaggtgtcccccgaccgccgtcgctgttggccaccttgcagcgctggggcacaacacagcccaaatccccctgtctgactgccttggatacaactgggaaagccgtctacactctcacctatggtaaactttggagtcggagtttaaaactagcttatactctacttaataaactgacaagtaagaatgaacctctacttaaacctggagacagagtggcgctcgtgtttccgaatagtgaccctgtgatgttcatggttgcattttatgggtgtctcctggcagagctggttcctgtccccatagaagtgccattaacaagaaaggatgcaggcagccagcaggttgggtttctgctgggcagctgtggagtcttcttggccctgaccacagacgcttgtcagaaaggcctccccaaggcacagacaggagaggtggcagctttcaaaggttggcccccgctctcctggctagtgattgatgggaagcatctagccaagcccccaaaggactggcaccctctggcccaggacacagggactgggactgcctacattgagtataaaaccagcaaagaaggcagtacggtgggggtcacagtgtcccacgcatccctgctggcacagtgccgggctctgacccaggcgtgcgggtactcagaagctgaaacattaacaaacgtgctggatttcaaaagggatgctggtctgtggcatggcgtgttaacaagcgtcatgaacaggatgcacgtggtcagcgtcccctacgcgctgatgaaggcgaacccactctcctggatccagaaagtgtgcttctataaagctcgggccgcgctggtgaagtcgcgagacatgcactggtctctcctagctcagcggggccagagggacgtcagcctcagctcactgcgcatgctgattgtggccgatggtgccaacccgtggtcgatctcctcctgtgacgccttcctcaacgtcttccagtccagaggtctgaggccagaggtcatctgtccttgtgcaagttctcctgaggcgctgactgtcgccatccgcaggccacctgatctgggaggaccacctccaagaaaagcagtcctgtcgatgaacggtctaagttatggtgttatcagagtggatactgaagaaaagttgtcagtccttactgttcaggacgttggtcaggtgatgcctggagctaatgtatgtgttgtgaagttagaaggtaccccttatctttgtaaaactgatgaagtgggagaaatatgcgtcagttccagtgcaactggcacagcgtactatggattgcttggaatcacgaagaatgtgtttgaggcagttccggtcaccacaggaggagcacccatctttgacaggccattcaccaggacaggcctgctgggcttcatcgggcctgacaacctggtcttcatcgtgggcaaactggacgggctgatggtcactggagttcgcagacacaatgcagatgacgttgtggccaccgcactggccgtggagcccatgaagtttgtctacagaggcaggtgatgcgctgcggacccccacgccgggagtagattccttcatttgcagctcgggaagtctttgtgcagtagatggaaagcccagcaaacttgaattcacaaagcctaaaaattgttgtacatcagaaaactcctaaagtaaaaggaaaatatttgcagcaatgataccagagttaatatccttactgtccaaagagttccttggattccttaagaaaataaggttttgatgtaaaatttggggcaaaggctcaaggggacaaatcagggagggaagaattgagtaaagcaaaggagaaatgggtctaagttcctaataaccttggaatgtgaattaaaacagaaaagtgccattttc

SEQ ID NO: 28935 - protein, 841 aa, Homo sapiens; identical to SEQ ID NO: 3989

SEQ ID NO: 28936 - DNA, 3073 bp, Homo sapiens
cgcggggcagcggcggcgcggcggagccatccgcgctcgtgcccgcgcgggtgcgttgctgtcctggccgcgcccctgtcccgccgcctcccgctcctcgcctggcggatgtaggttgttggcctgaggggagctacgtagccgaggtttgcgctgccgccgccaggcccggtccggttccagcctctgcccggacgctagccggcctggccatggctgaccgcgggtgcccgctggaggcggcgccgctgcctgccgaggtgcgggagagcctggctgagctggagctggagctgtcggaaggtgacatcactcaaaaaggatatgaaaagaaaagggcaaagctgcttgcacgttatataccgcttattcaaggaatagacccatctctgcaagcagagaatagaattcctgggccctcacaaaccacggccgctgcacccaagcagcagaagtctcggcccaccgcctcgagggatgagcgcttccggtcagatgtccacactgaagccgtgcaagcagctttggccaaatacaaagagaggaagatgcctatgccttcgaagagacgttctgtccttgtgcattcgtctgtggaaacctacacccctccagacacgtcgtctgcctcagaagatgagggctctttacggcgacccgggcgactcacctccactccgctccagagccattccagcgtcgagccctggctcgaccgggtcattcagggctcgtccacctcatcctctgcatcctccacctcatctcacccgggagggagacccaccactgctcccagtgctgcagccacgccgggggccgccgctaccactgcactcgcaggcctcgaggcccacacccacatagatctgcattctgcccctcctgatgtcaccacgggcctcgtggagcattcgtactttgagcgtccacaggtggcttctgtgagaagtgttcctcgggggtgcagcgggagcatgctggaaacagcagatggtgtccctgtgaacagcagagtgtcctccaaaatccagcagcttctgaacaccctgaagaggccaaagcgccctccactgaaggagttctttgtggatgattttgaggaattgttggaagttcagcaaccagatccaaatcagccaaagcctgagggaagcgagacgagtgtgctgagaggggagcctctcactgcaggtgtcccccgaccgccgtcgctgttggccaccttgcagcgctggggcacaacacagcccaaatccccctgtctgactgccttggatacaactgggaaagccgtctacactctcacctatggtaaactttggagtcggagtttaaaactagcttatactctacttaataaactgacaagtaagaatgaacctctacttaaacctggagacagagtggcgctcgtgtttccgaatagtgaccctgtgatgttcatggttgcattttatgggtgtctcctggcagagctggttcctgtccccatagaagtgccattaacaagaaaggatgcaggcagccagcaggttgggtttctgctgggcagctgtggagtcttcttggccctgaccacagacgcttgtcagaaaggcctccccaaggcacagacaggagaggtggcagctttcaaaggttggcccccgctctcctggctagtgattgatgggaagcatctagccaagcccccaaaggactggcaccctctggcccaggacacagggactgggactgcctacattgagtataaaaccagcaaagaaggcagtacggtgggggtcacagtgtcccacgcatccctgctggcacagtgccgggctctgacccaggcgtgcgggtactcagaagctgaaacattaacaaacgtgctggatttcaaaagggatgctggtctgtggcatggcgtgttaacaagcgtcatgaacaggatgcacgtggtcagcgtcccctacgcgctgatgaaggcgaacccactctcctggatccagaaagtgtgcttctataaagctcgggccgcgctggtgaagtcgcgagacatgcactggtctctcctagctcagcggggccagagggacgtcagcctcagctcactgcgcatgctgattgtggccgatggtgccaacccgtggtcgatctcctcctgtgacgccttcctcaacgtcttccagtccagaggtctgaggccagaggtcatctgtccttgtgcaagttctcctgaggcgctgactgtcgccatccgcaggccacctgatctgggaggaccacctccaagaaaagcagtcctgtcgatgaacggtctaagttatggtgttatcagagtggatactgaagaaaagttgtcagtccttactgttcaggacgttggtcaggtgatgcctggagctaatgtatgtgttgtgaagttagaaggtaccccttatctttgtaaaactgatgaagtgggagaaatatgcgtcagttccagtgcaactggcacagcgtactatggattgcttggaatcacgaagaatgtgtttgaggcagttccggtcaccacaggaggagcacccatctttgacaggccattcaccaggacaggcctgctgggcttcatcgggcctgacaacctggtcttcatcgtgggcaaactggacgggctgatggtcactggagttcgcagacacaatgcagatgacgttgtggccaccgcactggccgtggagcccatgaagtttgtctacagaggcaggatcgctgtgttctctgtgaccgtgctgcacgacgaccggattgtcctggtggctgagcagcggccggatgcctcggaggaggacagcttccagtggatgagccgtgtgctgcaggtgggcgccccggcacggcctatggttcggtgaatctcccaagctggcacccccactccactccaagtgccaagtggttggcttgtcccgcccggtcctccctggctccagctttgtttatctgtatttttcattgcaaattgacaaattacagctgtatgtatttacgggatacaaagtgatgttataatttatgaatacaatatagaataattaatatatcc

SEQ ID NO: 28937 - protein, 889 aa, Homo sapiens; identical to SEQ ID NO: 3987

SEQ ID NO: 28938 - DNA, 7413 bp, Homo sapiens
cgcggggcagcggcggcgcggcggagccatccgcgctcgtgcccgcgcgggtgcgttgctgtcctggccgcgcccctgtcccgccgcctcccgctcctcgcctggcggatgtaggttgttggcctgaggggagctacgtagccgaggtttgcgctgccgccgccaggcccggtccggttccagcctctgcccggacgctagccggcctggccatggctgaccgcgggtgcccgctggaggcggcgccgctgcctgccgaggtgcgggagagcctggctgagctggagctggagctgtcggaaggtgacatcactcaaaaaggatatgaaaagaaaagggcaaagctgcttgcacgttatataccgcttattcaaggaatagacccatctctgcaagcagagaatagaattcctgggccctcacaaaccacggccgctgcacccaagcagcagaagtctcggcccaccgcctcgagggatgagcgcttccggtcagatgtccacactgaagccgtgcaagcagctttggccaaatacaaagagaggaagatgcctatgccttcgaagagacgttctgtccttgtgcattcgtctgtggaaacctacacccctccagacacgtcgtctgcctcagaagatgagggctctttacggcgacccgggcgactcacctccactccgctccagagccattccagcgtcgagccctggctcgaccgggtcattcagggctcgtccacctcatcctctgcatcctccacctcatctcacccgggagggagacccaccactgctcccagtgctgcagccacgccgggggccgccgctaccactgcactcgcaggcctcgaggcccacacccacatagatctgcattctgcccctcctgatgtcaccacgggcctcgtggagcattcgtactttgagcgtccacaggtggcttctgtgagaagtgttcctcgggggtgcagcgggagcatgctggaaacagcagatggtgtccctgtgaacagcagagtgtcctccaaaatccagcagcttctgaacaccctgaagaggccaaagcgccctccactgaaggagttctttgtggatgattttgaggaattgttggaagttcagcaaccagatccaaatcagccaaagcctgagggaagcgagacgagtgtgctgagaggggagcctctcactgcaggtgtcccccgaccgccgtcgctgttggccaccttgcagcgctggggcacaacacagcccaaatccccctgtctgactgccttggatacaactgggaaagccgtctacactctcacctatggtaaactttggagtcggagtttaaaactagcttatactctacttaataaactgacaagtaagaatgaacctctacttaaacctggagacagagtggcgctcgtgtttccgaatagtgaccctgtgatgttcatggttgcattttatgggtgtctcctggcagagctggttcctgtccccatagaagtgccattaacaagaaaggatgcaggcagccagcaggttgggtttctgctgggcagctgtggagtcttcttggccctgaccacagacgcttgtcagaaaggcctccccaaggcacagacaggagaggtggcagctttcaaaggttggcccccgctctcctggctagtgattgatgggaagcatctagccaagcccccaaaggactggcaccctctggcccaggacacagggactgggactgcctacattgagtataaaaccagcaaagaaggcagtacggtgggggtcacagtgtcccacgcatccctgctggcacagtgccgggctctgacccaggcgtgcgggtactcagaagctgaaacattaacaaacgtgctggatttcaaaagggatgctggtctgtggcatggcgtgttaacaagcgtcatgaacaggatgcacgtggtcagcgtcccctacgcgctgatgaaggcgaacccactctcctggatccagaaagtgtgcttctataaagctcgggccgcgctggtgaagtcgcgagacatgcactggtctctcctagctcagcggggccagagggacgtcagcctcagctcactgcgcatgctgattgtggccgatggtgccaacccgtggtcgatctcctcctgtgacgccttcctcaacgtcttccagtccagaggtctgaggccagaggtcatctgtccttgtgcaagttctcctgaggcgctgactgtcgccatccgcaggccacctgatctgggaggaccacctccaagaaaagcagtcctgtcgatgaacggtctaagttatggtgttatcagagtggatactgaagaaaagttgtcagtccttactgttcaggacgttggtcaggtgatgcctggagctaatgtatgtgttgtgaagttagaaggtaccccttatctttgtaaaactgatgaagtgggagaaatatgcgtcagttccagtgcaactggcacagcgtactatggattgcttggaatcacgaagaatgtgtttgaggcagttccggtcaccacaggaggagcacccatctttgacaggccattcaccaggacaggcctgctgggcttcatcgggcctgacaacctggtcttcatcgtgggcaaactggacgggctgatggtcactggagttcgcagacacaatgcagatgacgttgtggccaccgcactggccgtggagcccatgaagtttgtctacagaggcaggatcgctgtgttctctgtgaccgtgctgcacgacgaccggattgtcctggtggctgagcagcggccggatgcctcggaggaggacagcttccagtggatgagccgtgtgctgcaggccattgatagcatccaccaggtgggcgtgtactgtctggccctggttcctgccaacaccttgcccaaggctcctctcggagggattcacatttctgaaaccaaacagcgctttctggaagggacgctgcacccgtgtaatgtgctgatgtgccctcacacctgtgttaccaacctccccaaacctcgtcagaaacaaccagaggttggaccagcctcaatgatcgtggggaacctggttgctgggaagagaatcgctcaggcttccgggagagagctcgcccacctggaggacagcgaccaggcacggaagttcctgttcctggctgacgtgctgcagtggcgtgcccacaccactcctgaccacccgctgttcttgctgctgaacgccaagggcaccgtcacaagcactgcaacctgtgtccagctgcacaaaagggctgagagagtggccgcggctctgatggagaagggaagactgagtgttggggaccatgtggctctggtctacccaccaggggtggacctcattgccgcgttctatggctgcttgtactgtggctgcgtgcctgtcaccgtgcggcccccgcaccctcagaacctcggcaccacactgcccaccgtcaagatgatcgtggaggtcagcaagtctgcatgcgtcctcaccacgcaggctgtcacacggctgctcaggtccaaggaggctgctgctgccgtggacatcaggacctggcccaccatcctagacacagatgacatcccaaaaaagaagatagcaagcgttttcaggcccccctcccccgatgtcctcgcatacttggacttcagcgtgtcaaccactgggatattagcgggagtgaagatgtcgcacgcggccacaagcgccttatgccgctccataaagctgcagtgtgagctgtacccctcgcggcagatcgccatctgcctcgacccctactgtggccttggttttgccctgtggtgtctgtgcagtgtctactcgggacaccaatcagtgctggtgcccccgctggagctggagagcaacgtgtccctgtggctgtcggccgtcagccagtacaaggcccgcgtcaccttctgctcctactctgtgatggagatgtgcaccaagggcctaggcgcacagacgggtgtcctcaggatgaagggggtgaacctgtcatgtgtgcgcacgtgcatggtggtcgccgaggagcggcccaggattgcgctgacccagtccttctccaagctcttcaaggacctgggcctgccggcccgcgccgtaagcaccacgttcgggtgcagggtcaacgtggccatctgcctccagggcacagctggcccggaccccacaaccgtctacgtggacatgcgggcactgcgccatgacagggttcgtttggtagaacggggttctccgcacagcctgccattgatggagtctggaaagatcctccccggcgtgaaggtcatcatcgcacacaccgagaccaaaggacccttgggagactcacacctgggagagatctgggtaagcagcccccacaatgccaccgggtactacaccgtttacggggaggaggcgcttcatgccgaccacttcagtgcccggctgagttttggagacacacagaccatctgggcaaggaccggctaccttggcttccttcggcgaacagagctcactgatgccagtggagggcggcacgatgcactgtatgtggttgggtctctggatgaaactctggagctcagaggcatgcggtaccaccccatcgacattgagacctctgtcatccgagcacacaggagcatcgctgagtgtgccgtattcacctggaccaacctgctggtggtggtggtggagctggatgggctagagcaggatgccctggacctggtggccctggtgaccaacgtggtgctggaggagcactacctggtcgtgggagtggtggtcatcgtggacccaggggtgatccctatcaactctcggggtgagaagcagcgcatgcacctgcgggacggcttcctggctgaccagctggaccccatctatgtcgcctacaacatgtgagcgcagcacaccggcccaggtgccggagatgaatgagccccagcagtccaaggtgtgatgtgggaagacaccgcagagctcactcaccgggactcgcccttcctgtgctcttacagatccctctcaacaatccccgcatctccttttagaaagcacttcctgaattatttaaagaaatattttgaatctgccaagtacatttacaaaaacacggatgctggtattttaacagatggagagacaaggaaaggaaaggaaaggcctggcatgggcattgtgaggaatcacaggcaccgaggttgttctctgctgtactgcaagtttgcactttctttaggctaaaaatatagttcctgatttttaaaattcagttatttattcccacttcaaatgacaagttcatatatagaatttacgggagaaacttgagaccatttacggggagaaacttgattctgggaagatagcagagtacaaaccagctgcctcacttctgtttcacagggaggctgatggaaaaaggaagcaagctggacccatcctccctgctcacagagggcactgtggtcacacacagtgcctcctctgccagttcctttattgaaagaggtgtgctggctggccacggtggcttacacctgtaatcccagcactttgggaggccgaggcgagcagatcacgaggtcaggagaccgagaccatcctggctaacatggtgaaaccctgtctctactaaaaatacaaaaaattagccgggtgtggtggtgggcgcctgtagtcccagctacttgggaggctgaggcaggagaatggtatgaaccagggaggcggagcttgcagtgagccgagatcacgctactgcactccagcctgggtgacagcacgagatgccgtcttaaaaaaacaaaaaagaggtgtgctgcttgtcagcatgtattgtcacggacactcaataagtgccattttggactgtcaaatttagatgctttgtttcagaaagataagccagcatttagttttaaatcactttcctggtttgtaacttgatgctgtttagttaaattgctagttttcctaacactacaatattaattcttctcgtggaagtgtactgatttattatttttattccaagtcagcagatttggaagcattgtggtaaagtctaaggttttcatatccatagtgctgtttggtgagtaccggcagtacagttgaggggagcagggaacagcattgccccgtattgaaggtggagatggttacattcttcactgctttttgcattttgagttgtgtgcctataaaatttggccaaaccattttattattttgttcaaacttgactaagctgagtgatctaaaattatacagaacctaaatcaaagaagagaatgtaaagtcctttagttacttctaagaatttgaagtcaagcacgaatctaagacatagattatttttatatagctaatgaagagtatgttacgaaattgttgggtttttggggtattgagggtggcaaattttgtgaatcatgcatgcttcacagaaacaaccaggtttttccagaattagtctggatcagtgcctaacaaagctgttattaattctccacacatgagtctggctaactgggccagctctcatgttttactcctgtctggctacaaatagcactgtgcatagtagccctgtttccccatggtgttggactgtggtaaagtatgttgtgacatactggaattctaataatcctgttgtaagtatgtacagaatctatgtaacttattgttgacatacagaggtttgggaagtagtctaatggacattccttacaatagaatggctgggaagggaaagaaaaaaaaaaaaaaactacctaactccaatcttaatgttgtagttttatagcaaacaaaaattgtcagctttttgtattgaaaggtcagtggtggtaagacaaggtgtcttgtaaattaagattttaagaagtgcattaaaatgttttagaattactctgggaattctgtatatcacactaaaatttttatatcattatgttaataaaagttattgactttgtaattctgcattttgaaatgtgtgaaaagggtctttaaattaccccgaataggttgtatcttattttgctttttttctgactataaaagcagttatgcttatagcataaaatctagaaagcacattaaagtataaagaaaattaaaatttcttataattctacctctgagtaaacagcagcattcgtatgtaacataaaccctctcagggatttattttttctttttaaaaattttttacaaaattaggatcaagtgcttttttaaataatttgcttttgtacttaataaattatagactttaaaatctattacatatattcttctacatgtttcagtggctgtattttacaagtgtgccatgagtaaatgtagtatttgctgtattgccgtacatcagcgt

SEQ ID NO: 28939 - protein, 1571 aa, Homo sapiens; identical to SEQ ID NO: 3985

SEQ ID NO: 28940 - DNA, 426 bp, Homo sapiens
ggtttattgtcaagattcagtcacatagtgtgtgtgaaaatgcttcgaaactggttggaagaagaagcttaacagtgacaaagatgctgtcttcaacagaaactggagtctgcttcagattaagatgaagatgaagagtagaagtacatggaaccccactcttcttagaccccctgccccccaatcatgaacacatacagaagaattcatatgtgtggttcctgaaaacctatcaggatgttcattgatggaagtgagatcattagagggagcatttcaagaggaaggtttgatctgctcatctttctgtctccagcaccttgcacattttaggcattttaatggatgcttattgagttaataaaagtgaaaacttcacatggtgtttattcagtttcaaataaagaatcctctgtaaatggattc

SEQ ID NO: 28941 - protein, 37 aa, Homo sapiens
MEVRSLEGAFQEEGLICSSFCLQHLAHFRHFNGCLLS

SEQ ID NO: 28942 - DNA, 476 bp, Homo sapiens
ggagtctgcttcagattaagatgaagatgaagagtagaagtacatggaaccccactcttcttagaccccctgccccccaatcatgaacacatacagaagaattcatatgtgtggttcctgaaaacctatcaggatgttcattgatggaagtgagatcattagagatggagtcttgctctgtctcccaggctggagtgcagtggcgcgatctcagctcactgcaacctctgcctcccaggttgaagtgattctcctacctcagcctcctgagtagctgggattacaggtgcctgccaccatgcctggctaatttttgtatttttagtagagattgggtttcacgtgttggtcaggctggtctcgaactcctgacctcgtgatccgcccgcattgatctcctaaagtgctgggattacaggcctgagccaccactcccggccacaactttttttttttaagagactcccccttgcctg

SEQ ID NO: 28943 - protein, 46 aa, Homo sapiens
MFIDGSEIIRDGVLLCLPGWSAVARSQLTATSASQVEVILLPQPPE

SEQ ID NO: 28944 - DNA, 2160 bp, Homo sapiens
gctcgggccgcgctggtgaagtcgcgagacatgcactggtctctcctagctcagcggggccagagggacgtcagcctcagctcactgcgcatgctgattgtggccgatggtgccaacccgtgtgagtgagcctgtgtgcccggcgcataccccacacagtgtcccctcctgcaaaccaaagtagaatacactgagaagcaaaatggaggcattttcactgccattgtcatatagatacacatgtcccatcgtttctatgacacggaacatcttggtgattcactggtttatcccatgcatgtttattaggccactaaatttaaaagcaattttaatatgcttgatgaaaggtacatgccttaatgagagtcatctttcttaagaaattaccagattgtgctgtggcctggggttcctgtttctctttaggcctcatccccaccctcctgccctttgtcctggtgcccccacgtctctggcttctggcttcacttctcccaccaggacccaaccattctccctcctggtttgcctgggtgtcccccacatcctcccaggaggagctccctatggctgctgcctgaccacgtagggcctcctgcgtacggtggtctgaatgggaactgctttgtcaaggctgcacacgtgagctctggggcccaggactgtccagggtctgactcagtacctcctctggggaagcctcaggtgatgctggtcacacaggggctcctgttgcagcacacacctgttgaccaggtattaggggttttcttgtttgttaacctgcatcattgtctatgcactggagactaccctgcatcagaagctgatgtttcatcttatcccctctccagtgtggccgacaccccatctcttgggaggtcaccccacctttgagcacccccagagcctctcattctcttggtccacacctgagccaggcagggcctgcttctgggttctgcagcactgctcaggtctctgcgtctccaccccaggcgcaccgccactccgtggtccccatggtggagtcagagtgtgcacctcctctccagtgcctcttcccatggcactcccctgttgctgcacctgatccttgcagtgccgtgcagcttgtctcccaccacatgcagcaccttcctgtccctagtgatgccccttctgccctttggagcaccagaccatccatggctgtctgatttcctttaaagataccatcttccttgaagaacatgaagtctgagggtacctgtgaaggggccccttccttctgctgatgcagccctgtggttccgatggccgcaggctgcgctaacttgagcatgtccagccaccccttccctgctggccccccagttagtgctggcgttccactcttgttgctctgtgcagggtcgatctcctcctgtgacgccttcctcaacgtcttccagtccagaggtctgaggccagaggtcatctgtccttgtgcaagttctcctgaggcgctgactgtcgccatccgcaggccacctgatctgggaggaccacctccaagaaaagcagtcctgtcgatgaacggtctaagttatggtgttatcagagtggatactgaagaaaagttgtcagtccttactgttcaggacgttggtcaggtgatgcctggagctaatgtatgtgttgtgaagttagaaggtaccccttatctttgtaaaactgatgaagtgggagaaatatgcgtcagttccagtgcaactggcacagcgtactatggattgcttggaatcacgaagaatgtgtttgaggcagttccggtcaccacaggaggagcacccatctttgacaggccattcaccaggacaggcctgctgggcttcatcgggcctgacaacctggtcttcatcgtgggcaaactggacgggctgatggtcactggagttcgcagacacaatgcagatgacgttgtggccaccgcactggccgtggagcccatgaagtttgtctacagaggcaggtgatgcgctgcggacccccacgccgggagtagattccttcatttgcagctcgggaagtctttgtgcagtagatggaaagcccagcaaacttgaattcacaaagcctaaaaattgttgtacatcagaaaactcctaaagtaaaaggaaaatatttgcagcaatg

SEQ ID NO: 28945 - protein, 233 aa, Homo sapiens
MAAGCANLSMSSHPFPAGPPVSAGVPLLLLCAGSISSCDAFLNVFQSRGLRPEVICPCASSPEALTVAIRRPPDLGGPPPRKAVLSMNGLSYGVIRVDTEEKLSVLTVQDVGQVMPGANVCVVKLEGTPYLCKTDEVGEICVSSSATGTAYYGLLGITKNVFEAVPVTTGGAPIFDRPFTRTGLLGFIGPDNLVFIVGKLDGLMVTGVRRHNADDVVATALAVEPMKFVYRGR

SEQ ID NO: 28946 - DNA, 2354 bp, Homo sapiens
gctcgggccgcgctggtgaagtcgcgagacatgcactggtctctcctagctcagcggggccagagggacgtcagcctcagctcactgcgcatgctgattgtggccgatggtgccaacccgtgtgagtgagcctgtgtgcccggcgcataccccacacagtgtcccctcctgcaaaccaaagtagaatacactgagaagcaaaatggaggcattttcactgccattgtcatatagatacacatgtcccatcgtttctatgacacggaacatcttggtgattcactggtttatcccatgcatgtttattaggccactaaatttaaaagcaattttaatatgcttgatgaaaggtacatgccttaatgagagtcatctttcttaagaaattaccagattgtgctgtggcctggggttcctgtttctctttaggcctcatccccaccctcctgccctttgtcctggtgcccccacgtctctggcttctggcttcacttctcccaccaggacccaaccattctccctcctggtttgcctgggtgtcccccacatcctcccaggaggagctccctatggctgctgcctgaccacgtagggcctcctgcgtacggtggtctgaatgggaactgctttgtcaaggctgcacacgtgagctctggggcccaggactgtccagggtctgactcagtacctcctctggggaagcctcaggtgatgctggtcacacaggggctcctgttgcagcacacacctgttgaccaggtattaggggttttcttgtttgttaacctgcatcattgtctatgcactggagactaccctgcatcagaagctgatgtttcatcttatcccctctccagtgtggccgacaccccatctcttgggaggtcaccccacctttgagcacccccagagcctctcattctcttggtccacacctgagccaggcagggcctgcttctgggttctgcagcactgctcaggtctctgcgtctccaccccaggcgcaccgccactccgtggtccccatggtggagtcagagtgtgcacctcctctccagtgcctcttcccatggcactcccctgttgctgcacctgatccttgcagtgccgtgcagcttgtctcccaccacatgcagcaccttcctgtccctagtgatgccccttctgccctttggagcaccagaccatccatggctgtctgatttcctttaaagataccatcttccttgaagaacatgaagtctgagggtacctgtgaaggggccccttccttctgctgatgcagccctgtggttccgatggccgcaggctgcgctaacttgagcatgtccagccaccccttccctgctggccccccagttagtgctggcgttccactcttgttgctctgtgcagggtcgatctcctcctgtgacgccttcctcaacgtcttccagtccagaggtctgaggccagaggtcatctgtccttgtgcaagttctcctgaggcgctgactgtcgccatccgcaggccacctgatctgggaggaccacctccaagaaaagcagtcctgtcgatgaacggtctaagttatggtgttatcagagtggatactgaagaaaagttgtcagtccttactgttcaggacgttggtcaggtgatgcctggagctaatgtatgtgttgtgaagttagaaggtaccccttatctttgtaaaactgatgaagtgggagaaatatgcgtcagttccagtgcaactggcacagcgtactatggattgcttggaatcacgaagaatgtgtttgaggcagttccggtcaccacaggaggagcacccatctttgacaggccattcaccaggacaggcctgctgggcttcatcgggcctgacaacctggtcttcatcgtgggcaaactggacgggctgatggtcactggagttcgcagacacaatgcagatgacgttgtggccaccgcactggccgtggagcccatgaagtttgtctacagaggcaggtgatgcgctgcggacccccacgccgggagtagattccttcatttgcagctcgggaagtctttgtgcagtagatggaaagcccagcaaacttgaattcacaaagcctaaaaattgttgtacatcagaaaactcctaaagtaaaaggaaaatatttgcagcaatgataccagagttaatatccttactgtccaaagagttccttggattccttaagaaaataaggttttgatgtaaaatttggggcaaaggctcaaggggacaaatcagggagggaagaattgagtaaagcaaaggagaaatgggtctaagttcctaataaccttggaatgtgaattaaaacagaaaagtgccattttc

SEQ ID NO: 28947 - protein, 233 aa, Homo sapiens; identical to SEQ ID NO: 28945

SEQ ID NO: 28948 - DNA, 458 bp, Homo sapiens
caacaccttgcccaaggctcctctcggagggattcacatttctgaaaccaaacagcgctttctggaagggacgctgcacccgtgtaatgtgctgatgtgccctcacacctgtgttaccaacctccccaaacctcgtcagaaacaaccagaggttggaccagcctcaatgatcgtggggaacctggttgctgggaagagaatcgctcaggcttccgggagagagctcgcccacctggaggacagcgaccaggcacggaaggtgacaggccagttccggggacgggtggacgggtgtctgtgccccggaggcgccagtgagcaagtcgccctctcgtgcagttcctgttcctggctgacgtgctgcagtggcgtgcccacaccactcctgaccacccgctgttcttgctgctgaacgccaaggtgaggcagtgtcacgcccacggggcttggaaacacct

SEQ ID NO: 28949 - protein, 105 aa, Homo sapiens
MCPHTCVTNLPKPRQKQPEVGPASMIVGNLVAGKRIAQASGRELAHLEDSDQARKVTGQFRGRVDGCLCPGGASEQVALSCSSCSWLTCCSGVPTPLLTTRCSCC

SEQ ID NO: 28950 - DNA, 2900 bp, Homo sapiens
caatacagtggagtgatgtaacctggagtgctggggagggggctttgaatggaactgggtagcaggggctatgaagaatgatgcccagtggctcaaggcaggaaaggaggccagtgtggtgggggccaggtggtcccaggtaggggatgcagataaggctgggggtcgctgggttttccctaaggatgcagtgggatcccagaccttgcgggctttgagtcccagtccagatctcaggttctgtcctgatggggccctgactcatatggactggcaaagcttccgggatttggaatctcaggatctgcccagcccttgtgcctggacacagcacataagtgcgtccactggtctctctcttccactgccttctgtcagtagaagccaccaatcgagaaacagggagttttgatgttacactggtctgctctggagttttatatttattagactgaattgcactttttatcttcttaagaaggactaaaaaagctgcgaggcctggcaggggatcagggaggatgagtgtcctgagcagagaggtagggttaccaggtatttctgtttgccttgaactggtcacatagccccagtgcccctcagcagagagacagggtgaatgaaggagctggtgtagtcagtcctagaggagacacacagatgcctctgagaaagccggttgcagatgacacacgcccaggctcagtgcaggtgacctgtgggcatggaaagtagtacaattcagggatgtttgcttatcgcttattatgtatttataatggtgtcgtatggaatattttattgaaaaggccagaaaggtcttctttacccacgtgtttctggctctgccctgggtgaatggagtgcccgcatctctccctcttagctgggaccacacaggagatacttgcatgcctgtcccttcactgctagtgagagagtacagatggtgagaaaagacaccagtcgtggaccatgtgcggtggcttatgcctgtaatcccagcactttgagaggctgaggcgggcagatcacttgaggtcaggagttcgagaccagcctggccaacatggtgaaaccccatctctaccaaaaaaaagacaccagccgtacgtctaggactgacacattgtcattatcatggacgctaatcacaaggtgtcgtgtgcagtggcgtgcaggtggtgtgcacgcagatctgcgaacagcccacctgcacgcaccagcatacagatgagctcaaagatcgctttcctagggcaccgtcacaagcactgcaacctgtgtccagctgcacaaaagggctgagagagtggccgcggctctgatggagaagggaagactgagtgttggggaccatgtggctctggtctacccaccaggggtggacctcattgccgcgttctatggctgcttgtactgtggctgcgtgcctgtcaccgtgcggcccccgcaccctcagaacctcggcaccacactgcccaccgtcaagatgatcgtggaggtcagcaagtctgcatgcgtcctcaccacgcaggctgtcacacggctgctcaggtccaaggaggctgctgctgccgtggacatcaggacctggcccaccatcctagacacagatgacatcccaaaaaagaagatagcaagcgttttcaggcccccctcccccgatgtcctcgcatacttggacttcagcgtgtcaaccactgggatattagcgggagtgaagatgtcgcacgcggccacaagcgccttatgccgctccataaagctgcagtgtgagctgtacccctcgcggcagatcgccatctgcctcgacccctactgtggccttggttttgccctgtggtgtctgtgcagtgtctactcgggacaccaatcagtgctggtgcccccgctggagctggagagcaacgtgtccctgtggctgtcggccgtcagccagtacaaggcccgcgtcaccttctgctcctactctgtgatggagatgtgcaccaagggcctaggcgcacagacgggtgtcctcaggatgaagggggtgaacctgtcatgtgtgcgcacgtgcatggtggtcgccgaggagcggcccaggattgcgctgacccagtccttctccaagctcttcaaggacctgggcctgccggcccgcgccgtaagcaccacgttcgggtgcagggtcaacgtggccatctgcctccaggtgaggtgcctggggctgcggttctcgaaagctggctgttggcagcatggagacccagtttcccagttgttaatgtgccgttttgtagccgcctgatctatttctccttctctgggcctttgatatctcatttccatgtaacattttagcttcaagggttttatttttaaagatgttctattctagttggagaaaggcttatttggaaaaaaaacacattgtttttgaacagtgactaataactgtaagactctctaagttagatataaaacacagctaagttcttaaagcaagattgaacttactgttttaagatatctagcaatattaaattgaaacattaataaatgtggtaatttgtgttgactcaaattcatttctgaaaccatgaaatgtcttattaaaaggaagcaccaagtttcaggccaggagtggtggctcatgcctataatcccagcactttgggaggctgaggcaggcggattacctgaggtcaggaattcgagaccagcctggacaatatgatgagaccccgtctctactaaaaatacaaaaattagctggctggtggtgcgcgcctgttgtcccggctacttgggaggttgaggcacaagaatcgcttgaacctggcaagaggaggttgcagcgagccaagatctcaccactgcactccagcctgggtgacagagcgagaccctgtctc

SEQ ID NO: 28951 - protein, 321 aa, Homo sapiens
MEKGRLSVGDHVALVYPPGVDLIAAFYGCLYCGCVPVTVRPPHPQNLGTTLPTVKMIVEVSKSACVLTTQAVTRLLRSKEAAAAVDIRTWPTILDTDDIPKKKIASVFRPPSPDVLAYLDFSVSTTGILAGVKMSHAATSALCRSIKLQCELYPSRQIAICLDPYCGLGFALWCLCSVYSGHQSVLVPPLELESNVSLWLSAVSQYKARVTFCSYSVMEMCTKGLGAQTGVLRMKGVNLSCVRTCMVVAEERPRIALTQSFSKLFKDLGLPARAVSTTFGCRVNVAICLQVRCLGLRFSKAGCWQHGDPVSQLLMCRFVAA

SEQ ID NO: 28952 - DNA, 3109 bp, Homo sapiens
ctgtgtccagttgcacccagggaggcagtggtgtctggctcatggggccacgagaacttgatgaagcacgcagaacccagagcccgtccacagctattcttgctgtggtcgggactcggctcatctgggctttgccataggctctgtgacttttggcaaatccctagtcctctaatctttcctactggtcagtgacgtgatgcctcccctcttcgccctgcctcgtcccccatccccacaggctcagtgtggtcttggtgggaccgggtagcgtttccatgaagaatgaaatacgctttcctgagcacgcacagcctgcatcgtcacggccccactcccgtctgagctcactctctgcaggactcccaaggacaaatcatgtgtcgcctcttgcctgtgaaagcccagagcgttcagaatacatgtgggaacactaatgttgctggtgtctcctgtttaacagatgacatcccaaaaaagaagatagcaagcgttttcaggcccccctcccccgatgtcctcgcatacttggacttcagcgtgtcaaccactgggatattagcgggagtgaaggtaggtcctctgaaatcttgtttgcttcagcccctagaaatcaggaggagtggacagaaaggatgtcagatgcagatttaaactgacaggtccttcttatgcaaagcacaaagcaacaattttgcttcttaagatttgtgttaaataccaataaatgctaagatgtgattagcctgagagtaatgcgttttctgatgcattatggttatgtctaaactttctgatttatgactgtctagcttacaggaactggtggctttgaagaatctcttaccttgctgggagtcaatagctcaattaaaatttttcaggcggggcgtggtggctcacgcctgtaatcccagcacttcgggaggccgaggcgggtggatcacaagatcaagagatggagaccatcctggccaacgtggtgaaaccccgtctctactaaaaatacaaaaaattagctgggcatggtggcaggtgcctctaatcccagatactcaggaggctgaggcaggagaattgcttgaacccgggaggcagaggttgcagtgagccgagattgtgccattgcactccagcctgggcgacagagcaagactctgcctcaaaaaaaaaaaaaagaaaaaaattttaaaaattcattaccctgaaattttgtttcaaagatttttagtgtaccatttcttgggtattatttaggttatatggggatttgagccaaccgtcttttaaggaaataaatatgatgtttggtagttcggagctatggtctagccatgtgaacagcggacactgccatccaccctctcccctcctgaatttcatttcactttttttttttgaactttattttactcttaagatgtcgcacgcggccacaagcgccttatgccgctccataaagctgcagtgtgagctgtacccctcgcggcagatcgccatctgcctcgacccctactgtggccttggttttgccctgtggtgtctgtgcaggtgagtgcagggcccctgctgcctgccaggtgggagcagctcgtgtggctcttaggaaccttggccttctaaggcaccttttctgggtgctcaggaagccgatgagatgtgtgtgagtgggtttgtttggggatgaagtgggttggagtctgagtctgaaattgagtgaaaatacatttttcattaaatacactgtccgttatcagtacttgggaagaatctgcttgattccttcaaacactagaaagtggcgatccgtctctagaagtgaatgcctctggagtggtgtccccggatcctctccaagtgttcggagcagagctcagaaccccgtgcctgccatcccccaaccttcaccctgtggcatgttttccaccaaacccccccacttggcgtcagaacagaaatcatgcccctgttgtggctggaaaagaagtgttcttgaggaagggaagagtggagtgcccagggtgctgggtgggcgggcggagcctcacgagccttccctctcgcagtgtctactcgggacaccaatcagtgctggtgcccccgctggagctggagagcaacgtgtccctgtggctgtcggccgtcagccagtacaaggcccgcgtcaccttctgctcctactctgtgatggagatgtgcaccaagggcctaggcgcacagacgggtgtcctcaggatgaagggggtgaacctgtcatgtgtgcgcacgtgcatggtggtcgccgaggagcggcccaggattgcgctgacccagtccttctccaagctcttcaaggacctgggcctgccggcccgcgccgtaagcaccacgttcgggtgcagggtcaacgtggccatctgcctccaggtgaggtgcctggggctgcggttctcgaaagctggctgttggcagcatggagacccagtttcccagttgttaatgtgccgttttgtagccgcctgatctatttctccttctctgggcctttgatatctcatttccatgtaacattttagcttcaagggttttatttttaaagatgttctattctagttggagaaaggcttatttggaaaaaaaacacattgtttttgaacagtgactaataactgtaagactctctaagttagatataaaacacagctaagttcttaaagcaagattgaacttactgttttaagatatctagcaatattaaattgaaacattaataaatgtggtaatttgtgttgactcaaattcatttctgaaaccatgaaatgtcttattaaaaggaagcaccaagtttcaggccaggagtggtggctcatgcctataatcccagcactttgggaggctgaggcaggcggattacctgaggtcaggaattcgagaccagcctggacaatatgatgagaccccgtctctactaaaaatacaaaaattagctggctggtggtgcgcgcctgttgtcccggctacttgggaggttgaggcacaagaatcgcttgaacctggcaagaggaggttgcagcgagccaagatctcaccactgcactccagcctgggtgacagagcgagaccctgtctc

SEQ ID NO: 28953 - protein, 212 aa, Homo sapiens
MFSTKPPHLASEQKSCPCCGWKRSVLEEGKSGVPRVLGGRAEPHEPSLSQCLLGTPISAGAPAGAGEQRVPVAVGRQPVQGPRHLLLLLCDGDVHQGPRRTDGCPQDEGGEPVMCAHVHGGRRGAAQDCADPVLLQALQGPGPAGPRRKHHVRVQGQRGHLPPGEVPGAAVLESWLLAAWRPSFPVVNVPFCSRLIYFSFSGPLISHFHVTF

SEQ ID NO: 28954 - DNA, 3811 bp, Homo sapiens
ccctgtgacatttggttctttagagggacagggacagagagaagacaagtaacccatctactggcaagaacgtttcttacccgatgacccatgtgacatttggtttttagagggatagggacagatagaagacaagttatccatctactggcaagaacgtttcttacctgatgctgtcataggatctgacttagtttcatcttgatgaacgatggtggtgcatacagtgtgtgcttgctggtctgtggtcagatgtgtatcagggcccctcccagctttgaagctcagatcccagtcctggattctcaagtatggccacactgtagcttgatgtaaacactaggtttagcttactgggtgccaggggcttgctgggttcagggaggacctaaacgaaatgtagagtgagctgctgtgagcacatggggtgggtggcgagtgcatgcgggtggcggcacttgggaccgcagcgtggttggggtgtccctgccattcatggcaggtgtgctgtggaaaggttgacatcctgactgttgtcaacagaccctcagagtgatcatttccaacgtcatgatctgccctttcagacattactacctgtgtagtaaattttgtactgaaattgttcccttaatttttagggttcgtttggtagaacggggttctccgcacagcctgccattgatggagtctggaaagatcctccccggcgtgaaggtcatcatcgcacacaccgagaccaaaggacccttgggagactcacacctgggagagatctgggtaagcagcccccacaatgccaccgggtactacaccgtttacggggaggaggcgcttcatgccgaccacttcagtgcccggctgagttttggagacacacagaccatctgggcaaggaccggctaccttggcttccttcggcgaacagagctcactgatgccagtggagggcggcacgatgcactgtatgtggttgggtctctggatgaaactctggagctcagaggcatgcggtaccaccccatcgacattgagacctctgtcatccgagcacacaggagcatcgctgagtgtgccgtattcacctggaccaacctgctggtggtggtggtggagctggatgggctagagcaggatgccctggacctggtggccctggtgaccaacgtggtgctggaggagcactacctggtcgtgggagtggtggtcatcgtggacccaggggtgatccctatcaactctcggggtgagaagcagcgcatgcacctgcgggacggcttcctggctgaccagctggaccccatctatgtcgcctacaacatgtgagcgcagcacaccggcccaggtgccggagatgaatgagccccagcagtccaaggtgtgatgtgggaagacaccgcagagctcactcaccgggactcgcccttcctgtgctcttacagatccctctcaacaatccccgcatctccttttagaaagcacttcctgaattatttaaagaaatattttgaatctgccaagtacatttacaaaaacacggatgctggtattttaacagatggagagacaaggaaaggaaaggaaaggcctggcatgggcattgtgaggaatcacaggcaccgaggttgttctctgctgtactgcaagtttgcactttctttaggctaaaaatatagttcctgatttttaaaattcagttatttattcccacttcaaatgacaagttcatatatagaatttacgggagaaacttgagaccatttacggggagaaacttgattctgggaagatagcagagtacaaaccagctgcctcacttctgtttcacagggaggctgatggaaaaaggaagcaagctggacccatcctccctgctcacagagggcactgtggtcacacacagtgcctcctctgccagttcctttattgaaagaggtgtgctggctggccacggtggcttacacctgtaatcccagcactttgggaggccgaggcgagcagatcacgaggtcaggagaccgagaccatcctggctaacatggtgaaaccctgtctctactaaaaatacaaaaaattagccgggtgtggtggtgggcgcctgtagtcccagctacttgggaggctgaggcaggagaatggtatgaaccagggaggcggagcttgcagtgagccgagatcacgctactgcactccagcctgggtgacagcacgagatgccgtcttaaaaaaacaaaaaagaggtgtgctgcttgtcagcatgtattgtcacggacactcaataagtgccattttggactgtcaaatttagatgctttgtttcagaaagataagccagcatttagttttaaatcactttcctggtttgtaacttgatgctgtttagttaaattgctagttttcctaacactacaatattaattcttctcgtggaagtgtactgatttattatttttattccaagtcagcagatttggaagcattgtggtaaagtctaaggttttcatatccatagtgctgtttggtgagtaccggcagtacagttgaggggagcagggaacagcattgccccgtattgaaggtggagatggttacattcttcactgctttttgcattttgagttgtgtgcctataaaatttggccaaaccattttattattttgttcaaacttgactaagctgagtgatctaaaattatacagaacctaaatcaaagaagagaatgtaaagtcctttagttacttctaagaatttgaagtcaagcacgaatctaagacatagattatttttatatagctaatgaagagtatgttacgaaattgttgggtttttggggtattgagggtggcaaattttgtgaatcatgcatgcttcacagaaacaaccaggtttttccagaattagtctggatcagtgcctaacaaagctgttattaattctccacacatgagtctggctaactgggccagctctcatgttttactcctgtctggctacaaatagcactgtgcatagtagccctgtttccccatggtgttggactgtggtaaagtatgttgtgacatactggaattctaataatcctgttgtaagtatgtacagaatctatgtaacttattgttgacatacagaggtttgggaagtagtctaatggacattccttacaatagaatggctgggaagggaaagaaaaaaaaaaaaaaactacctaactccaatcttaatgttgtagttttatagcaaacaaaaattgtcagctttttgtattgaaaggtcagtggtggtaagacaaggtgtcttgtaaattaagattttaagaagtgcattaaaatgttttagaattactctgggaattctgtatatcacactaaaatttttatatcattatgttaataaaagttattgactttgtaattctgcattttgaaatgtgtgaaaagggtctttaaattaccccgaataggttgtatcttattttgctttttttctgactataaaagcagttatgcttatagcataaaatctagaaagcacattaaagtataaagaaaattaaaatttcttataattctacctctgagtaaacagcagcattcgtatgtaacataaaccctctcagggatttattttttctttttaaaaattttttacaaaattaggatcaagtgcttttttaaataatttgcttttgtacttaataaattatagactttaaaatctattacatatattcttctacatgtttcagtggctgtattttacaagtgtgccatgagtaaatgtagtatttgctgtattgccgtacatcagcgt

SEQ ID NO: 28955 - protein, 251 aa, Homo sapiens
MICPFRHYYLCSKFCTEIVPLIFRVRLVERGSPHSLPLMESGKILPGVKVIIAHTETKGPLGDSHLGEIWVSSPHNATGYYTVYGEEALHADHFSARLSFGDTQTIWARTGYLGFLRRTELTDASGGRHDALYVVGSLDETLELRGMRYHPIDIETSVIRAHRSIAECAVFTWTNLLVVVVELDGLEQDALDLVALVTNVVLEEHYLVVGVVVIVDPGVIPINSRGEKQRMHLRDGFLADQLDPIYVAYNM

SEQ ID NO: 28956 - DNA, 3193 bp, Homo sapiens
gacgttattttaatgtcactgaatcaagagagtctcgtgtcatgttttctttaacaagggacatagctctcctccttccagatcctccccggcgtgaaggtcatcatcgcacacaccgagaccaaaggacccttgggagactcacacctgggagagatctgggtaagcagcccccacaatgccaccgggtactacaccgtttacggggaggaggcgcttcatgccgaccacttcagtgcccggctgagttttggagacacacagaccatctgggcaaggaccggctaccttggcttccttcggcgaacagagctcactgatgccagtggagggcggcacgatgcactgtatgtggttgggtctctggatgaaactctggagctcagaggcatgcggtaccaccccatcgacattgagacctctgtcatccgagcacacaggagcatcgctgagtgtgccgtattcacctggaccaacctgctggtggtggtggtggagctggatgggctagagcaggatgccctggacctggtggccctggtgaccaacgtggtgctggaggagcactacctggtcgtgggagtggtggtcatcgtggacccaggggtgatccctatcaactctcggggtgagaagcagcgcatgcacctgcgggacggcttcctggctgaccagctggaccccatctatgtcgcctacaacatgtgagcgcagcacaccggcccaggtgccggagatgaatgagccccagcagtccaaggtgtgatgtgggaagacaccgcagagctcactcaccgggactcgcccttcctgtgctcttacagatccctctcaacaatccccgcatctccttttagaaagcacttcctgaattatttaaagaaatattttgaatctgccaagtacatttacaaaaacacggatgctggtattttaacagatggagagacaaggaaaggaaaggaaaggcctggcatgggcattgtgaggaatcacaggcaccgaggttgttctctgctgtactgcaagtttgcactttctttaggctaaaaatatagttcctgatttttaaaattcagttatttattcccacttcaaatgacaagttcatatatagaatttacgggagaaacttgagaccatttacggggagaaacttgattctgggaagatagcagagtacaaaccagctgcctcacttctgtttcacagggaggctgatggaaaaaggaagcaagctggacccatcctccctgctcacagagggcactgtggtcacacacagtgcctcctctgccagttcctttattgaaagaggtgtgctggctggccacggtggcttacacctgtaatcccagcactttgggaggccgaggcgagcagatcacgaggtcaggagaccgagaccatcctggctaacatggtgaaaccctgtctctactaaaaatacaaaaaattagccgggtgtggtggtgggcgcctgtagtcccagctacttgggaggctgaggcaggagaatggtatgaaccagggaggcggagcttgcagtgagccgagatcacgctactgcactccagcctgggtgacagcacgagatgccgtcttaaaaaaacaaaaaagaggtgtgctgcttgtcagcatgtattgtcacggacactcaataagtgccattttggactgtcaaatttagatgctttgtttcagaaagataagccagcatttagttttaaatcactttcctggtttgtaacttgatgctgtttagttaaattgctagttttcctaacactacaatattaattcttctcgtggaagtgtactgatttattatttttattccaagtcagcagatttggaagcattgtggtaaagtctaaggttttcatatccatagtgctgtttggtgagtaccggcagtacagttgaggggagcagggaacagcattgccccgtattgaaggtggagatggttacattcttcactgctttttgcattttgagttgtgtgcctataaaatttggccaaaccattttattattttgttcaaacttgactaagctgagtgatctaaaattatacagaacctaaatcaaagaagagaatgtaaagtcctttagttacttctaagaatttgaagtcaagcacgaatctaagacatagattatttttatatagctaatgaagagtatgttacgaaattgttgggtttttggggtattgagggtggcaaattttgtgaatcatgcatgcttcacagaaacaaccaggtttttccagaattagtctggatcagtgcctaacaaagctgttattaattctccacacatgagtctggctaactgggccagctctcatgttttactcctgtctggctacaaatagcactgtgcatagtagccctgtttccccatggtgttggactgtggtaaagtatgttgtgacatactggaattctaataatcctgttgtaagtatgtacagaatctatgtaacttattgttgacatacagaggtttgggaagtagtctaatggacattccttacaatagaatggctgggaagggaaagaaaaaaaaaaaaaaactacctaactccaatcttaatgttgtagttttatagcaaacaaaaattgtcagctttttgtattgaaaggtcagtggtggtaagacaaggtgtcttgtaaattaagattttaagaagtgcattaaaatgttttagaattactctgggaattctgtatatcacactaaaatttttatatcattatgttaataaaagttattgactttgtaattctgcattttgaaatgtgtgaaaagggtctttaaattaccccgaataggttgtatcttattttgctttttttctgactataaaagcagttatgcttatagcataaaatctagaaagcacattaaagtataaagaaaattaaaatttcttataattctacctctgagtaaacagcagcattcgtatgtaacataaaccctctcagggatttattttttctttttaaaaattttttacaaaattaggatcaagtgcttttttaaataatttgcttttgtacttaataaattatagactttaaaatctattacatatattcttctacatgtttcagtggctgtattttacaagtgtgccatgagtaaatgtagtatttgctgtattgccgtacatcagcgt

SEQ ID NO: 28957 - protein, 105 aa, Homo sapiens
MRYHPIDIETSVIRAHRSIAECAVFTWTNLLVVVVELDGLEQDALDLVALVTNVVLEEHYLVVGVVVIVDPGVIPINSRGEKQRMHLRDGFLADQLDPIYVAYNM

SEQ ID NO: 28958 - DNA, 1215 bp, Homo sapiens
cctggcagccctgccacccccgccttcggctcccattggctgccacggcctgcagtgggctgcaccagggttcatccatcctccctgggcagagggaataagaggctgcctctgcccaccagtcctgccgcccaggacccgcagcagagacgacgcctgcagcaaggagaccaggaaggggtgagacaaggaagaggatgtctgagctggagaaggccatggtggccctcatcgacgttttccaccaatattctggaagggagggagacaagcacaagctgaagaaatccgaactgaaggagctcatcaacaatgagctttcccatttcttagaggaaatcaaagagcaggaggttgtggacaaagtcatggaaacactggacaatgatggagacggcgaatgtgacttccaggaattcatggcctttgttgccatggttactactgcctgccacgagttctttgaacatgagtgagattagaaagcagccaaacctttcctgtaacagagacggtcatgcaagaaagcagacagcaagggcttgcagcctagtaggagctgagctttccagccgtgttgtagctaattaggaagcttgatttgctttgtgattgaaaaattgaaaacctctttccaaaggctgttttaacggcctgcatcattctttctgctatattaggcctgtgtgtaagctgactggccccagggactcttgttaacagtaacttaggagtcaggtctcagtgataaagcgtgcaccgtgcagcccgccatggccgtgtagaccctaacccggagggaaccctgactacagaaattaccccggggcacccttaaaacttccactacctttaaaaaacaaagccttatccagcattatttgaaaacactgctgttctttaaatgcgttcctcatccatgcagataacagctggttggccggtgtggccctgcaagggcgtggtggcttcggcctgcttcccgggatgcgcctgatcaccaggtgaacgctcagcgctggcagcgctcctggaaaaagcaactccatcagaactcgcaatccgagccagctctgggggctccagcgtggcctccgtgacccatgcgattcaagtcgcggctgcaggatccttgcctccaacgtgcctccagcacatgcggcttccgagggcactaccgggggctctgagccaccgcgagggcctgcgttcaat

SEQ ID NO: 28959 - protein, 92 aa, Homo sapiens; identical to SEQ ID NO: 3993

SEQ ID NO: 28960 - DNA, 1324 bp, Homo sapiens
ttgctcctagtcactgtctcactttcagattgattttaacagcttgcagttgatggtttgctcacctgcactctaccacctcatcttggagccttgcaggaacagagagggaccctgtggggattaattcaggggaaattaatccctgaattcccttgctgctctgcctctgtatttttgccagtttccctgttggcccaacccagccagaattcagagggcatgggaatatatccccgtggcccacacggacagagaaggcaggcccacagctgtctaagaggccggtggaaggattatgataaaagtgcaaattcccagaatgcccctccaggccatgcctgctgctctgagcttgaaaagagtgccaaggccattccatcccccttgtctgggttgaggtctgtattgataacatatgaaatgttttaggatgaggtatagatgagaaggcaactttcctttgcgagcccctaggatgtctgagctggagaaggccatggtggccctcatcgacgttttccaccaatattctggaagggagggagacaagcacaagctgaagaaatccgaactgaaggagctcatcaacaatgagctttcccatttcttagaggaaatcaaagagcaggaggttgtggacaaagtcatggaaacactggacaatgatggagacggcgaatgtgacttccaggaattcatggcctttgttgccatggttactactgcctgccacgagttctttgaacatgagtgagattagaaagcagccaaacctttcctgtaacagagacggtcatgcaagaaagcagacagcaagggcttgcagcctagtaggagctgagctttccagccgtgttgtagctaattaggaagcttgatttgctttgtgattgaaaaattgaaaacctctttccaaaggctgttttaacggcctgcatcattctttctgctatattaggcctgtgtgtaagctgactggccccagggactcttgttaacagtaacttaggagtcaggtctcagtgataaagcgtgcaccgtgcagcccgccatggccgtgtagaccctaacccggagggaaccctgactacagaaattaccccggggcacccttaaaacttccactacctttaaaaaacaaagccttatccagcattatttgaaaacactgctgttctttaaatgcgttcctcatccatgcagataacagctggttggccggtgtggccctgcaagggcgtggtggcttcggcctgcttcccgggatgcgcctgatcaccaggtgaacgctcagcgctggcagcgctcctggaaaaagcaa

SEQ ID NO: 28961 - protein, 92 aa, Homo sapiens; identical to SEQ ID NO: 3993

SEQ ID NO: 28962 - DNA, 1137 bp, Homo sapiens
cctggcagccctgccacccccgccttcggctcccattggctgccacggcctgcagtgggctgcaccagggttcatccatcctccctgggcagagggaataagaggctgcctctgcccaccagtcctgccgcccaggacccgcagcagagacgacgcctgcagcaaggagaccaggaaggggtgagacaaggaagaggatgtctgagctggagaaggccatggtggccctcatcgacgttttccaccaatattctggaagggagggagacaagcacaagctgaagaaatccgaactgaaggagctcatcaacaatgagctttcccatttcttagagagatggagtctccctatgttgcccaggctggtctcaaacttcctgtgctcaagttatcctcctgccttagcttcccaaagtgctgggattacaggaaatcaaagagcaggaggttgtggacaaagtcatggaaacactggacaatgatggagacggcgaatgtgacttccaggaattcatggcctttgttgccatggttactactgcctgccacgagttctttgaacatgagtgagattagaaagcagccaaacctttcctgtaacagagacggtcatgcaagaaagcagacagcaagggcttgcagcctagtaggagctgagctttccagccgtgttgtagctaattaggaagcttgatttgctttgtgattgaaaaattgaaaacctctttccaaaggctgttttaacggcctgcatcattctttctgctatattaggcctgtgtgtaagctgactggccccagggactcttgttaacagtaacttaggagtcaggtctcagtgataaagcgtgcaccgtgcagcccgccatggccgtgtagaccctaacccggagggaaccctgactacagaaattaccccggggcacccttaaaacttccactacctttaaaaaacaaagccttatccagcattatttgaaaacactgctgttctttaaatgcgttcctcatccatgcagataacagctggttggccggtgtggccctgcaagggcgtggtggcttcggcctgcttcccgggatgcgcctgatcaccaggtgaacgctcagcgctggcagcgctcctggaaaaagcaa

SEQ ID NO: 28963 - protein, 115 aa, Homo sapiens
MESPYVAQAGLKLPVLKLSSCLSFPKCWDYRKSKSRRLWTKSWKHWTMMETANVTSRNSWPLLPWLLLPATSSLNMSEIRKQPNLSCNRDGHARKQTARACSLVGAELSSRVVAN

SEQ ID NO: 28964 - DNA, 1172 bp, Homo sapiens
ttgctcctagtcactgtctcactttcagattgattttaacagcttgcagttgatggtttgctcacctgcactctaccacctcatcttggagccttgcaggaacagagagggaccctgtggggattaattcaggggaaattaatccctgaattcccttgctgctctgcctctgtatttttgccagtttccctgttggcccaacccagccagaattcagagggcatgggaatatatccccgtggcccacacggacagagaaggcaggcccacagctgtctaagaggccggtggaaggattatgataaaagtgcaaattcccagaatgcccctccaggccatgcctgctgctctgagcttgaaaagagtgccaaggccattccatcccccttgtctgggttgaggtctgtattgataacatatgaaatgttttaggatgaggtatagatgagaaggcaactttcctttgcgagcccctaggatgtctgagctggagaaggccatggtggccctcatcgacgttttccaccaatattctggaagggagggagacaagcacaagctgaagaaatccgaactgaaggagctcatcaacaatgagctttcccatttcttagaggaaatcaaagagcaggaggttgtggacaaagtcatggaaacactggacaatgatggagacggcgaatgtgacttccaggaattcatggcctttgttgccatggttactactgcctgccacgagttctttgaacatgagtgagattagaaagcagccaaacctttcctgtaacagagacggtcatgcaagaaagcagacagcaagggcttgcagcctagtaggagctgagctttccagccgtgttgtagctaattaggaagcttgatttgctttgtgattgaaaaattgaaaacctctttccaaaggctgttttaacggcctgcatcattctttctgctatattaggcctgtgtgtaagctgactggccccagggactcttgttaacagtaacttaggagtcaggtctcagtgataaagcgtgcaccgtgcagcccgccatggccgtgtagaccctaacccggagggaaccctgactacagaaattaccccggggcacccttaaaacttccactacctttaaaaaacaaagccttatccagcattatttgaaaacac

SEQ ID NO: 28965 - protein, 92 aa, Homo sapiens; identical to SEQ ID NO: 3993

SEQ ID NO: 28966 - DNA, 891 bp, Homo sapiens
cctggcagccctgccacccccgccttcggctcccattggctgccacggcctgcagtgggctgcaccagggttcatccatcctccctgggcagagggaataagaggctgcctctgcccaccagtcctgccgcccaggacccgcagcagagacgacgcctgcagcaaggagaccaggaaggggtgagacaaggaagaggatgtctgagctggagaaggccatggtggccctcatcgacgttttccaccaatattctggaagggagggagacaagcacaagctgaagaaatccgaactgaaggagctcatcaacaatgagctttcccatttcttagaggaaatcaaagagcaggaggttgtggacaaagtcatggaaacactggacaatgatggagacggcgaatgtgacttccaggaattcatggcctttgttgccatggttactactgcctgccacgagttctttgaacatgagtgagattagaaagcagccaaacctttcctgtaacagagacggtcatgcaagaaagcagacagcaagggcttgcagcctagtaggagctgagctttccagccgtgttgtagctaattaggaagcttgatttgctttgtgattgaaaaattgaaaacctctttccaaaggctgttttaacggcctgcatcattctttctgctatattaggcctgtgtgtaagctgactggccccagggactcttgttaacagtaacttaggagtcaggtctcagtgataaagcgtgcaccgtgcagcccgccatggccgtgtagaccctaacccggagggaaccctgactacagaaattaccccggggcacccttaaaacttccactacctttaaaaaacaaagccttatccagcattatttgaaaacac

SEQ ID NO: 28967 - protein, 92 aa, Homo sapiens; identical to SEQ ID NO: 3993

SEQ ID NO: 28968 - DNA, 985 bp, Homo sapiens
cctggcagccctgccacccccgccttcggctcccattggctgccacggcctgcagtgggctgcaccagggttcatccatcctccctgggcagagggaataagaggctgcctctgcccaccagtcctgccgcccaggacccgcagcagagacgacgcctgcagcaaggagaccaggaaggggtgagacaaggaagaggatgtctgagctggagaaggccatggtggccctcatcgacgttttccaccaatattctggaagggagggagacaagcacaagctgaagaaatccgaactgaaggagctcatcaacaatgagctttcccatttcttagagagatggagtctccctatgttgcccaggctggtctcaaacttcctgtgctcaagttatcctcctgccttagcttcccaaagtgctgggattacaggaaatcaaagagcaggaggttgtggacaaagtcatggaaacactggacaatgatggagacggcgaatgtgacttccaggaattcatggcctttgttgccatggttactactgcctgccacgagttctttgaacatgagtgagattagaaagcagccaaacctttcctgtaacagagacggtcatgcaagaaagcagacagcaagggcttgcagcctagtaggagctgagctttccagccgtgttgtagctaattaggaagcttgatttgctttgtgattgaaaaattgaaaacctctttccaaaggctgttttaacggcctgcatcattctttctgctatattaggcctgtgtgtaagctgactggccccagggactcttgttaacagtaacttaggagtcaggtctcagtgataaagcgtgcaccgtgcagcccgccatggccgtgtagaccctaacccggagggaaccctgactacagaaattaccccggggcacccttaaaacttccactacctttaaaaaacaaagccttatccagcattatttgaaaacac

SEQ ID NO: 28969 - protein, 115 aa, Homo sapiens; identical to SEQ ID NO: 28963

SEQ ID NO: 28970 - DNA, 661 bp, Homo sapiens
cctggcagccctgccacccccgccttcggctcccattggctgccacggcctgcagtgggctgcaccagggttcatccatcctccctgggcagagggaataagaggctgcctctgcccaccagtcctgccgcccaggacccgcagcagagacgacgcctgcagcaaggagaccaggaaggggtgagacaaggaagaggatgtctgagctggagaaggccatggtggccctcatcgacgttttccaccaatattctggaagggagggagacaagcacaagctgaagaaatccgaactgaaggagctcatcaacaatgagctttcccatttcttagaggaaatcaaagagcaggaggttgtggacaaagtcatggaaacactggacaatgatggagacggcgaatgtgacttccaggaattcatggcctttgttgccatggttactactgcctgccacgagttctttgaacatgagtgagattagaaagcagccaaacctttcctgtaacagagacggtcatgcaagaaagcagacagcaagggcttgcagcctagtaggagctgagctttccagccgtgttgtagctaattaggaagcttgatttgctttgtgattgaaaaattgaaaacctctttccaaaggctgttttaacggcctgcatc

SEQ ID NO: 28971 - protein, 92 aa, Homo sapiens; identical to SEQ ID NO: 3993

SEQ ID NO: 28972 - DNA, 929 bp, Homo sapiens
ttgctcctagtcactgtctcactttcagattgattttaacagcttgcagttgatggtttgctcacctgcactctaccacctcatcttggagccttgcaggaacagagagggaccctgtggggattaattcaggggaaattaatccctgaattcccttgctgctctgcctctgtatttttgccagtttccctgttggcccaacccagccagaattcagagggcatgggaatatatccccgtggcccacacggacagagaaggcaggcccacagctgtctaagaggccggtggaaggattatgataaaagtgcaaattcccagaatgcccctccaggccatgcctgctgctctgagcttgaaaagagtgccaaggccattccatcccccttgtctgggttgaggtctgtattgataacatatgaaatgttttaggatgaggtatagatgagaaggcaactttcctttgcgagcccctaggatgtctgagctggagaaggccatggtggccctcatcgacgttttccaccaatattctggaagggagggagacaagcacaagctgaagaaatccgaactgaaggagctcatcaacaatgagctttcccatttcttagaggaaatcaaagagcaggaggttgtggacaaagtcatggaaacactggacaatgatggagacggcgaatgtgacttccaggaattcatggcctttgttgccatggttactactgcctgccacgagttctttgaacatgagtgagattagaaagcagccaaacctttcctgtaacagagacggtcatgcaagaaagcagacagcaagggcttgcagcctagtaggagctgagctttccagccgtgttgtagctaattaggaagcttgatttgctttgtgattgaaaaattgaaaacctctttccaaaggctgtttt

SEQ ID NO: 28973 - protein, 92 aa, Homo sapiens; identical to SEQ ID NO: 3993

SEQ ID NO: 28974 - DNA, 742 bp, Homo sapiens
cctggcagccctgccacccccgccttcggctcccattggctgccacggcctgcagtgggctgcaccagggttcatccatcctccctgggcagagggaataagaggctgcctctgcccaccagtcctgccgcccaggacccgcagcagagacgacgcctgcagcaaggagaccaggaaggggtgagacaaggaagaggatgtctgagctggagaaggccatggtggccctcatcgacgttttccaccaatattctggaagggagggagacaagcacaagctgaagaaatccgaactgaaggagctcatcaacaatgagctttcccatttcttagagagatggagtctccctatgttgcccaggctggtctcaaacttcctgtgctcaagttatcctcctgccttagcttcccaaagtgctgggattacaggaaatcaaagagcaggaggttgtggacaaagtcatggaaacactggacaatgatggagacggcgaatgtgacttccaggaattcatggcctttgttgccatggttactactgcctgccacgagttctttgaacatgagtgagattagaaagcagccaaacctttcctgtaacagagacggtcatgcaagaaagcagacagcaagggcttgcagcctagtaggagctgagctttccagccgtgttgtagctaattaggaagcttgatttgctttgtgattgaaaaattgaaaacctctttccaaaggctgtttt

SEQ ID NO: 28975 - protein, 115 aa, Homo sapiens; identical to SEQ ID NO: 28963

SEQ ID NO: 28976 - DNA, 1179 bp, Homo sapiens
gaaatacctgcaactgtcagcctcagcagagctctggggagtctgcaccatggcttggaccccactcctcttcctcaccctcctcctccactgcacagggtctctctcccagcttgtgctgactcaatcgccctctgcctctgcctccctgggagcctcggtcaagctcacctgcactctgagcagtgggcacagcagctacgccatcgcatggcatcagcagcagccagagaagggccctcggtacttgatgaagcttaacagtgatggcagccacagcaagggggacgggatccctgatcgcttctcaggctccagctctggggctgagcgctacctcaccatctccagcctccagtctgaggatgaggctgactattactgtcagacctggggcactggcatgttgggtgttcggcggagggaccaagctgaccgtcctaggtcagcccaaggctgccccctcggtcactctgttcccgccctcctctgaggagcttcaagccaacaaggccacactggtgtgtctcataagtgacttctacccgggagccgtgacagtggcctggaaggcagatagcagccccgtcaaggcgggagtggagaccaccacaccctccaaacaaagcaacaacaagtacgcggccagcagctacctgagcctgacgcctgagcagtggaagtcccacagaagctacagctgccaggtcacgcatgaagggagcaccgtggagaagacagtggcccctacagaatgttcataggttctcaaccctcaccccccaccacgggagactagagctgcaggatcccaggggaggggtctctcctcccaccccaaggcatcaagcccttctccctgcactcaataaaccctcaataaatattctcattgtcaatcagaaatcttgttttatctcattttttcttttctcacatataattcctagccttccctgggttctcaatttatggtggagggaattctgcacccagtgggaaagtcacccaagggaggaggcttacagcctccccgagtcatctctctggaaggtccttcctcttccagtcaccccttccccaactctccaccatacccctgagcctccagcctggcctcagctcagaccagtcccacaccctcctcaattttacttctcaataaagacctgatcatgt

SEQ ID NO: 28977 - protein, 165 aa, Homo sapiens
MAATARGTGSLIASQAPALGLSATSPSPASSLRMRLTITVRPGALACWVFGGGTKLTVLGQPKAAPSVTLFPPSSEELQANKATLVCLISDFYPGAVTVAWKADSSPVKAGVETTTPSKQSNNKYAASSYLSLTPEQWKSHRSYSCQVTHEGSTVEKTVAPTECS

SEQ ID NO: 28978 - DNA, 890 bp, Homo sapiens
agcagagctctggggagtctgcaccatggcttggaccccactcctcttcctcaccctcctcctccactgcacagggtctctctcccagcttgtgctgactcaatcgccctctgcctctgcctccctgggagcctcggtcaagctcacctgcactctgagcagtgggcacagcagctacgccatcgcatggcatcagcagcagccagagaagggccctcggtacttgatgaagcttaacagtgatggcagccacagcaagggggacgggatccctgatcgcttctcaggctccagctctggggctgagcgctacctcaccatctccagcctccagtctgaggatgaggctgactattactgtcagacctggggcactggcattcacacatgtgtggtattcggcggagggaccaagctgaccgtcctaggtcagcccaaggctgccccctcggtcactctgttcccgccctcctctgaggagcttcaagccaacaaggccacactggtgtgtctcataagtgacttctacccgggagccgtgacagtggcctggaaggcagatagcagccccgtcaaggcgggagtggagaccaccacaccctccaaacaaagcaacaacaagtacgcggccagcagctatctgagcctgacgcctgagcagtggaagtcccacagaagctacagctgccaggtcacgcatgaagggagcaccgtggagaagacagtggcccctacagaatgttcataggttctcaaccctcaccccccaccacgggagactagagctgcaggatcccaggggaggggtctctcctcccaccccaaggcatcaagcccttctccctgcactcaataaaccctcaataaatattctcattgtcaatcagaaa

SEQ ID NO: 28979 - protein, 240 aa, Homo sapiens
MAWTPLLFLTLLLHCTGSLSQLVLTQSPSASASLGASVKLTCTLSSGHSSYAIAWHQQQPEKGPRYLMKLNSDGSHSKGDGIPDRFSGSSSGAERYLTISSLQSEDEADYYCQTWGTGIHTCVVFGGGTKLTVLGQPKAAPSVTLFPPSSEELQANKATLVCLISDFYPGAVTVAWKADSSPVKAGVETTTPSKQSNNKYAASSYLSLTPEQWKSHRSYSCQVTHEGSTVEKTVAPTECS

SEQ ID NO: 28980 - DNA, 925 bp, Homo sapiens
tgaaaaggccctgaggaaaacaaaccccagctgggaagcctgagaacacttagccttcatgagtgtccccaccatggcctggatgatgcttctcctcggactccttgcttatggatcaggagtggattctcagactgtggtgacccaggagccatcgttctcagtgtcccctggagggacagtcacactcacttgtggcttgagctctggctcagtctctactagttactaccccagctggtaccagcagaccccaggccaggctccacgcacgctcatctacagcacaaacactcgctcttctggggtccctgatcgcttctctggctccatccttgggaacaaagctgccctcaccatcacgggggcccaggcagatgatgaatctgattattactgtgtgctgtatatgggtagtggcattgtgtggtattcggcggagggaccaagctgaccgtcctaggtcagcccaaggctgccccctcggtcactctgttcccgccctcctctgaggagcttcaagccaacaaggccacactggtgtgtctcataagtgacttctacccgggagccgtgacagtggcctggaaggcagatagcagccccgtcaaggcgggagtggagaccaccacaccctccaaacaaagcaacaacaagtacgcggccagcagctatctgagcctgacgcctgagcagtggaagtcccacagaagctacagctgccaggtcacgcatgaagggagcaccgtggagaagacagtggcccctacagaatgttcataggttctcaaccctcaccccccaccacgggagactagagctgcaggatcccaggggaggggtctctcctcccaccccaaggcatcaagcccttctccctgcactcaataaaccctcaataaatattctcattgtcaatcagaaa

SEQ ID NO: 28981 - protein, 131 aa, Homo sapiens
MSVPTMAWMMLLLGLLAYGSGVDSQTVVTQEPSFSVSPGGTVTLTCGLSSGSVSTSYYPSWYQQTPGQAPRTLIYSTNTRSSGVPDRFSGSILGNKAALTITGAQADDESDYYCVLYMGSGIVWYSAEGPS

SEQ ID NO: 28982 - DNA, 920 bp, Homo sapiens
tgaaaaggccctgaggaaaacaaaccccagctgggaagcctgagaacacttagccttcatgagtgtccccaccatggcctggatgatgcttctcctcggactccttgcttatggatcaggagtggattctcagactgtggtgacccaggagccatcgttctcagtgtcccctggagggacagtcacactcacttgtggcttgagctctggctcagtctctactagttactaccccagctggtaccagcagaccccaggccaggctccacgcacgctcatctacagcacaaacactcgctcttctggggtccctgatcgcttctctggctccatccttgggaacaaagctgccctcaccatcacgggggcccaggcagatgatgaatctgattattactgtgtgctgtatatgggtagtggctgttgggtgttcggcggagggaccaagctgaccgtcctaggtcagcccaaggctgccccctcggtcactctgttcccgccctcctctgaggagcttcaagccaacaaggccacactggtgtgtctcataagtgacttctacccgggagccgtgacagtggcctggaaggcagatagcagccccgtcaaggcgggagtggagaccaccacaccctccaaacaaagcaacaacaagtacgcggccagcagctacctgagcctgacgcctgagcagtggaagtcccacagaagctacagctgccaggtcacgcatgaagggagcaccgtggagaagacagtggcccctacagaatgttcataggttctcaaccctcaccccccaccacgggagactagagctgcaggatcccaggggaggggtctctcctcccaccccaaggcatcaagcccttctccctgcactcaataaaccctcaataaatattctcattgtcaatcag

SEQ ID NO: 28983 - protein, 240 aa, Homo sapiens
MSVPTMAWMMLLLGLLAYGSGVDSQTVVTQEPSFSVSPGGTVTLTCGLSSGSVSTSYYPSWYQQTPGQAPRTLIYSTNTRSSGVPDRFSGSILGNKAALTITGAQADDESDYYCVLYMGSGCWVFGGGTKLTVLGQPKAAPSVTLFPPSSEELQANKATLVCLISDFYPGAVTVAWKADSSPVKAGVETTTPSKQSNNKYAASSYLSLTPEQWKSHRSYSCQVTHEGSTVEKTVAPTECS

SEQ ID NO: 28984 - DNA, 1196 bp, Homo sapiens
tgaaaaggccctgaggaaaacaaaccccagctgggaagcctgagaacacttagccttcatgagtgtccccaccatggcctggatgatgcttctcctcggactccttgcttatggatcaggagtggattctcagactgtggtgacccaggagccatcgttctcagtgtcccctggagggacagtcacactcacttgtggcttgagctctggctcagtctctactagttactaccccagctggtaccagcagaccccaggccaggctccacgcacgctcatctacagcacaaacactcgctcttctggggtccctgatcgcttctctggctccatccttgggaacaaagctgccctcaccatcacgggggcccaggcagatgatgaatctgattattactgtgtgctgtatatgggtagtggctgttgggtgttcggcggagggaccaagctgaccgtcctaggtcagcccaaggctgccccctcggtcactctgttcccgccctcctctgaggagcttcaagccaacaaggccacactggtgtgtctcataagtgacttctacccgggagccgtgacagtggcctggaaggcagatagcagccccgtcaaggcgggagtggagaccaccacaccctccaaacaaagcaacaacaagtacgcggccagcagctacctgagcctgacgcctgagcagtggaagtcccacagaagctacagctgccaggtcacgcatgaagggagcaccgtggagaagacagtggcccctacagaatgttcataggttctcaaccctcaccccccaccacgggagactagagctgcaggatcccaggggaggggtctctcctcccaccccaaggcatcaagcccttctccctgcactcaataaaccctcaataaatattctcattgtcaatcagaaatcttgttttatctcattttttcttttctcacatataattcctagccttccctgggttctcaatttatggtggagggaattctgcacccagtgggaaagtcacccaagggaggaggcttacagcctccccgagtcatctctctggaaggtccttcctcttccagtcaccccttccccaactctccaccatacccctgagcctccagcctggcctcagctcagaccagtcccacaccctcctcaattttacttctcaataaagacctgatcatgt

SEQ ID NO: 28985 - protein, 240 aa, Homo sapiens; identical to SEQ ID NO: 28983

SEQ ID NO: 28986 - DNA, 779 bp, Homo sapiens
tcttctcgcacggcaacgccgtggacctgagccagatgagcagcttctacattggcctgggctcccgcctccattgcaacatcttctacgactactccggctacggtgccagcgcgggcaggccttccgagaggaacctctatgccgacatcgacgccgcctggcaggccctgcacaccaggtacggcatcagcccggacagcatcatcctgtacgggcagagcatcggcacggtgcccaccgtggacctggcctcgcgctacgagtgtgccgcggtggtgctgcactcgccgctcacctcgggcatgcgcgtcgccttccccgacaccaagacctactgcttcgacgccttccctaacatcgagaaggtgtccaagatcacgtcgcccgtgctcatcatccacggcatagaggacgaggtgatcgacttctcacacgggctggcgctctacgagcgctgccccaaggcggtggagccgctgtgggtggagggcgccggacacaacgacatcgagctctacagccagtacctggagcgcctgcgtcgcttcatctcccaggagctgcccagccagcgcgcctagcggcggccccaaccggccggacctcaccccgcgccggccccccaggggctgcatgtggacccccgggcggcctaggggaccctgccccgagccaggggctgtggacgatgtacaggcaacagagctacgcactcctttccttttggaagcaagaagaaaataagtgaaaacggaaattaaagatttaaaattttt

SEQ ID NO: 28987 - protein, 182 aa, Homo sapiens
MSSFYIGLGSRLHCNIFYDYSGYGASAGRPSERNLYADIDAAWQALHTRYGISPDSIILYGQSIGTVPTVDLASRYECAAVVLHSPLTSGMRVAFPDTKTYCFDAFPNIEKVSKITSPVLIIHGIEDEVIDFSHGLALYERCPKAVEPLWVEGAGHNDIELYSQYLERLRRFISQELPSQRA

SEQ ID NO: 28988 - DNA, 501 bp, Homo sapiens
atgaatgggctgtcgctgagtgagctctgctgcctttgctgcccgccctgccccggccgcatcgctgccaagctcgccttcctggtgcctgagcctgagccggggcctggtggggccggggccgccccctcggggaccctgcgggcctcctcgggcgcacctgggcgctggaagctgcacctgacggagcgcgccgacttccagtacagccagcgcgagctggacaccatcgaggtcttccccaccaagagcgcccgcggcaaccgcgtctcctgcatgtatgttcgctgcgtgcctggtgccaggtacacggtcttcttctcgcacggcaacgccgtggacctgagccagatgagcagcttctacattggcctgggctcccgcctccattgcaacatcttctacgactactccggctacggtgccagcgcgggcaggccttccgagaggaacctctatgccgacatcgacgccgcctggcaggccctgcacaccaggtga

SEQ ID NO: 28989 - protein, 166 aa, Homo sapiens [sequence omitted]

SEQ ID NO: 28990 - DNA, 297 bp, Homo sapiens
ctcttctgtgcccaacttaaaggcagaggagaaggggaaggaagacacctgccaaatgctggaggctgcagcctgcggcaccgcggctcgcctcactgtgggtggtggccgagatggcgactgcagtgcgaccggagtgatgctgtcctcacagtatattcaaggcatctgatggcattgatgagcaactgaggaatcatttaattaatcaccaagttcttcatccttacttaaaaatgtagagtcacaaaatcatgcatcaaaacacactctttttttaataaaatatggtctttt

SEQ ID NO: 28991 - protein, 38 aa, Homo sapiens
MLEAAACGTAARLTVGGGRDGDCSATGVMLSSQYIQGI

SEQ ID NO: 28992 - DNA, 890 bp, Homo sapiens
agcagagctctggggagtctgcaccatggcctggaccccactcctcctcctcttccctctcctcctccactgcacagggtctctctcccagcctgtgctgactcaatcatcctctgcctctgcttccctgggatcctcggtcaagctcacctgcactctgagcagtgggcacagtagctacatcatcgcatggcatcagcagcagccagggaaggcccctcggtacttgatgaagcttgaaggtagtggaagctacaacaaggggagcggagttcctgatcgcttctcaggctccagctctggggctgaccgctacctcaccatctccaacctccagtttgaggatgaggctgattattactgtgagacctgggacagtaacactcacacatgttgggtgttcggcggagggaccaagctgaccgtcctaggtcagcccaaggctgccccctcggtcactctgttcccgccctcctctgaggagcttcaagccaacaaggccacactggtgtgtctcataagtgacttctacccgggagccgtgacagtggcctggaaggcagatagcagccccgtcaaggcgggagtggagaccaccacaccctccaaacaaagcaacaacaagtacgcggccagcagctacctgagcctgacgcctgagcagtggaagtcccacagaagctacagctgccaggtcacgcatgaagggagcaccgtggagaagacagtggcccctacagaatgttcataggttctcaaccctcaccccccaccacgggagactagagctgcaggatcccaggggaggggtctctcctcccaccccaaggcatcaagcccttctccctgcactcaataaaccctcaataaatattctcattgtcaatcag

SEQ ID NO: 28993 - protein, 241 aa, Homo sapiens [sequence omitted]

SEQ ID NO: 28994 - DNA, 1166 bp, Homo sapiens
agcagagctctggggagtctgcaccatggcctggaccccactcctcctcctcttccctctcctcctccactgcacagggtctctctcccagcctgtgctgactcaatcatcctctgcctctgcttccctgggatcctcggtcaagctcacctgcactctgagcagtgggcacagtagctacatcatcgcatggcatcagcagcagccagggaaggcccctcggtacttgatgaagcttgaaggtagtggaagctacaacaaggggagcggagttcctgatcgcttctcaggctccagctctggggctgaccgctacctcaccatctccaacctccagtttgaggatgaggctgattattactgtgagacctgggacagtaacactcacacatgttgggtgttcggcggagggaccaagctgaccgtcctaggtcagcccaaggctgccccctcggtcactctgttcccgccctcctctgaggagcttcaagccaacaaggccacactggtgtgtctcataagtgacttctacccgggagccgtgacagtggcctggaaggcagatagcagccccgtcaaggcgggagtggagaccaccacaccctccaaacaaagcaacaacaagtacgcggccagcagctacctgagcctgacgcctgagcagtggaagtcccacagaagctacagctgccaggtcacgcatgaagggagcaccgtggagaagacagtggcccctacagaatgttcataggttctcaaccctcaccccccaccacgggagactagagctgcaggatcccaggggaggggtctctcctcccaccccaaggcatcaagcccttctccctgcactcaataaaccctcaataaatattctcattgtcaatcagaaatcttgttttatctcattttttcttttctcacatataattcctagccttccctgggttctcaatttatggtggagggaattctgcacccagtgggaaagtcacccaagggaggaggcttacagcctccccgagtcatctctctggaaggtccttcctcttccagtcaccccttccccaactctccaccatacccctgagcctccagcctggcctcagctcagaccagtcccacaccctcctcaattttacttctcaataaagacctgatcatgt

SEQ ID NO: 28995 - protein, 241 aa, Homo sapiens [sequence omitted]

SEQ ID NO: 28996 - DNA, 577 bp, Homo sapiens
ggtggtagctcaggaagcagagcctggagcatctccactatggcctgggctccactacttctcaccctcctcgctcactgcacaggttcttgggccaattttatgctgactcagccccactctgtgtcggagtctccggggaagacggtaaccatctcctgcacccgcagcagtggcagcattgccagcaactatgtgcagtggtaccagcagcgcccgggcagttcccccaccactgtgatctatgaggataaccaaagaccctctggggtccctgatcggttctctggctccatcgacagctcctccaactctgcctccctcaccatctctggactgaagactgaggacgaggctgactactactgtcagtcttatgatagcagcaatcacacagtgctccagacccatggggaagtgagacagaaactccccagagcatctctacctgggccagtctcagcctgtctccaccagagagggtagctctcccatctctcctgtctaagtgcttgaggtgaactttgcttatgacttcctcttttccttttcaaaataccaatctgtttttccacac

SEQ ID NO: 28997 - protein, 148 aa, Homo sapiens [sequence omitted]

SEQ ID NO: 28998 - DNA, 891 bp, Homo sapiens
ggtggtagctcaggaagcagagcctggagcatctccactatggcctgggctccactacttctcaccctcctcgctcactgcacaggttcttgggccaattttatgctgactcagccccactctgtgtcggagtctccggggaagacggtaaccatctcctgcacccgcagcagtggcagcattgccagcaactatgtgcagtggtaccagcagcgcccgggcagttcccccaccactgtgatctatgaggataaccaaagaccctctggggtccctgatcggttctctggctccatcgacagctcctccaactctgcctccctcaccatctctggactgaagactgaggacgaggctgactactactgtcagtcttatgatagcagcaatcacacattatgtcttcggaactgggaccaaggtcaccgtcctaggtcagcccaaggccaaccccactgtcactctgttcccgccctcctctgaggagctccaagccaacaaggccacactagtgtgtctgatcagtgacttctacccgggagctgtgacagtggcctggaaggcagatggcagccccgtcaaggcgggagtggagaccaccaaaccctccaaacagagcaacaacaagtacgcggccagcagctacctgagcctgacgcccgagcagtggaagtcccacagaagctacagctgccaggtcacgcatgaagggagcaccgtggagaagacagtggcccctacagaatgttcataggttcccaactctaaccccacccacgggagcctggagctgcaggatcccaggggaggggtctctctccccatcccaagtcatccagcccttctccctgcactcatgaaaccccaataaatatcctcattgacaaccag

SEQ ID NO: 28999 - protein, 147 aa, Homo sapiens
MAWAPLLLTLLAHCTGSWANFMLTQPHSVSESPGKTVTISCTRSSGSIASNYVQWYQQRPGSSPTTVIYEDNQRPSGVPDRFSGSIDSSSNSASLTISGLKTEDEADYYCQSYDSSNHTLCLRNWDQGHRPRSAQGQPHCHSVPALL

SEQ ID NO: 29000 - DNA, 1171 bp, Homo sapiens
ggtggtagctcaggaagcagagcctggagcatctccactatggcctgggctccactacttctcaccctcctcgctcactgcacaggttcttgggccaattttatgctgactcagccccactctgtgtcggagtctccggggaagacggtaaccatctcctgcacccgcagcagtggcagcattgccagcaactatgtgcagtggtaccagcagcgcccgggcagttcccccaccactgtgatctatgaggataaccaaagaccctctggggtccctgatcggttctctggctccatcgacagctcctccaactctgcctccctcaccatctctggactgaagactgaggacgaggctgactactactgtcagtcttatgatagcagcaatcacacattatgtcttcggaactgggaccaaggtcaccgtcctaggtcagcccaaggccaaccccactgtcactctgttcccgccctcctctgaggagctccaagccaacaaggccacactagtgtgtctgatcagtgacttctacccgggagctgtgacagtggcctggaaggcagatggcagccccgtcaaggcgggagtggagaccaccaaaccctccaaacagagcaacaacaagtacgcggccagcagctacctgagcctgacgcccgagcagtggaagtcccacagaagctacagctgccaggtcacgcatgaagggagcaccgtggagaagacagtggcccctacagaatgttcataggttcccaactctaaccccacccacgggagcctggagctgcaggatcccaggggaggggtctctctccccatcccaagtcatccagcccttctccctgcactcatgaaaccccaataaatatcctcattgacaaccagaaatcttgttttatctcattttttttctcacataaattgctagcctccccggggttctcagtgtggggtacagggaattctgcacccagtgtgaaaatcacccaagggaggaggctcacagcctccctgagtcatctccccagagggtccttcctctcccagtcaccccttctccaactctccactgtacccctgagctaccagtctggcatcagttcagaccagtcccacaccctcctaaattttacttctcaataaatacctgatcatgtaaaacgca

SEQ ID NO: 29001 - protein, 147 aa, Homo sapiens; identical to SEQ ID NO: 28999

SEQ ID NO: 29002 - DNA, 898 bp, Homo sapiens
ggtggtagctcaggaagcagagcctggagcatctccactatggcctgggctccactacttctcaccctcctcgctcactgcacaggttcttgggccaattttatgctgactcagccccactctgtgtcggagtctccggggaagacggtaaccatctcctgcacccgcagcagtggcagcattgccagcaactatgtgcagtggtaccagcagcgcccgggcagttcccccaccactgtgatctatgaggataaccaaagaccctctggggtccctgatcggttctctggctccatcgacagctcctccaactctgcctccctcaccatctctggactgaagactgaggacgaggctgactactactgtcagtcttatgatagcagcaatcacacatgtgtggtattcggcggagggaccaagctgaccgtcctaggtcagcccaaggctgccccctcggtcactctgttcccgccctcctctgaggagcttcaagccaacaaggccacactggtgtgtctcataagtgacttctacccgggagccgtgacagtggcctggaaggcagatagcagccccgtcaaggcgggagtggagaccaccacaccctccaaacaaagcaacaacaagtacgcggccagcagctatctgagcctgacgcctgagcagtggaagtcccacagaagctacagctgccaggtcacgcatgaagggagcaccgtggagaagacagtggcccctacagaatgttcataggttctcaaccctcaccccccaccacgggagactagagctgcaggatcccaggggaggggtctctcctcccaccccaaggcatcaagcccttctccctgcactcaataaaccctcaataaatattctcattgtcaatcagaaa

SEQ ID NO: 29003 - protein, 238 aa, Homo sapiens
MAWAPLLLTLLAHCTGSWANFMLTQPHSVSESPGKTVTISCTRSSGSIASNYVQWYQQRPGSSPTTVIYEDNQRPSGVPDRFSGSIDSSSNSASLTISGLKTEDEADYYCQSYDSSNHTCVVFGGGTKLTVLGQPKAAPSVTLFPPSSEELQANKATLVCLISDFYPGAVTVAWKADSSPVKAGVETTTPSKQSNNKYAASSYLSLTPEQWKSHRSYSCQVTHEGSTVEKTVAPTECS

SEQ ID NO: 29004 - DNA, 890 bp, Homo sapiens
ggtggtagctcaggaagcagagcctggagcatctccactatggcctgggctccactacttctcaccctcctcgctcactgcacaggttcttgggccaattttatgctgactcagccccactctgtgtcggagtctccggggaagacggtaaccatctcctgcacccgcagcagtggcagcattgccagcaactatgtgcagtggtaccagcagcgcccgggcagttcccccaccactgtgatctatgaggataaccaaagaccctctggggtccctgatcggttctctggctccatcgacagctcctccaactctgcctccctcaccatctctggactgaagactgaggacgaggctgactactactgtcagtcttatgatagcagcaatcacacaggtgttcggcggagggaccaagctgaccgtcctaggtcagcccaaggctgccccctcggtcactctgttcccgccctcctctgaggagcttcaagccaacaaggccacactggtgtgtctcataagtgacttctacccgggagccgtgacagtggcctggaaggcagatagcagccccgtcaaggcgggagtggagaccaccacaccctccaaacaaagcaacaacaagtacgcggccagcagctacctgagcctgacgcctgagcagtggaagtcccacagaagctacagctgccaggtcacgcatgaagggagcaccgtggagaagacagtggcccctacagaatgttcataggttctcaaccctcaccccccaccacgggagactagagctgcaggatcccaggggaggggtctctcctcccaccccaaggcatcaagcccttctccctgcactcaataaaccctcaataaatattctcattgtcaatcag

SEQ ID NO: 29005 - protein, 146 aa, Homo sapiens
MAWAPLLLTLLAHCTGSWANFMLTQPHSVSESPGKTVTISCTRSSGSIASNYVQWYQQRPGSSPTTVIYEDNQRPSGVPDRFSGSIDSSSNSASLTISGLKTEDEADYYCQSYDSSNHTGVRRRDQADRPRSAQGCPLGHSVPALL

SEQ ID NO: 29006 - DNA, 716 bp, Homo sapiens
ggtggtagctcaggaagcagagcctggagcatctccactatggcctgggctccactacttctcaccctcctcgctcactgcacaggttcttgggccaattttatgctgactcagccccactctgtgtcggagtctccggggaagacggtaaccatctctggactgaagactgaggacgaggctgactactactgtcagtcttatgatagcagcaatcacacaggtgttcggcggagggaccaagctgaccgtcctaggtcagcccaaggctgccccctcggtcactctgttcccgccctcctctgaggagcttcaagccaacaaggccacactggtgtgtctcataagtgacttctacccgggagccgtgacagtggcctggaaggcagatagcagccccgtcaaggcgggagtggagaccaccacaccctccaaacaaagcaacaacaagtacgcggccagcagctacctgagcctgacgcctgagcagtggaagtcccacagaagctacagctgccaggtcacgcatgaagggagcaccgtggagaagacagtggcccctacagaatgttcataggttctcaaccctcaccccccaccacgggagactagagctgcaggatcccaggggaggggtctctcctcccaccccaaggcatcaagcccttctccctgcactcaataaaccctcaataaatattctcattgtcaatcag

SEQ ID NO: 29007 - protein, 124 aa, Homo sapiens
MIAAITQVFGGGTKLTVLGQPKAAPSVTLFPPSSEELQANKATLVCLISDFYPGAVTVAWKADSSPVKAGVETTTPSKQSNNKYAASSYLSLTPEQWKSHRSYSCQVTHEGSTVEKTVAPTECS

SEQ ID NO: 29008 - DNA, 1166 bp, Homo sapiens
ggtggtagctcaggaagcagagcctggagcatctccactatggcctgggctccactacttctcaccctcctcgctcactgcacaggttcttgggccaattttatgctgactcagccccactctgtgtcggagtctccggggaagacggtaaccatctcctgcacccgcagcagtggcagcattgccagcaactatgtgcagtggtaccagcagcgcccgggcagttcccccaccactgtgatctatgaggataaccaaagaccctctggggtccctgatcggttctctggctccatcgacagctcctccaactctgcctccctcaccatctctggactgaagactgaggacgaggctgactactactgtcagtcttatgatagcagcaatcacacaggtgttcggcggagggaccaagctgaccgtcctaggtcagcccaaggctgccccctcggtcactctgttcccgccctcctctgaggagcttcaagccaacaaggccacactggtgtgtctcataagtgacttctacccgggagccgtgacagtggcctggaaggcagatagcagccccgtcaaggcgggagtggagaccaccacaccctccaaacaaagcaacaacaagtacgcggccagcagctacctgagcctgacgcctgagcagtggaagtcccacagaagctacagctgccaggtcacgcatgaagggagcaccgtggagaagacagtggcccctacagaatgttcataggttctcaaccctcaccccccaccacgggagactagagctgcaggatcccaggggaggggtctctcctcccaccccaaggcatcaagcccttctccctgcactcaataaaccctcaataaatattctcattgtcaatcagaaatcttgttttatctcattttttcttttctcacatataattcctagccttccctgggttctcaatttatggtggagggaattctgcacccagtgggaaagtcacccaagggaggaggcttacagcctccccgagtcatctctctggaaggtccttcctcttccagtcaccccttccccaactctccaccatacccctgagcctccagcctggcctcagctcagaccagtcccacaccctcctcaattttacttctcaataaagacctgatcatgt

SEQ ID NO: 29009 - protein, 146 aa, Homo sapiens; identical to SEQ ID NO: 29005

SEQ ID NO: 29010 - DNA, 992 bp, Homo sapiens
ggtggtagctcaggaagcagagcctggagcatctccactatggcctgggctccactacttctcaccctcctcgctcactgcacaggttcttgggccaattttatgctgactcagccccactctgtgtcggagtctccggggaagacggtaaccatctctggactgaagactgaggacgaggctgactactactgtcagtcttatgatagcagcaatcacacaggtgttcggcggagggaccaagctgaccgtcctaggtcagcccaaggctgccccctcggtcactctgttcccgccctcctctgaggagcttcaagccaacaaggccacactggtgtgtctcataagtgacttctacccgggagccgtgacagtggcctggaaggcagatagcagccccgtcaaggcgggagtggagaccaccacaccctccaaacaaagcaacaacaagtacgcggccagcagctacctgagcctgacgcctgagcagtggaagtcccacagaagctacagctgccaggtcacgcatgaagggagcaccgtggagaagacagtggcccctacagaatgttcataggttctcaaccctcaccccccaccacgggagactagagctgcaggatcccaggggaggggtctctcctcccaccccaaggcatcaagcccttctccctgcactcaataaaccctcaataaatattctcattgtcaatcagaaatcttgttttatctcattttttcttttctcacatataattcctagccttccctgggttctcaatttatggtggagggaattctgcacccagtgggaaagtcacccaagggaggaggcttacagcctccccgagtcatctctctggaaggtccttcctcttccagtcaccccttccccaactctccaccatacccctgagcctccagcctggcctcagctcagaccagtcccacaccctcctcaattttacttctcaataaagacctgatcatgt

SEQ ID NO: 29011 - protein, 124 aa, Homo sapiens; identical to SEQ ID NO: 29007

SEQ ID NO: 29012 - DNA, 883 bp, Homo sapiens
caaacagagcttcagcaagcatagtgggaatctgcaccatgccctgggctctgctcctcctgaccctcctcactcactctgcagtgtcagtggtccaggcagggctgactcagccaccctcggtgtccaagggcttgagacagaccgccacactcacctgcactgggaacagcaacattgttggcaaccaaggagcagcttggctgcagcagcaccagggccaccctcccaaactcctatcctacaggaataacaaccggccctcagggatctcagagagattctctgcatccaggtcaggaaacacagcctccctgaccattactggactccagcctgaggacgaggctgactattactgctcagcattggacagcagcctcatgttgggtgttcggcggagggaccaagctgaccgtcctaggtcagcccaaggctgccccctcggtcactctgttcccgccctcctctgaggagcttcaagccaacaaggccacactggtgtgtctcataagtgacttctacccgggagccgtgacagtggcctggaaggcagatagcagccccgtcaaggcgggagtggagaccaccacaccctccaaacaaagcaacaacaagtacgcggccagcagctacctgagcctgacgcctgagcagtggaagtcccacagaagctacagctgccaggtcacgcatgaagggagcaccgtggagaagacagtggcccctacagaatgttcataggttctcaaccctcaccccccaccacgggagactagagctgcaggatcccaggggaggggtctctcctcccaccccaaggcatcaagcccttctccctgcactcaataaaccctcaataaatattctcattgtcaatcag

SEQ ID NO: 29013 - protein, 144 aa, Homo sapiens
MPWALLLLTLLTHSAVSVVQAGLTQPPSVSKGLRQTATLTCTGNSNIVGNQGAAWLQQHQGHPPKLLSYRNNNRPSGISERFSASRSGNTASLTITGLQPEDEADYYCSALDSSLMLGVRRRDQADRPRSAQGCPLGHSVPALL

SEQ ID NO: 29014 - DNA, 1159 bp, Homo sapiens
caaacagagcttcagcaagcatagtgggaatctgcaccatgccctgggctctgctcctcctgaccctcctcactcactctgcagtgtcagtggtccaggcagggctgactcagccaccctcggtgtccaagggcttgagacagaccgccacactcacctgcactgggaacagcaacattgttggcaaccaaggagcagcttggctgcagcagcaccagggccaccctcccaaactcctatcctacaggaataacaaccggccctcagggatctcagagagattctctgcatccaggtcaggaaacacagcctccctgaccattactggactccagcctgaggacgaggctgactattactgctcagcattggacagcagcctcatgttgggtgttcggcggagggaccaagctgaccgtcctaggtcagcccaaggctgccccctcggtcactctgttcccgccctcctctgaggagcttcaagccaacaaggccacactggtgtgtctcataagtgacttctacccgggagccgtgacagtggcctggaaggcagatagcagccccgtcaaggcgggagtggagaccaccacaccctccaaacaaagcaacaacaagtacgcggccagcagctacctgagcctgacgcctgagcagtggaagtcccacagaagctacagctgccaggtcacgcatgaagggagcaccgtggagaagacagtggcccctacagaatgttcataggttctcaaccctcaccccccaccacgggagactagagctgcaggatcccaggggaggggtctctcctcccaccccaaggcatcaagcccttctccctgcactcaataaaccctcaataaatattctcattgtcaatcagaaatcttgttttatctcattttttcttttctcacatataattcctagccttccctgggttctcaatttatggtggagggaattctgcacccagtgggaaagtcacccaagggaggaggcttacagcctccccgagtcatctctctggaaggtccttcctcttccagtcaccccttccccaactctccaccatacccctgagcctccagcctggcctcagctcagaccagtcccacaccctcctcaattttacttctcaataaagacctgatcatgt

SEQ ID NO: 29015 - protein, 144 aa, Homo sapiens; identical to SEQ ID NO: 29013

SEQ ID NO: 29016 - DNA, 871 bp, Homo sapiens
caagcatagtgggaatctgcaccatgccctgggctctgctcctcctgaccctcctcactcactctgcagtgtcagtggtccaggcagggctgactcagccaccctcggtgtccaagggcttgagacagaccgccacactcacctgcactgggaacagcaacattgttggcaaccaaggagcagcttggctgcagcagcaccagggccaccctcccaaactcctatcctacaggaataacaaccggccctcagggatctcagagagattctctgcatccaggtcaggaaacacagcctccctgaccattactggactccagcctgaggacgaggctgactattactgctcagcattggacagcagcctcatgtgtggtattcggcggagggaccaagctgaccgtcctaggtcagcccaaggctgccccctcggtcactctgttcccgccctcctctgaggagcttcaagccaacaaggccacactggtgtgtctcataagtgacttctacccgggagccgtgacagtggcctggaaggcagatagcagccccgtcaaggcgggagtggagaccaccacaccctccaaacaaagcaacaacaagtacgcggccagcagctatctgagcctgacgcctgagcagtggaagtcccacagaagctacagctgccaggtcacgcatgaagggagcaccgtggagaagacagtggcccctacagaatgttcataggttctcaaccctcaccccccaccacgggagactagagctgcaggatcccaggggaggggtctctcctcccaccccaaggcatcaagcccttctccctgcactcaataaaccctcaataaatattctcattgtcaatcagaaa

SEQ ID NO: 29017 - protein, 144 aa, Homo sapiens
MPWALLLLTLLTHSAVSVVQAGLTQPPSVSKGLRQTATLTCTGNSNIVGNQGAAWLQQHQGHPPKLLSYRNNNRPSGISERFSASRSGNTASLTITGLQPEDEADYYCSALDSSLMCGIRRRDQADRPRSAQGCPLGHSVPALL

SEQ ID NO: 29018 - DNA, 720 bp, Homo sapiens
gtgtcagtggtccaggcagggctgactcagccaccctcggtgtccaagggcttgagacagaccgccacactcacctgcactgggaacagcaacattgttggcaaccaaggagcagcttggctgcagcagcaccagggccaccctcccaaactcctatcctacaggaataacaaccggccctcagggatctcagagagattctctgcatccaggtcaggaaacacagcctccctgaccattactggactccagcctgaggacgaggctgactattactgctcagcattggacagcagccctcctctgaggagcttcaagccaacaaggccacactggtgtgtctcataagtgacttctacccgggagccgtgacagtggcctggaaggcagatagcagccccgtcaaggcgggagtggagaccaccacaccctccaaacaaagcaacaacaagtacgcggccagcagctatctgagcctgacgcctgagcagtggaagtcccacagaagctacagctgccaggtcacgcatgaagggagcaccgtggagaagacagtggcccctacagaatgttcataggttctcaaccctcaccccccaccacgggagactagagctgcaggatcccaggggaggggtctctcctcccaccccaaggcatcaagcccttctccctgcactcaataaaccctcaataaatattctcattgtcaatcagaaa

SEQ ID NO: 29019 - protein, 63 aa, Homo sapiens
MKGAPWRRQWPLQNVHRFSTLTPHHGRLELQDPRGGVSPPTPRHQALLPALNKPSINILIVNQ

SEQ ID NO: 29020 - DNA, 800 bp, Homo sapiens
gtgtcagtggtccaggcagggctgactcagccaccctcggtgtccaagggcttgagacagaccgccacactcacctgcactgggaacagcaacattgttggcaaccaaggagcagcttggctgcagcagcaccagggccaccctcccaaactcctatcctacaggaataacaaccggccctcagggatctcagagagattctctgcatccaggtcaggaaacacagcctccctgaccattactggactccagcctgaggacgaggctgactattactgctcagcattggacagcagcctcatgttgggtgttcggcggagggaccaagctgaccgtcctaggtcagcccaaggctgccccctcggtcactctgttcccgccctcctctgaggagcttcaagccaacaaggccacactggtgtgtctcataagtgacttctacccgggagccgtgacagtggcctggaaggcagatagcagccccgtcaaggcgggagtggagaccaccacaccctccaaacaaagcaacaacaagtacgcggccagcagctacctgagcctgacgcctgagcagtggaagtcccacagaagctacagctgccaggtcacgcatgaagggagcaccgtggagaagacagtggcccctacagaatgttcataggttctcaaccctcaccccccaccacgggagactagagctgcaggatcccaggggaggggtctctcctcccaccccaaggcatcaagcccttctccctgcactcaataaaccctcaataaatattctcattgtcaatcag

SEQ ID NO: 29021 - protein, 62 aa, Homo sapiens
MKGAPWRRQWPLQNVHRFSTLTPHHGRLELQDPRGGVSPPTPRHQALLPALNKPSINILIVN

SEQ ID NO: 29022 - DNA, 1076 bp, Homo sapiens
gtgtcagtggtccaggcagggctgactcagccaccctcggtgtccaagggcttgagacagaccgccacactcacctgcactgggaacagcaacattgttggcaaccaaggagcagcttggctgcagcagcaccagggccaccctcccaaactcctatcctacaggaataacaaccggccctcagggatctcagagagattctctgcatccaggtcaggaaacacagcctccctgaccattactggactccagcctgaggacgaggctgactattactgctcagcattggacagcagcctcatgttgggtgttcggcggagggaccaagctgaccgtcctaggtcagcccaaggctgccccctcggtcactctgttcccgccctcctctgaggagcttcaagccaacaaggccacactggtgtgtctcataagtgacttctacccgggagccgtgacagtggcctggaaggcagatagcagccccgtcaaggcgggagtggagaccaccacaccctccaaacaaagcaacaacaagtacgcggccagcagctacctgagcctgacgcctgagcagtggaagtcccacagaagctacagctgccaggtcacgcatgaagggagcaccgtggagaagacagtggcccctacagaatgttcataggttctcaaccctcaccccccaccacgggagactagagctgcaggatcccaggggaggggtctctcctcccaccccaaggcatcaagcccttctccctgcactcaataaaccctcaataaatattctcattgtcaatcagaaatcttgttttatctcattttttcttttctcacatataattcctagccttccctgggttctcaatttatggtggagggaattctgcacccagtgggaaagtcacccaagggaggaggcttacagcctccccgagtcatctctctggaaggtccttcctcttccagtcaccccttccccaactctccaccatacccctgagcctccagcctggcctcagctcagaccagtcccacaccctcctcaattttacttctcaataaagacctgatcatgt

SEQ ID NO: 29023 - protein, 152 aa, Homo sapiens [sequence omitted]

SEQ ID NO: 29024 - DNA, 650 bp, Homo sapiens
ggccacaggagtcagagctctgcatgtctgcaccatgtcctgggctcctgtcctgctcatgctgtttgtctactgcacaggttgtggtcctcagccggtgctgcatcagccgccggccatgtcctcggcccttggaaccacaatccgcctcacctgcaccctgaggaacgaccatgacatcggtgtgtacagcgtctactggtaccagcagaggccgggccaccctcccaggttcctgctgagatatttctcacaatcagacaagagccagggcccccaggtcccccctcgcttctctggatccaaagatgtggccaggaacagggggtatttgagcatctctgagctgcagcctgaggacgaggctatgtattactgtgctatgggggcccgcagctcggagaaggaggagagggagagggagtgggaggaagaaatggaacccactgcagccaggacacgtgtcccttgaactgaagacagcagaggcacgcatccccttggagagactgtcatggaagagggtggagccgccgcccgaagcgccgaggaggctgagccactcagcatctcctggtcctgcagtgttgctgtaaatccccattggagactgcattagggaattaaagctgcttgtcactttttgctga

SEQ ID NO: 29025 - protein, 145 aa, Homo sapiens; identical to SEQ ID NO: 3995

SEQ ID NO: 29026 - DNA, 856 bp, Homo sapiens
cagggcatggtatggccagtgcaggacaggacaagagccagtccagagagagagcagggctgatgccaagaaagagccaggctagtgccgaggctgaggcagtgtcagagcatgtccagggcagggccggggccagggacagaaccgagccagggcacagccaagacagggtagggcagggaaatagcatggctgggtcagtactgggacagggcagagcagggcaaggcgatggtagcggcagggcagggacaggccaatgcagagccatgtcatgccggggccaggacacctccaagtccacttcaggcccagggctatggcaggacaaagaccagggccaggatcagggccaggtctgtgctagggccagctccagatgagggtctagcgaagactagggtgagggccaaggtaaggccagggcagggtcaaaggcagagtagggccaggtcagggtgatgacacatccagagcacaacagggcagggtgatggcaagaccaggggcagaccactgccagctcagggccaaggaaaggccagtgcagagccaggaaagggtctgggtctgaacaaggcagagcagggccagggccatggcagagtcagggcaggtccttgacaggaccaggttccaggccagggctagggcagcagcaggggcagggcctggataagggcagggcagtacagggccagatccatggcaggcgcagggcaaagccaggcccattgccaatgcaccagccctccctacaaggctcctaccacctggccactgctgcagcccgtccatcgctgtaagcctgaaccccaaccctggctgcagccacctgccctcctagtgcggccgc

SEQ ID NO: 29027 - protein, 123 aa, Homo sapiens [sequence omitted]

SEQ ID NO: 29028 - DNA, 3095 bp, Homo sapiens
cgcaggcgcggagaggcgcacagcgcggcacagcgaggcgccggcccagactccactccccagctgtgaaaggaggagctctacggtgactttgaagacttggaaacaggggacgtgcacaagggaaaatcgggccccgatactcagaatgaagatgtagagaaacaaggaagaaattgaccctgacgaagaagaaagtgccaagaaaaagcatttggataagaagagaaaattgaaggagatgtttgatgtggaatatgatgaaggagaaagcacatattttgatgatcttaaaggagaaatgcagaaacaagcacagctgaatcatgcagaatttgaagatcaagatgatgaagccagagttcagtatgagggttttcgacctgggatgtacgtctgcgttgagattgaaaatgttccctgtgaatttgtgtagaactttgacccccgttaccccattatcctgggtggcttgggcaacagcgagggaaatgttggatacgtgcagatgcgtctgaagaaacatcgctggtataagaaaatcctcaagtcccgagatccaatcatattttctgtagggtggaggaggtttcagaccatcccgctctgttatatcgaagaccacaatggaagacaaaggcttctaaagtataccccacagcatgtgcatcgcggagcagccttttgggataaaatatgattacaataacttgcctattgctgagattaaaccttacaggctgcgttattttagctttgtgcttttcctttcataaaattccactcctaagatttttctcttttctgggagcagggaggtggtttggagtatatacgtaaatctatatccaaatctaaatgtccatatccagtatgttaaactagaatctaaaatttgtggtttgctatatttctttttttccttttcctttaagaccctatcactccacagggaactggtttcttggcaatacagtctgtcagtggcataatggtaactatcttggatgatttcttttacagattggttttgagaaatatatcctgaatgtggattactatgtacatgagactttaagttgaaaattactcatttttattaatataaagtaaatttccctttgcttttaatcttcgtacatccttttcagtagggtgtgggattagaggaggggaggtggaagaattataatggtacatttcctatttttgtgcatcttttgcatttatttatctaagcaagtacttaagcagtgctcaccatgtgctaagcactgtatgaggttgtgaggagccatcagagaccacccagacacaagactccctgcagctgtgctggggtagcagtctgttcactccattttcatttgaccagtcaggcagggcagggtttactggtcccatttaacagagaagaaagcagaataatgagcagatggaatcttccctggaggtccaaattttaatttcctaaacattgcaactgtatttttcttttccatttcgttccaaataaatcattatagtaaaattacattcctctgaaatcactctcaggaaagtactcaagtagccttttttttttctttcttttttttttttttttttgagacagagttgcactctgtcgtccaggctggagtgcagtggcacaatcttggctcgctgcaacctctgcctcctgggtttaagcggttctcctgcctcagcctcccgagtagctgggattacaggtgtgcaccatcatgccgagccaatttttgtatttttagtagagacaggatttccccatgttggccagactggtttcaaacttctgacctcaggtgatctacctgccttggcctcccaaagtgctgggattacaggtatgagccactgtgcccagcctcaagtcacccttgttagtttggcttaccaactttaaagttttggattgcttttgtcaagccactgggttgcaagttcagatggtctttcttgtttttcttagctaattgtaagtaaaattcactttggtaatttattgtgtcacatagaattgaagtttttctcttgctaatattattcctattttcaaattttggggttcctgttagcctgattttcggatagctgccacataagttgtccttgatctggataaatccataaaaattgtgaagaaattaaagctaactggttttccatataaaatttttaagaacacttcatttattaaggtctgtatatctatatattctcatatttataaatctccatattgtttgagaaaaggaatgaaatacctctaaaatatgggcctcatatttttagaaaagtgtttgaaatcttttataaacttcatattttgtttgctcctttatattctgtattacttaaatatgctcagaaaagcagtggtaaacagctatttaggaattgaggctgttactcctgacttccatgtgagactgccacagaactcatattgaaaatatgtcattttatccactaggttttgtttcctactttttaaatttgtgttaagaaagggaaaaaaatcacaagtttgtctaactcagtagaaaaatcgacaaagcatttgcagacaacttggcaagggtacagagaaacggatgtactgtttttcagtatttggggagggtggtttgagcagcatttattgacaatttcattagtggggatgtttctattgaaaacagggttaggaagtcataaaatgttcctgcaatataaggtaataataccaccagcgtttatcttactgttttcatgttctaagtgcatgcatctgagtaaaaggatctgggctgcagtccagtctgagagatgccagcaaaggcttcctaggccagttcagtccagtaaatccctcttcgatcttctcttccacacagacagcagtgatgagcatgcccatgaactcacatgattattttggggaaaatgaaagagttgtattctttttgaggtagtaattccactttcaggggcaaatacattttgattattttatcacccttcagtgagttgtttttgttctttaatcaaggatgtatgtttgaagtaagaagtaaagcataaagtatatg

SEQ ID NO: 29029 - protein, 64 aa, Homo sapiens [sequence omitted]

SEQ ID NO: 29030 - DNA, 3361 bp, Homo sapiens
cgcaggcgcggagaggcgcacagcgcggcacagcgaggcgccggcccagactccactccccagctgtgaaaggaggagctctacggtgactttgaagacttggaaacaggggacgtgcacaagggaaaatcgggccccgatactcagaatgaagatgtagagaaacaaggaagaaattgaccctgacgaagaagaaagtgccaagaaaaagcatttggataagaagagaaaattgaaggagatgtttgatgtggaatatgatgaaggagaaagcacatattttgatgatcttaaaggagaaatgcagaaacaagcacagctgaatcatgcagaatttgaagatcaagatgatgaagccagagttcagtatgagggttttcgacctgggatgtacgtctgcgttgagattgaaaatgttccctgtgaatttgtgtagaactttgacccccgttaccccattatcctgggtggcttgggcaacagcgagggaaatgttggatacgtgcagatgcgtctgaagaaacatcgctggtataagaaaatcctcaagtcccgagatccaatcatattttctgtagggtggaggaggtttcagaccatcccgctctgttatatcgaagaccacaatggaagacaaaggcttctaaagtataccccacagcatgtgcatcgcggagcagccttttgggataaaatatgattacaataacttgcctattgctgagattaaaccttacaggctgcgttattttagctttgtgcttttcctttcataaaattccactcctaagatttttctcttttctgggagcagggaggtggtttggagtatatacgtaaatctatatccaaatctaaatgtccatatccagtatgttaaactagaatctaaaatttgtggtttgctatatttctttttttccttttcctttaagaccctatcactccacagggaactggtttcttggcaatacagtctgtcagtggcataatggtaactatcttggatgatttcttttacagattggttttgagaaatatatcctgaatgtggattactatgtacatgagactttaagttgaaaattactcatttttattaatataaagtaaatttccctttgcttttaatcttcgtacatccttttcagtagggtgtgggattagaggaggggaggtggaagaattataatggtacatttcctatttttgtgcatcttttgcatttatttatctaagcaagtacttaagcagtgctcaccatgtgctaagcactgtatgaggttgtgaggagccatcagagaccacccagacacaagactccctgcagctgtgctggggtagcagtctgttcactccattttcatttgaccagtcaggcagggcagggtttactggtcccatttaacagagaagaaagcagaataatgagcagatggaatcttccctggaggtccaaattttaatttcctaaacattgcaactgtatttttcttttccatttcgttccaaataaatcattatagtaaaattacattcctctgaaatcactctcaggaaagtactcaagtagccttttttttttctttcttttttttttttttttttgagacagagttgcactctgtcgtccaggctggagtgcagtggcacaatcttggctcgctgcaacctctgcctcctgggtttaagcggttctcctgcctcagcctcccgagtagctgggattacaggtgtgcaccatcatgccgagccaatttttgtatttttagtagagacaggatttccccatgttggccagactggtttcaaacttctgacctcaggtgatctacctgccttggcctcccaaagtgctgggattacaggtatgagccactgtgcccagcctcaagtcacccttgttagtttggcttaccaactttaaagttttggattgcttttgtcaagccactgggttgcaagttcagatggtctttcttgtttttcttagctaattgtaagtaaaattcactttggtaatttattgtgtcacatagaattgaagtttttctcttgctaatattattcctattttcaaattttggggttcctgttagcctgattttcggatagctgccacataagttgtccttgatctggataaatccataaaaattgtgaagaaattaaagctaactggttttccatataaaatttttaagaacacttcatttattaaggtctgtatatctatatattctcatatttataaatctccatattgtttgagaaaaggaatgaaatacctctaaaatatgggcctcatatttttagaaaagtgtttgaaatcttttataaacttcatattttgtttgctcctttatattctgtattacttaaatatgctcagaaaagcagtggtaaacagctatttaggaattgaggctgttactcctgacttccatgtgagactgccacagaactcatattgaaaatatgtcattttatccactaggttttgtttcctactttttaaatttgtgttaagaaagggaaaaaaatcacaagtttgtctaactcagtagaaaaatcgacaaagcatttgcagacaacttggcaagggtacagagaaacggatgtactgtttttcagtatttggggagggtggtttgagcagcatttattgacaatttcattagtggggatgtttctattgaaaacagggttaggaagtcataaaatgttcctgcaatataaggtaataataccaccagcgtttatcttactgttttcatgttctaagtgcatgcatctgagtaaaaggatctgggctgcagtccagtctgagagatgccagcaaaggcttcctaggccagttcagtccagtaaatccctcttcgatcttctcttccacacagacagcagtgatgagcatgcccatgaactcacatgattattttggggaaaatgaaagagttgtattctttttgaggtagtaattccactttcaggggcaaatacattttgattattttatcacccttcagtgagttgtttttgttctttaatcaaggatgtatgtttgaagtaagaagtaaagcataaagtatatgattttgtgtgtgtgtgtgtgtttttatcttgctgtacctgtagggaatgtttaattcagccttggaagtggccaaatttgaaggtgctgtgattcgaactgtcagtgggataagggggcagatcaagaaagcactctgagctccagaaggagctttccgggccagctttgaggataagctgctgatgagcggtgagtgtcttaagtagtgttcagggcagggtgttaccattcatgcttgacttctagccagtgtgacgagaggct

SEQ ID NO: 29031 - protein, 64 aa, Homo sapiens [sequence omitted]

SEQ ID NO: 29032 - DNA, 3119 bp, Homo sapiens
acagcgcggcacagcgaggcgccggcccagactccactccccagctgtgaaaggaggagctctacggtgactttgaagacttggaaacaggggacgtgcacaagggaaaatcgggccccgatactcagaatgaagatgtagagaaacaaggaagaaattgaccctgacgaagaagaaagtgccaagaaaaagcatttggataagaagagaaaattgaaggagatgtttgatgtggaatatgatgaaggagaaagcacatattttgatgatcttaaaggagaaatgcagaaacaagcacagataacagcatacaggttttccccccccaccccgtcatgtacagctgaatcatgcagaatttgaagatcaagatgatgaagccagagttcagtatgagggttttcgacctgggatgtacgtctgcgttgagattgaaaatgttccctgtgaatttgtgtagaactttgacccccgttaccccattatcctgggtggcttgggcaacagcgagggaaatgttggatacgtgcagatgcgtctgaagaaacatcgctggtataagaaaatcctcaagtcccgagatccaatcatattttctgtagggtggaggaggtttcagaccatcccgctctgttatatcgaagaccacaatggaagacaaaggcttctaaagtataccccacagcatgtgcatcgcggagcagccttttgggataaaatatgattacaataacttgcctattgctgagattaaaccttacaggctgcgttattttagctttgtgcttttcctttcataaaattccactcctaagatttttctcttttctgggagcagggaggtggtttggagtatatacgtaaatctatatccaaatctaaatgtccatatccagtatgttaaactagaatctaaaatttgtggtttgctatatttctttttttccttttcctttaagaccctatcactccacagggaactggtttcttggcaatacagtctgtcagtggcataatggtaactatcttggatgatttcttttacagattggttttgagaaatatatcctgaatgtggattactatgtacatgagactttaagttgaaaattactcatttttattaatataaagtaaatttccctttgcttttaatcttcgtacatccttttcagtagggtgtgggattagaggaggggaggtggaagaattataatggtacatttcctatttttgtgcatcttttgcatttatttatctaagcaagtacttaagcagtgctcaccatgtgctaagcactgtatgaggttgtgaggagccatcagagaccacccagacacaagactccctgcagctgtgctggggtagcagtctgttcactccattttcatttgaccagtcaggcagggcagggtttactggtcccatttaacagagaagaaagcagaataatgagcagatggaatcttccctggaggtccaaattttaatttcctaaacattgcaactgtatttttcttttccatttcgttccaaataaatcattatagtaaaattacattcctctgaaatcactctcaggaaagtactcaagtagccttttttttttctttcttttttttttttttttttgagacagagttgcactctgtcgtccaggctggagtgcagtggcacaatcttggctcgctgcaacctctgcctcctgggtttaagcggttctcctgcctcagcctcccgagtagctgggattacaggtgtgcaccatcatgccgagccaatttttgtatttttagtagagacaggatttccccatgttggccagactggtttcaaacttctgacctcaggtgatctacctgccttggcctcccaaagtgctgggattacaggtatgagccactgtgcccagcctcaagtcacccttgttagtttggcttaccaactttaaagttttggattgcttttgtcaagccactgggttgcaagttcagatggtctttcttgtttttcttagctaattgtaagtaaaattcactttggtaatttattgtgtcacatagaattgaagtttttctcttgctaatattattcctattttcaaattttggggttcctgttagcctgattttcggatagctgccacataagttgtccttgatctggataaatccataaaaattgtgaagaaattaaagctaactggttttccatataaaatttttaagaacacttcatttattaaggtctgtatatctatatattctcatatttataaatctccatattgtttgagaaaaggaatgaaatacctctaaaatatgggcctcatatttttagaaaagtgtttgaaatcttttataaacttcatattttgtttgctcctttatattctgtattacttaaatatgctcagaaaagcagtggtaaacagctatttaggaattgaggctgttactcctgacttccatgtgagactgccacagaactcatattgaaaatatgtcattttatccactaggttttgtttcctactttttaaatttgtgttaagaaagggaaaaaaatcacaagtttgtctaactcagtagaaaaatcgacaaagcatttgcagacaacttggcaagggtacagagaaacggatgtactgtttttcagtatttggggagggtggtttgagcagcatttattgacaatttcattagtggggatgtttctattgaaaacagggttaggaagtcataaaatgttcctgcaatataaggtaataataccaccagcgtttatcttactgttttcatgttctaagtgcatgcatctgagtaaaaggatctgggctgcagtccagtctgagagatgccagcaaaggcttcctaggccagttcagtccagtaaatccctcttcgatcttctcttccacacagacagcagtgatgagcatgcccatgaactcacatgattattttggggaaaatgaaagagttgtattctttttgaggtagtaattccactttcaggggcaaatacattttgattattttatcacccttcagtgagttgtttttgttctttaatcaaggatgtatgtttgaagtaagaagtaaagcataaagtatatg

SEQ ID NO: 29033 - protein, 63 aa, Homo sapiens
MRLKKHRWYKKILKSRDPIIFSVGWRRFQTIPLCYIEDHNGRQRLLKYTPQHVHRGAAFWDKI

SEQ ID NO: 29034 - DNA, 3385 bp, Homo sapiens
acagcgcggcacagcgaggcgccggcccagactccactccccagctgtgaaaggaggagctctacggtgactttgaagacttggaaacaggggacgtgcacaagggaaaatcgggccccgatactcagaatgaagatgtagagaaacaaggaagaaattgaccctgacgaagaagaaagtgccaagaaaaagcatttggataagaagagaaaattgaaggagatgtttgatgtggaatatgatgaaggagaaagcacatattttgatgatcttaaaggagaaatgcagaaacaagcacagataacagcatacaggttttccccccccaccccgtcatgtacagctgaatcatgcagaatttgaagatcaagatgatgaagccagagttcagtatgagggttttcgacctgggatgtacgtctgcgttgagattgaaaatgttccctgtgaatttgtgtagaactttgacccccgttaccccattatcctgggtggcttgggcaacagcgagggaaatgttggatacgtgcagatgcgtctgaagaaacatcgctggtataagaaaatcctcaagtcccgagatccaatcatattttctgtagggtggaggaggtttcagaccatcccgctctgttatatcgaagaccacaatggaagacaaaggcttctaaagtataccccacagcatgtgcatcgcggagcagccttttgggataaaatatgattacaataacttgcctattgctgagattaaaccttacaggctgcgttattttagctttgtgcttttcctttcataaaattccactcctaagatttttctcttttctgggagcagggaggtggtttggagtatatacgtaaatctatatccaaatctaaatgtccatatccagtatgttaaactagaatctaaaatttgtggtttgctatatttctttttttccttttcctttaagaccctatcactccacagggaactggtttcttggcaatacagtctgtcagtggcataatggtaactatcttggatgatttcttttacagattggttttgagaaatatatcctgaatgtggattactatgtacatgagactttaagttgaaaattactcatttttattaatataaagtaaatttccctttgcttttaatcttcgtacatccttttcagtagggtgtgggattagaggaggggaggtggaagaattataatggtacatttcctatttttgtgcatcttttgcatttatttatctaagcaagtacttaagcagtgctcaccatgtgctaagcactgtatgaggttgtgaggagccatcagagaccacccagacacaagactccctgcagctgtgctggggtagcagtctgttcactccattttcatttgaccagtcaggcagggcagggtttactggtcccatttaacagagaagaaagcagaataatgagcagatggaatcttccctggaggtccaaattttaatttcctaaacattgcaactgtatttttcttttccatttcgttccaaataaatcattatagtaaaattacattcctctgaaatcactctcaggaaagtactcaagtagccttttttttttctttcttttttttttttttttttgagacagagttgcactctgtcgtccaggctggagtgcagtggcacaatcttggctcgctgcaacctctgcctcctgggtttaagcggttctcctgcctcagcctcccgagtagctgggattacaggtgtgcaccatcatgccgagccaatttttgtatttttagtagagacaggatttccccatgttggccagactggtttcaaacttctgacctcaggtgatctacctgccttggcctcccaaagtgctgggattacaggtatgagccactgtgcccagcctcaagtcacccttgttagtttggcttaccaactttaaagttttggattgcttttgtcaagccactgggttgcaagttcagatggtctttcttgtttttcttagctaattgtaagtaaaattcactttggtaatttattgtgtcacatagaattgaagtttttctcttgctaatattattcctattttcaaattttggggttcctgttagcctgattttcggatagctgccacataagttgtccttgatctggataaatccataaaaattgtgaagaaattaaagctaactggttttccatataaaatttttaagaacacttcatttattaaggtctgtatatctatatattctcatatttataaatctccatattgtttgagaaaaggaatgaaatacctctaaaatatgggcctcatatttttagaaaagtgtttgaaatcttttataaacttcatattttgtttgctcctttatattctgtattacttaaatatgctcagaaaagcagtggtaaacagctatttaggaattgaggctgttactcctgacttccatgtgagactgccacagaactcatattgaaaatatgtcattttatccactaggttttgtttcctactttttaaatttgtgttaagaaagggaaaaaaatcacaagtttgtctaactcagtagaaaaatcgacaaagcatttgcagacaacttggcaagggtacagagaaacggatgtactgtttttcagtatttggggagggtggtttgagcagcatttattgacaatttcattagtggggatgtttctattgaaaacagggttaggaagtcataaaatgttcctgcaatataaggtaataataccaccagcgtttatcttactgttttcatgttctaagtgcatgcatctgagtaaaaggatctgggctgcagtccagtctgagagatgccagcaaaggcttcctaggccagttcagtccagtaaatccctcttcgatcttctcttccacacagacagcagtgatgagcatgcccatgaactcacatgattattttggggaaaatgaaagagttgtattctttttgaggtagtaattccactttcaggggcaaatacattttgattattttatcacccttcagtgagttgtttttgttctttaatcaaggatgtatgtttgaagtaagaagtaaagcataaagtatatgattttgtgtgtgtgtgtgtgtttttatcttgctgtacctgtagggaatgtttaattcagccttggaagtggccaaatttgaaggtgctgtgattcgaactgtcagtgggataagggggcagatcaagaaagcactctgagctccagaaggagctttccgggccagctttgaggataagctgctgatgagcggtgagtgtcttaagtagtgttcagggcagggtgttaccattcatgcttgacttctagccagtgtgacgagaggct

SEQ ID NO: 29035 - protein, 63 aa, Homo sapiens; identical to SEQ ID NO: 29033

SEQ ID NO: 29036 - DNA, 1711 bp, Homo sapiens
cgaggcgccggcccagactccactccccagctgtgaaaggaggagctctacggtgactttgaagacttggaaacaggggacgtgcacaagggaaaatcgggccccgatactcagaatgaagatgtagagaaacaaggaagaaattgaccctgacgaagaagaaagtgccaagaaaaagcatttggataagaagagaaaattgaaggagatgtttgatgtggaatatgatgaaggagaaagcacatattttgatgatcttaaaggagaaatgcagaaacaagcacagctgaatcatgcagaatttgaagatcaagatgatgaagccagagttcagtatgagggttttcgacctgggatgtacgtctgcgttgagattgaaaatgttccctgtgaatttgtgtagaactttgacccccgttaccccattatcctgggtggcttgggcaacagcgagggaaatgttggatacgtgcagatgcgtctgaagaaacatcgctggtataagaaaatcctcaagtcccgagatccaatcatattttctgtagggtggaggaggtttcagaccatcccgctctgttatatcgaagaccacaatggaagacaaaggcttctaaagtataccccacagcatgtgcatcgcggagcagccttttgggaccctatcactccacagggaactggtttcttggcaatacagtctgtcagtggcataatgcctgattttcggatagctgccacataagttgtccttgatctggataaatccataaaaattgtgaagaaattaaagctaactggttttccatataaaatttttaagaacacttcatttattaaggtctgtatatctatatattctcatatttataaatctccatattgtttgagaaaaggaatgaaatacctctaaaatatgggcctcatatttttagaaaagtgtttgaaatcttttataaacttcatattttgtttgctcctttatattctgtattacttaaatatgctcagaaaagcagtggtaaacagctatttaggaattgaggctgttactcctgacttccatgtgagactgccacagaactcatattgaaaatatgtcattttatccactaggttttgtttcctactttttaaatttgtgttaagaaagggaaaaaaatcacaagtttgtctaactcagtagaaaaatcgacaaagcatttgcagacaacttggcaagggtacagagaaacggatgtactgtttttcagtatttggggagggtggtttgagcagcatttattgacaatttcattagtggggatgtttctattgaaaacagggttaggaagtcataaaatgttcctgcaatataaggtaataataccaccagcgtttatcttactgttttcatgttctaagtgcatgcatctgagtaaaaggatctgggctgcagtccagtctgagagatgccagcaaaggcttcctaggccagttcagtccagtaaatccctcttcgatcttctcttccacacagacagcagtgatgagcatgcccatgaactcacatgattattttggggaaaatgaaagagttgtattctttttgaggtagtaattccactttcaggggcaaatacattttgattattttatcacccttcagtgagttgtttttgttctttaatcaaggatgtatgtttgaagtaagaagtaaagcataaagtatatg

SEQ ID NO: 29037 - protein, 88 aa, Homo sapiens; identical to SEQ ID NO: 3997

SEQ ID NO: 29038 - DNA, 1977 bp, Homo sapiens
cgaggcgccggcccagactccactccccagctgtgaaaggaggagctctacggtgactttgaagacttggaaacaggggacgtgcacaagggaaaatcgggccccgatactcagaatgaagatgtagagaaacaaggaagaaattgaccctgacgaagaagaaagtgccaagaaaaagcatttggataagaagagaaaattgaaggagatgtttgatgtggaatatgatgaaggagaaagcacatattttgatgatcttaaaggagaaatgcagaaacaagcacagctgaatcatgcagaatttgaagatcaagatgatgaagccagagttcagtatgagggttttcgacctgggatgtacgtctgcgttgagattgaaaatgttccctgtgaatttgtgtagaactttgacccccgttaccccattatcctgggtggcttgggcaacagcgagggaaatgttggatacgtgcagatgcgtctgaagaaacatcgctggtataagaaaatcctcaagtcccgagatccaatcatattttctgtagggtggaggaggtttcagaccatcccgctctgttatatcgaagaccacaatggaagacaaaggcttctaaagtataccccacagcatgtgcatcgcggagcagccttttgggaccctatcactccacagggaactggtttcttggcaatacagtctgtcagtggcataatgcctgattttcggatagctgccacataagttgtccttgatctggataaatccataaaaattgtgaagaaattaaagctaactggttttccatataaaatttttaagaacacttcatttattaaggtctgtatatctatatattctcatatttataaatctccatattgtttgagaaaaggaatgaaatacctctaaaatatgggcctcatatttttagaaaagtgtttgaaatcttttataaacttcatattttgtttgctcctttatattctgtattacttaaatatgctcagaaaagcagtggtaaacagctatttaggaattgaggctgttactcctgacttccatgtgagactgccacagaactcatattgaaaatatgtcattttatccactaggttttgtttcctactttttaaatttgtgttaagaaagggaaaaaaatcacaagtttgtctaactcagtagaaaaatcgacaaagcatttgcagacaacttggcaagggtacagagaaacggatgtactgtttttcagtatttggggagggtggtttgagcagcatttattgacaatttcattagtggggatgtttctattgaaaacagggttaggaagtcataaaatgttcctgcaatataaggtaataataccaccagcgtttatcttactgttttcatgttctaagtgcatgcatctgagtaaaaggatctgggctgcagtccagtctgagagatgccagcaaaggcttcctaggccagttcagtccagtaaatccctcttcgatcttctcttccacacagacagcagtgatgagcatgcccatgaactcacatgattattttggggaaaatgaaagagttgtattctttttgaggtagtaattccactttcaggggcaaatacattttgattattttatcacccttcagtgagttgtttttgttctttaatcaaggatgtatgtttgaagtaagaagtaaagcataaagtatatgattttgtgtgtgtgtgtgtgtttttatcttgctgtacctgtagggaatgtttaattcagccttggaagtggccaaatttgaaggtgctgtgattcgaactgtcagtgggataagggggcagatcaagaaagcactctgagctccagaaggagctttccgggccagctttgaggataagctgctgatgagcggtgagtgtcttaagtagtgttcagggcagggtgttaccattcatgcttgacttctagccagtgtgacgagaggct

SEQ ID NO: 29039 - protein, 88 aa, Homo sapiens; identical to SEQ ID NO: 3997

SEQ ID NO: 29040 - DNA, 3186 bp, Homo sapiens
gtgatgggaacagtgagaatcagacttggaacacggagcgcattgtgggcctgtcgtgggtggggccagcagcacatgcatgccgggctgacagagcagcctttgggtgttcttttcccagaggagctctacggtgactttgaagacttggaaacaggggacgtgcacaagggaaaatcgggccccgatactcagaatgaagatgtagagaaacaaggaagaaattgaccctgacgaagaagaaagtgccaagaaaaagcatttggataagaagagaaaattgaaggagatgtttgatgtggaatatgatgaaggagaaagcacatattttgatgatcttaaaggagaaatgcagaaacaagcacagataacagcatacaggttttccccccccaccccgtcatgtacagctgaatcatgcagaatttgaagatcaagatgatgaagccagagttcagtatgagggttttcgacctgggatgtacgtctgcgttgagattgaaaatgttccctgtgaatttgtgtagaactttgacccccgttaccccattatcctgggtggcttgggcaacagcgagggaaatgttggatacgtgcagatgcgtctgaagaaacatcgctggtataagaaaatcctcaagtcccgagatccaatcatattttctgtagggtggaggaggtttcagaccatcccgctctgttatatcgaagaccacaatggaagacaaaggcttctaaagtataccccacagcatgtgcatcgcggagcagccttttgggataaaatatgattacaataacttgcctattgctgagattaaaccttacaggctgcgttattttagctttgtgcttttcctttcataaaattccactcctaagatttttctcttttctgggagcagggaggtggtttggagtatatacgtaaatctatatccaaatctaaatgtccatatccagtatgttaaactagaatctaaaatttgtggtttgctatatttctttttttccttttcctttaagaccctatcactccacagggaactggtttcttggcaatacagtctgtcagtggcataatggtaactatcttggatgatttcttttacagattggttttgagaaatatatcctgaatgtggattactatgtacatgagactttaagttgaaaattactcatttttattaatataaagtaaatttccctttgcttttaatcttcgtacatccttttcagtagggtgtgggattagaggaggggaggtggaagaattataatggtacatttcctatttttgtgcatcttttgcatttatttatctaagcaagtacttaagcagtgctcaccatgtgctaagcactgtatgaggttgtgaggagccatcagagaccacccagacacaagactccctgcagctgtgctggggtagcagtctgttcactccattttcatttgaccagtcaggcagggcagggtttactggtcccatttaacagagaagaaagcagaataatgagcagatggaatcttccctggaggtccaaattttaatttcctaaacattgcaactgtatttttcttttccatttcgttccaaataaatcattatagtaaaattacattcctctgaaatcactctcaggaaagtactcaagtagccttttttttttctttcttttttttttttttttttgagacagagttgcactctgtcgtccaggctggagtgcagtggcacaatcttggctcgctgcaacctctgcctcctgggtttaagcggttctcctgcctcagcctcccgagtagctgggattacaggtgtgcaccatcatgccgagccaatttttgtatttttagtagagacaggatttccccatgttggccagactggtttcaaacttctgacctcaggtgatctacctgccttggcctcccaaagtgctgggattacaggtatgagccactgtgcccagcctcaagtcacccttgttagtttggcttaccaactttaaagttttggattgcttttgtcaagccactgggttgcaagttcagatggtctttcttgtttttcttagctaattgtaagtaaaattcactttggtaatttattgtgtcacatagaattgaagtttttctcttgctaatattattcctattttcaaattttggggttcctgttagcctgattttcggatagctgccacataagttgtccttgatctggataaatccataaaaattgtgaagaaattaaagctaactggttttccatataaaatttttaagaacacttcatttattaaggtctgtatatctatatattctcatatttataaatctccatattgtttgagaaaaggaatgaaatacctctaaaatatgggcctcatatttttagaaaagtgtttgaaatcttttataaacttcatattttgtttgctcctttatattctgtattacttaaatatgctcagaaaagcagtggtaaacagctatttaggaattgaggctgttactcctgacttccatgtgagactgccacagaactcatattgaaaatatgtcattttatccactaggttttgtttcctactttttaaatttgtgttaagaaagggaaaaaaatcacaagtttgtctaactcagtagaaaaatcgacaaagcatttgcagacaacttggcaagggtacagagaaacggatgtactgtttttcagtatttggggagggtggtttgagcagcatttattgacaatttcattagtggggatgtttctattgaaaacagggttaggaagtcataaaatgttcctgcaatataaggtaataataccaccagcgtttatcttactgttttcatgttctaagtgcatgcatctgagtaaaaggatctgggctgcagtccagtctgagagatgccagcaaaggcttcctaggccagttcagtccagtaaatccctcttcgatcttctcttccacacagacagcagtgatgagcatgcccatgaactcacatgattattttggggaaaatgaaagagttgtattctttttgaggtagtaattccactttcaggggcaaatacattttgattattttatcacccttcagtgagttgtttttgttctttaatcaaggatgtatgtttgaagtaagaagtaaagcataaagtatatg

SEQ ID NO: 29041 - protein, 74 aa, Homo sapiens
MGTVRIRLGTRSALWACRGWGQQHMHAGLTEQPLGVLFPEELYGDFEDLETGDVHKGKSGPDTQNEDVEKQGRN

SEQ ID NO: 29042 - DNA, 3452 bp, Homo sapiens
gtgatgggaacagtgagaatcagacttggaacacggagcgcattgtgggcctgtcgtgggtggggccagcagcacatgcatgccgggctgacagagcagcctttgggtgttcttttcccagaggagctctacggtgactttgaagacttggaaacaggggacgtgcacaagggaaaatcgggccccgatactcagaatgaagatgtagagaaacaaggaagaaattgaccctgacgaagaagaaagtgccaagaaaaagcatttggataagaagagaaaattgaaggagatgtttgatgtggaatatgatgaaggagaaagcacatattttgatgatcttaaaggagaaatgcagaaacaagcacagataacagcatacaggttttccccccccaccccgtcatgtacagctgaatcatgcagaatttgaagatcaagatgatgaagccagagttcagtatgagggttttcgacctgggatgtacgtctgcgttgagattgaaaatgttccctgtgaatttgtgtagaactttgacccccgttaccccattatcctgggtggcttgggcaacagcgagggaaatgttggatacgtgcagatgcgtctgaagaaacatcgctggtataagaaaatcctcaagtcccgagatccaatcatattttctgtagggtggaggaggtttcagaccatcccgctctgttatatcgaagaccacaatggaagacaaaggcttctaaagtataccccacagcatgtgcatcgcggagcagccttttgggataaaatatgattacaataacttgcctattgctgagattaaaccttacaggctgcgttattttagctttgtgcttttcctttcataaaattccactcctaagatttttctcttttctgggagcagggaggtggtttggagtatatacgtaaatctatatccaaatctaaatgtccatatccagtatgttaaactagaatctaaaatttgtggtttgctatatttctttttttccttttcctttaagaccctatcactccacagggaactggtttcttggcaatacagtctgtcagtggcataatggtaactatcttggatgatttcttttacagattggttttgagaaatatatcctgaatgtggattactatgtacatgagactttaagttgaaaattactcatttttattaatataaagtaaatttccctttgcttttaatcttcgtacatccttttcagtagggtgtgggattagaggaggggaggtggaagaattataatggtacatttcctatttttgtgcatcttttgcatttatttatctaagcaagtacttaagcagtgctcaccatgtgctaagcactgtatgaggttgtgaggagccatcagagaccacccagacacaagactccctgcagctgtgctggggtagcagtctgttcactccattttcatttgaccagtcaggcagggcagggtttactggtcccatttaacagagaagaaagcagaataatgagcagatggaatcttccctggaggtccaaattttaatttcctaaacattgcaactgtatttttcttttccatttcgttccaaataaatcattatagtaaaattacattcctctgaaatcactctcaggaaagtactcaagtagccttttttttttctttcttttttttttttttttttgagacagagttgcactctgtcgtccaggctggagtgcagtggcacaatcttggctcgctgcaacctctgcctcctgggtttaagcggttctcctgcctcagcctcccgagtagctgggattacaggtgtgcaccatcatgccgagccaatttttgtatttttagtagagacaggatttccccatgttggccagactggtttcaaacttctgacctcaggtgatctacctgccttggcctcccaaagtgctgggattacaggtatgagccactgtgcccagcctcaagtcacccttgttagtttggcttaccaactttaaagttttggattgcttttgtcaagccactgggttgcaagttcagatggtctttcttgtttttcttagctaattgtaagtaaaattcactttggtaatttattgtgtcacatagaattgaagtttttctcttgctaatattattcctattttcaaattttggggttcctgttagcctgattttcggatagctgccacataagttgtccttgatctggataaatccataaaaattgtgaagaaattaaagctaactggttttccatataaaatttttaagaacacttcatttattaaggtctgtatatctatatattctcatatttataaatctccatattgtttgagaaaaggaatgaaatacctctaaaatatgggcctcatatttttagaaaagtgtttgaaatcttttataaacttcatattttgtttgctcctttatattctgtattacttaaatatgctcagaaaagcagtggtaaacagctatttaggaattgaggctgttactcctgacttccatgtgagactgccacagaactcatattgaaaatatgtcattttatccactaggttttgtttcctactttttaaatttgtgttaagaaagggaaaaaaatcacaagtttgtctaactcagtagaaaaatcgacaaagcatttgcagacaacttggcaagggtacagagaaacggatgtactgtttttcagtatttggggagggtggtttgagcagcatttattgacaatttcattagtggggatgtttctattgaaaacagggttaggaagtcataaaatgttcctgcaatataaggtaataataccaccagcgtttatcttactgttttcatgttctaagtgcatgcatctgagtaaaaggatctgggctgcagtccagtctgagagatgccagcaaaggcttcctaggccagttcagtccagtaaatccctcttcgatcttctcttccacacagacagcagtgatgagcatgcccatgaactcacatgattattttggggaaaatgaaagagttgtattctttttgaggtagtaattccactttcaggggcaaatacattttgattattttatcacccttcagtgagttgtttttgttctttaatcaaggatgtatgtttgaagtaagaagtaaagcataaagtatatgattttgtgtgtgtgtgtgtgtttttatcttgctgtacctgtagggaatgtttaattcagccttggaagtggccaaatttgaaggtgctgtgattcgaactgtcagtgggataagggggcagatcaagaaagcactctgagctccagaaggagctttccgggccagctttgaggataagctgctgatgagcggtgagtgtcttaagtagtgttcagggcagggtgttaccattcatgcttgacttctagccagtgtgacgagaggct

SEQ ID NO: 29043 - protein, 74 aa, Homo sapiens; identical to SEQ ID NO: 29041

SEQ ID NO: 29044 - DNA, 891 bp, Homo sapiens
ctcaggggctgtgtccaccatggcctggactcttctccttctcgtgctcctctctcactgcacaggttccctctcccagcctgtgctgactcagccatcttcccattctgcatcttctggagcatcagtcagactcacctgcatgctgagcagtggcttcagtgttggggacttctggataaggtggtaccaacaaaagccagggaaccctccccggtatctcctgtactaccactcagactccaataagggccaaggctctggagttcccagccgcttctctggatccaacgatgcatcagccaatgcagggattctgcgtatctctgggctccagcctgaggatgaggctgactattactgtggtacatggcacagcaactctaagatgtgtggtattcggcggagggaccaagctgaccgtcctaggtcagcccaaggctgccccctcggtcactctgttcccgccctcctctgaggagcttcaagccaacaaggccacactggtgtgtctcataagtgacttctacccgggagccgtgacagtggcctggaaggcagatagcagccccgtcaaggcgggagtggagaccaccacaccctccaaacaaagcaacaacaagtacgcggccagcagctatctgagcctgacgcctgagcagtggaagtcccacagaagctacagctgccaggtcacgcatgaagggagcaccgtggagaagacagtggcccctacagaatgttcataggttctcaaccctcaccccccaccacgggagactagagctgcaggatcccaggggaggggtctctcctcccaccccaaggcatcaagcccttctccctgcactcaataaaccctcaataaatattctcattgtcaatcagaaa

SEQ ID NO: 29045 - protein, 152 aa, Homo sapiens
MAWTLLLLVLLSHCTGSLSQPVLTQPSSHSASSGASVRLTCMLSSGFSVGDFWIRWYQQKPGNPPRYLLYYHSDSNKGQGSGVPSRFSGSNDASANAGILRISGLQPEDEADYYCGTWHSNSKMCGIRRRDQADRPRSAQGCPLGHSVPALL

SEQ ID NO: 29046 - DNA, 888 bp, Homo sapiens
ctcaggggctgtgtccaccatggcctggactcttctccttctcgtgctcctctctcactgcacaggttccctctcccagcctgtgctgactcagccatcttcccattctgcatcttctggagcatcagtcagactcacctgcatgctgagcagtggcttcagtgttggggacttctggataaggtggtaccaacaaaagccagggaaccctccccggtatctcctgtactaccactcagactccaataagggccaaggctctggagttcccagccgcttctctggatccaacgatgcatcagccaatgcagggattctgcgtatctctgggctccagcctgaggatgaggctgactattactgtggtacatggcacagcaactctaagatgttgggtgttcggcggagggaccaagctgaccgtcctaggtcagcccaaggctgccccctcggtcactctgttcccgccctcctctgaggagcttcaagccaacaaggccacactggtgtgtctcataagtgacttctacccgggagccgtgacagtggcctggaaggcagatagcagccccgtcaaggcgggagtggagaccaccacaccctccaaacaaagcaacaacaagtacgcggccagcagctacctgagcctgacgcctgagcagtggaagtcccacagaagctacagctgccaggtcacgcatgaagggagcaccgtggagaagacagtggcccctacagaatgttcataggttctcaaccctcaccccccaccacgggagactagagctgcaggatcccaggggaggggtctctcctcccaccccaaggcatcaagcccttctccctgcactcaataaaccctcaataaatattctcattgtcaatcag

SEQ ID NO: 29047 - protein, 152 aa, Homo sapiens
MAWTLLLLVLLSHCTGSLSQPVLTQPSSHSASSGASVRLTCMLSSGFSVGDFWIRWYQQKPGNPPRYLLYYHSDSNKGQGSGVPSRFSGSNDASANAGILRISGLQPEDEADYYCGTWHSNSKMLGVRRRDQADRPRSAQGCPLGHSVPALL

SEQ ID NO: 29048 - DNA, 1164 bp, Homo sapiens
ctcaggggctgtgtccaccatggcctggactcttctccttctcgtgctcctctctcactgcacaggttccctctcccagcctgtgctgactcagccatcttcccattctgcatcttctggagcatcagtcagactcacctgcatgctgagcagtggcttcagtgttggggacttctggataaggtggtaccaacaaaagccagggaaccctccccggtatctcctgtactaccactcagactccaataagggccaaggctctggagttcccagccgcttctctggatccaacgatgcatcagccaatgcagggattctgcgtatctctgggctccagcctgaggatgaggctgactattactgtggtacatggcacagcaactctaagatgttgggtgttcggcggagggaccaagctgaccgtcctaggtcagcccaaggctgccccctcggtcactctgttcccgccctcctctgaggagcttcaagccaacaaggccacactggtgtgtctcataagtgacttctacccgggagccgtgacagtggcctggaaggcagatagcagccccgtcaaggcgggagtggagaccaccacaccctccaaacaaagcaacaacaagtacgcggccagcagctacctgagcctgacgcctgagcagtggaagtcccacagaagctacagctgccaggtcacgcatgaagggagcaccgtggagaagacagtggcccctacagaatgttcataggttctcaaccctcaccccccaccacgggagactagagctgcaggatcccaggggaggggtctctcctcccaccccaaggcatcaagcccttctccctgcactcaataaaccctcaataaatattctcattgtcaatcagaaatcttgttttatctcattttttcttttctcacatataattcctagccttccctgggttctcaatttatggtggagggaattctgcacccagtgggaaagtcacccaagggaggaggcttacagcctccccgagtcatctctctggaaggtccttcctcttccagtcaccccttccccaactctccaccatacccctgagcctccagcctggcctcagctcagaccagtcccacaccctcctcaattttacttctcaataaagacctgatcatgt

SEQ ID NO: 29049 - protein, 152 aa, Homo sapiens; identical to SEQ ID NO: 29047

SEQ ID NO: 29050 - DNA, 844 bp, Homo sapiens
tcagccatcttcccattctgcatcttctggagcatcagtcagactcacctgcatgctgagcagtggcttcagtgttggggacttctggataaggtggtaccaacaaaagccagggaaccctccccggtatctcctgtactaccactcagactccaataagggccaaggctctggagttcccagccgcttctctggatccaacgatgcatcagccaatgcagggattctgcgtatctctgggctccagcctgaggatgaggctgactattactgtggtacatggcacagcaactctaagactcacacagtgctccagacccatgaggaagtttcattacacatcaaagatgaataatttctctcatctttaggacatgctgaaaacactcattagtgattttgaacagtattatttcctaaacatcctagttggaatggttgatcctaaaagctaccatgtgtcaggctcacctgagtgcagactgtggtctaaacaagctaaagttttaattcttccatcttcaaatacggagcatatttgcttgttttgctctttagcaaaacactgcaaagtcattcgccaggatctcctgcagactggcattcagtgatggagaacagactcctaggtgagatccctggtcacaggatccagatgactatgactgcaagtctggaaaagaagagacagaacaaagatttaccagcataaccctctgagaatgtgccccagccatcctggagggaagagctccctattgacccagcactgcagaatccacagaggaaggacagctctggccaccagggagcagccacacgacaagagaggacccggtgtccc

SEQ ID NO: 29051 - protein, 100 aa, Homo sapiens
MLSSGFSVGDFWIRWYQQKPGNPPRYLLYYHSDSNKGQGSGVPSRFSGSNDASANAGILRISGLQPEDEADYYCGTWHSNSKTHTVLQTHEEVSLHIKDE

SEQ ID NO: 29052 - DNA, 1469 bp, Homo sapiens
tcttctggagcatcagtcagactcacctgcatgctgagcagtggcttcagtgttggggacttctggataaggtggtaccaacaaaagccagggaaccctccccggtatctcctgtactaccactcagactccaataagggccaaggctctggagttcccagccgcttctctggatccaacgatgcatcagccaatgcagggattctgcgtatctctgggctccagcctgaggatgaggctgactattactgtggtacatggcacagcaactctaagactcacacagtgctccagacccatgaggaagtaagacaaaaccctcccctctactctcctggtctagtgaaatcacccctgctggtggctctgaccaaatctagctcagggggtgacatctgttgtctcatcgacagcactggagctcccacggagaagtaggtctaacaaagtcctaccttgctcgcatttcacaggcagacatcccttgctcaggggtaaaatctctcagtgttgacattgaagaaggcaagagggctgggttggggttcatctcagctcagagtctagaagtgactcagagatgctgctggtctgagagttttaatatgagccttgggatacaatacagggatgcagatgggaattgtattctctatgtcagtaacgaaccatcagtaattgaaaagtcaatacattgagaatagcataaagcatgaaatactttaggataagtatgacaaaaattgttgttttacacactagaagtcctaaaacattgtttagacgcaggtcttaaagaagacctgagtaaatgcacagataatccttttttttttttttttttttttgaggcagagtttcactcttgttgcccaggctggagtgcaatggcatgatcttggatctcggctcaccacaacctccacctcctgggttcaagcgattctcctgcctcagcctcccaagtagctgggactacaggcacccgccgccatgcccggctaattttttgtattttttagtggagatggggtttcaacatgttggccagaatggtcttgatctcttgacctcgtgatccacccgccttggcctcccaaagtgctgggattacaggtgtgagccactgcacccggcccaagatggggtttcatcatgttgacctggctggtctcaaactcccaacctcaagtgatccactcacttcagcctcccaaagtgctgggatgacaggcgtgagccacagtgcccggcctagtacattgtttaaatggtgcatgtaaaacctcatggtactacaactgcctggtgacagactcaccagagtaaataactatcctgctgttctccaaccacatgggattccccaaacaaagatttgttgagtccaagatgcatcatgccagaactcttgcagtcatacacataatttgtttcattttaataaatacggttatcttttttcttca

SEQ ID NO: 29053 - protein, 61 aa, Homo sapiens
MILDLGSPQPPPPGFKRFSCLSLPSSWDYRHPPPCPANFLYFLVEMGFQHVGQNGLDLLTS

SEQ ID NO: 29054 - DNA, 900 bp, Homo sapiens
ggggaagctctgcttcagctgtgagcgcagaaggcaggactcgggacaatcttcatcatgacctgctcccctctcctcctcacccttctcattcactgcacagggtcctgggcccagtctgtgttgacgcagccgccctcagtgtctgcggccccaggacagaaggtcaccatctcctgctctggaagcagctccaacattgggaataattatgtatcctggtaccagcagctcccaggaacagcccccaaactcctcatttatgacaataataagcgaccctcagggattcctgaccgattctctggctccaagtctggcacgtcagccaccctgggcatcaccggactccagactggggacgaggccgattattactgcggaacatgggatagcagcctgatgttatgtcttcggaactgggaccaaggtcaccgtcctaggtcagcccaaggccaaccccactgtcactctgttcccgccctcctctgaggagctccaagccaacaaggccacactagtgtgtctgatcagtgacttctacccgggagctgtgacagtggcctggaaggcagatggcagccccgtcaaggcgggagtggagaccaccaaaccctccaaacagagcaacaacaagtacgcggccagcagctacctgagcctgacgcccgagcagtggaagtcccacagaagctacagctgccaggtcacgcatgaagggagcaccgtggagaagacagtggcccctacagaatgttcataggttcccaactctaaccccacccacgggagcctggagctgcaggatcccaggggaggggtctctctccccatcccaagtcatccagcccttctccctgcactcatgaaaccccaataaatatcctcattgacaaccag

SEQ ID NO: 29055 - protein, 144 aa, Homo sapiens
MTCSPLLLTLLIHCTGSWAQSVLTQPPSVSAAPGQKVTISCSGSSSNIGNNYVSWYQQLPGTAPKLLIYDNNKRPSGIPDRFSGSKSGTSATLGITGLQTGDEADYYCGTWDSSLMLCLRNWDQGHRPRSAQGQPHCHSVPALL

SEQ ID NO: 29056 - DNA, 1180 bp, Homo sapiens
ggggaagctctgcttcagctgtgagcgcagaaggcaggactcgggacaatcttcatcatgacctgctcccctctcctcctcacccttctcattcactgcacagggtcctgggcccagtctgtgttgacgcagccgccctcagtgtctgcggccccaggacagaaggtcaccatctcctgctctggaagcagctccaacattgggaataattatgtatcctggtaccagcagctcccaggaacagcccccaaactcctcatttatgacaataataagcgaccctcagggattcctgaccgattctctggctccaagtctggcacgtcagccaccctgggcatcaccggactccagactggggacgaggccgattattactgcggaacatgggatagcagcctgatgttatgtcttcggaactgggaccaaggtcaccgtcctaggtcagcccaaggccaaccccactgtcactctgttcccgccctcctctgaggagctccaagccaacaaggccacactagtgtgtctgatcagtgacttctacccgggagctgtgacagtggcctggaaggcagatggcagccccgtcaaggcgggagtggagaccaccaaaccctccaaacagagcaacaacaagtacgcggccagcagctacctgagcctgacgcccgagcagtggaagtcccacagaagctacagctgccaggtcacgcatgaagggagcaccgtggagaagacagtggcccctacagaatgttcataggttcccaactctaaccccacccacgggagcctggagctgcaggatcccaggggaggggtctctctccccatcccaagtcatccagcccttctccctgcactcatgaaaccccaataaatatcctcattgacaaccagaaatcttgttttatctcattttttttctcacataaattgctagcctccccggggttctcagtgtggggtacagggaattctgcacccagtgtgaaaatcacccaagggaggaggctcacagcctccctgagtcatctccccagagggtccttcctctcccagtcaccccttctccaactctccactgtacccctgagctaccagtctggcatcagttcagaccagtcccacaccctcctaaattttacttctcaataaatacctgatcatgtaaaacgca

SEQ ID NO: 29057 - protein, 144 aa, Homo sapiens; identical to SEQ ID NO: 29055

SEQ ID NO: 29058 - DNA, 905 bp, Homo sapiens
ggggaagctctgcttcagctgtgagcgcagaaggcaggactcgggacaatcttcatcatgacctgctcccctctcctcctcacccttctcattcactgcacagggtcctgggcccagtctgtgttgacgcagccgccctcagtgtctgcggccccaggacagaaggtcaccatctcctgctctggaagcagctccaacattgggaataattatgtatcctggtaccagcagctcccaggaacagcccccaaactcctcatttatgacaataataagcgaccctcagggattcctgaccgattctctggctccaagtctggcacgtcagccaccctgggcatcaccggactccagactggggacgaggccgattattactgcggaacatgggatagcagcctgatgtgtggtattcggcggagggaccaagctgaccgtcctaggtcagcccaaggctgccccctcggtcactctgttcccgccctcctctgaggagcttcaagccaacaaggccacactggtgtgtctcataagtgacttctacccgggagccgtgacagtggcctggaaggcagatagcagccccgtcaaggcgggagtggagaccaccacaccctccaaacaaagcaacaacaagtacgcggccagcagctatctgagcctgacgcctgagcagtggaagtcccacagaagctacagctgccaggtcacgcatgaagggagcaccgtggagaagacagtggcccctacagaatgttcataggttctcaaccctcaccccccaccacgggagactagagctgcaggatcccaggggaggggtctctcctcccaccccaaggcatcaagcccttctccctgcactcaataaaccctcaataaatattctcattgtcaatcagaaa

SEQ ID NO: 29059 - protein, 144 aa, Homo sapiens
MTCSPLLLTLLIHCTGSWAQSVLTQPPSVSAAPGQKVTISCSGSSSNIGNNYVSWYQQLPGTAPKLLIYDNNKRPSGIPDRFSGSKSGTSATLGITGLQTGDEADYYCGTWDSSLMCGIRRRDQADRPRSAQGCPLGHSVPALL

SEQ ID NO: 29060 - DNA, 902 bp, Homo sapiens
ggggaagctctgcttcagctgtgagcgcagaaggcaggactcgggacaatcttcatcatgacctgctcccctctcctcctcacccttctcattcactgcacagggtcctgggcccagtctgtgttgacgcagccgccctcagtgtctgcggccccaggacagaaggtcaccatctcctgctctggaagcagctccaacattgggaataattatgtatcctggtaccagcagctcccaggaacagcccccaaactcctcatttatgacaataataagcgaccctcagggattcctgaccgattctctggctccaagtctggcacgtcagccaccctgggcatcaccggactccagactggggacgaggccgattattactgcggaacatgggatagcagcctgatgttgggtgttcggcggagggaccaagctgaccgtcctaggtcagcccaaggctgccccctcggtcactctgttcccgccctcctctgaggagcttcaagccaacaaggccacactggtgtgtctcataagtgacttctacccgggagccgtgacagtggcctggaaggcagatagcagccccgtcaaggcgggagtggagaccaccacaccctccaaacaaagcaacaacaagtacgcggccagcagctacctgagcctgacgcctgagcagtggaagtcccacagaagctacagctgccaggtcacgcatgaagggagcaccgtggagaagacagtggcccctacagaatgttcataggttctcaaccctcaccccccaccacgggagactagagctgcaggatcccaggggaggggtctctcctcccaccccaaggcatcaagcccttctccctgcactcaataaaccctcaataaatattctcattgtcaatcag

SEQ ID NO: 29061 - protein, 144 aa, Homo sapiens
MTCSPLLLTLLIHCTGSWAQSVLTQPPSVSAAPGQKVTISCSGSSSNIGNNYVSWYQQLPGTAPKLLIYDNNKRPSGIPDRFSGSKSGTSATLGITGLQTGDEADYYCGTWDSSLMLGVRRRDQADRPRSAQGCPLGHSVPALL

SEQ ID NO: 29062 - DNA, 1178 bp, Homo sapiens
ggggaagctctgcttcagctgtgagcgcagaaggcaggactcgggacaatcttcatcatgacctgctcccctctcctcctcacccttctcattcactgcacagggtcctgggcccagtctgtgttgacgcagccgccctcagtgtctgcggccccaggacagaaggtcaccatctcctgctctggaagcagctccaacattgggaataattatgtatcctggtaccagcagctcccaggaacagcccccaaactcctcatttatgacaataataagcgaccctcagggattcctgaccgattctctggctccaagtctggcacgtcagccaccctgggcatcaccggactccagactggggacgaggccgattattactgcggaacatgggatagcagcctgatgttgggtgttcggcggagggaccaagctgaccgtcctaggtcagcccaaggctgccccctcggtcactctgttcccgccctcctctgaggagcttcaagccaacaaggccacactggtgtgtctcataagtgacttctacccgggagccgtgacagtggcctggaaggcagatagcagccccgtcaaggcgggagtggagaccaccacaccctccaaacaaagcaacaacaagtacgcggccagcagctacctgagcctgacgcctgagcagtggaagtcccacagaagctacagctgccaggtcacgcatgaagggagcaccgtggagaagacagtggcccctacagaatgttcataggttctcaaccctcaccccccaccacgggagactagagctgcaggatcccaggggaggggtctctcctcccaccccaaggcatcaagcccttctccctgcactcaataaaccctcaataaatattctcattgtcaatcagaaatcttgttttatctcattttttcttttctcacatataattcctagccttccctgggttctcaatttatggtggagggaattctgcacccagtgggaaagtcacccaagggaggaggcttacagcctccccgagtcatctctctggaaggtccttcctcttccagtcaccccttccccaactctccaccatacccctgagcctccagcctggcctcagctcagaccagtcccacaccctcctcaattttacttctcaataaagacctgatcatgt

SEQ ID NO: 29063 - protein, 144 aa, Homo sapiens; identical to SEQ ID NO: 29061

SEQ ID NO: 29064 - DNA, 525 bp, Homo sapiens
cagggtcctgggcccagtctgtgttgacgcagccgccctcagtgtctgcggccccaggacagaaggtcaccatctcctgctctggaagcagctccaacattgggaataattatgtatcctggtaccagcagctcccaggaacagcccccaaactcctcatttatgacaataataagcgaccctcagggattcctgaccgattctctggctccaagtctggcacgtcagccaccctgggcatcaccggactccagactggggacgaggccgattattactgcggaacatgggatagcagcctgagtgctggcacagtgctccagcccaatggggaactgagacaagaacccccttcttcctcccccaggaggaaacaccaaggaggcagccaccaaggacgaggggaggcccaggcattataccaggcagcggagccagccagtccccccagatggtggagggaggtggtggaggtgtctgggaccagaaaatagtgaggaccctcttactgaagtgaggacgggt

SEQ ID NO: 29065 - protein, 63 aa, Homo sapiens
MYPGTSSSQEQPPNSSFMTIISDPQGFLTDSLAPSLARQPPWASPDSRLGTRPIITAEHGIAA

SEQ ID NO: 29066 - DNA, 378 bp, Homo sapiens
gctctgcttcagctgtgggcacaggaggcagcactcaggacaatctccagcatggcctggtcttctctcctcctcactctcctcgctcactgcacagggtcctgggcccagtctgtgctgacgcagccgccctcagtgtctggggccccagggcagagggtcaccatctcctgcactgggagcagctccaacattggggcgggttatgttgtacattggtaccagcagcttccaggaacagcccccaaactcctcatctatggtaacagcaatcggccctcaggggtccctgaccaattctctggctccaagtctggcacctcagcctccctggccatcactggactccagtctgaggatgaggctgattattactgc

SEQ ID NO: 29067 - protein, 108 aa, Homo sapiens
MAWSSLLLTLLAHCTGSWAQSVLTQPPSVSGAPGQRVTISCTGSSSNIGAGYVVHWYQQLPGTAPKLLIYGNSNRPSGVPDQFSGSKSGTSASLAITGLQSEDEADYY

SEQ ID NO: 29068 - DNA, 907 bp, Homo sapiens
gagagactgaagaacccagcattgcagcagctccaccatggcctgggctcctctgctcctcaccctcctcagtctcctcacagggtccctctcccagcctgtgctgactcagccaccttctgcatcagcctccctgggagcctcggtcacactcacctgcaccctgagcagcggctacagtaattataaagtggactggtaccagcagagaccagggaagggcccccggtttgtgatgcgagtgggcactggtgggattgtgggatccaagggggatggcatccctgatcgcttctcagtcttgggctcaggcctgaatcggtacctgaccatcaagaacatccaggaagaagatgagagtgactaccactgtggggcagaccatggcagtgggagcaacttcgtgtaacccacatcggcggagggaccaagctgaccgtcctaggtcagcccaaggctgccccctcggtcactctgttcccgccctcctctgaggagcttcaagccaacaaggccacactggtgtgtctcataagtgacttctacccgggagccgtgacagtggcctggaaggcagatagcagccccgtcaaggcgggagtggagaccaccacaccctccaaacaaagcaacaacaagtacgcggccagcagctatctgagcctgacgcctgagcagtggaagtcccacagaagctacagctgccaggtcacgcatgaagggagcaccgtggagaagacagtggcccctacagaatgttcataggttctcaaccctcaccccccaccacgggagactagagctgcaggatcccaggggaggggtctctcctcccaccccaaggcatcaagcccttctccctgcactcaataaaccctcaataaatattctcattgtcaatcagaaa

SEQ ID NO: 29069 - protein, 123 aa, Homo sapiens
MAWAPLLLTLLSLLTGSLSQPVLTQPPSASASLGASVTLTCTLSSGYSNYKVDWYQQRPGKGPRFVMRVGTGGIVGSKGDGIPDRFSVLGSGLNRYLTIKNIQEEDESDYHCGADHGSGSNFV

SEQ ID NO: 29070 - DNA, 898 bp, Homo sapiens
gagagactgaagaacccagcattgcagcagctccaccatggcctgggctcctctgctcctcaccctcctcagtctcctcacagggtccctctcccagcctgtgctgactcagccaccttctgcatcagcctccctgggagcctcggtcacactcacctgcaccctgagcagcggctacagtaattataaagtggactggtaccagcagagaccagggaagggcccccggtttgtgatgcgagtgggcactggtgggattgtgggatccaagggggatggcatccctgatcgcttctcagtcttgggctcaggcctgaatcggtacctgaccatcaagaacatccaggaagaagatgagagtgactaccactgtggggcagaccatggcagtgggagcaacttcgtgtgttcggcggagggaccaagctgaccgtcctaggtcagcccaaggctgccccctcggtcactctgttcccgccctcctctgaggagcttcaagccaacaaggccacactggtgtgtctcataagtgacttctacccgggagccgtgacagtggcctggaaggcagatagcagccccgtcaaggcgggagtggagaccaccacaccctccaaacaaagcaacaacaagtacgcggccagcagctacctgagcctgacgcctgagcagtggaagtcccacagaagctacagctgccaggtcacgcatgaagggagcaccgtggagaagacagtggcccctacagaatgttcataggttctcaaccctcaccccccaccacgggagactagagctgcaggatcccaggggaggggtctctcctcccaccccaaggcatcaagcccttctccctgcactcaataaaccctcaataaatattctcattgtcaatcag

SEQ ID NO: 29071 - protein, 130 aa, Homo sapiens
MAWAPLLLTLLSLLTGSLSQPVLTQPPSASASLGASVTLTCTLSSGYSNYKVDWYQQRPGKGPRFVMRVGTGGIVGSKGDGIPDRFSVLGSGLNRYLTIKNIQEEDESDYHCGADHGSGSNFVCSAEGPS

SEQ ID NO: 29072 - DNA, 1174 bp, Homo sapiens
gagagactgaagaacccagcattgcagcagctccaccatggcctgggctcctctgctcctcaccctcctcagtctcctcacagggtccctctcccagcctgtgctgactcagccaccttctgcatcagcctccctgggagcctcggtcacactcacctgcaccctgagcagcggctacagtaattataaagtggactggtaccagcagagaccagggaagggcccccggtttgtgatgcgagtgggcactggtgggattgtgggatccaagggggatggcatccctgatcgcttctcagtcttgggctcaggcctgaatcggtacctgaccatcaagaacatccaggaagaagatgagagtgactaccactgtggggcagaccatggcagtgggagcaacttcgtgtgttcggcggagggaccaagctgaccgtcctaggtcagcccaaggctgccccctcggtcactctgttcccgccctcctctgaggagcttcaagccaacaaggccacactggtgtgtctcataagtgacttctacccgggagccgtgacagtggcctggaaggcagatagcagccccgtcaaggcgggagtggagaccaccacaccctccaaacaaagcaacaacaagtacgcggccagcagctacctgagcctgacgcctgagcagtggaagtcccacagaagctacagctgccaggtcacgcatgaagggagcaccgtggagaagacagtggcccctacagaatgttcataggttctcaaccctcaccccccaccacgggagactagagctgcaggatcccaggggaggggtctctcctcccaccccaaggcatcaagcccttctccctgcactcaataaaccctcaataaatattctcattgtcaatcagaaatcttgttttatctcattttttcttttctcacatataattcctagccttccctgggttctcaatttatggtggagggaattctgcacccagtgggaaagtcacccaagggaggaggcttacagcctccccgagtcatctctctggaaggtccttcctcttccagtcaccccttccccaactctccaccatacccctgagcctccagcctggcctcagctcagaccagtcccacaccctcctcaattttacttctcaataaagacctgatcatgt

SEQ ID NO: 29073 - protein, 130 aa, Homo sapiens; identical to SEQ ID NO: 29071

SEQ ID NO: 29074 - DNA, 980 bp, Homo sapiens
ggtcaaaaaccggggggatctgatttgcatggatggactctccccctctcagagtatgaagagagggagagatctgggggaagctcagcttcagctgtggtagagaagacaggattcaggacaatctccagcatggccggcttccctctcctcctcaccctcctcactcactgtgcagggtcctgggcccagtctgtgctgactcagccaccctcagcgtctgggacccccgggcagagggtcaccatctcttgttctggaagcagctccaacatcggaagtaattatgtatactggtaccagcagctcccaggaacggcccccaaactcctcatctatagtaataatcagcggccctcaggggtccctgaccgattctctggctccaagtctggcacctcagcctccctggccatcagtgggctccggtccgaggatgaggctgattattactgtgcagcatgggatgacagcctgagtgtgttgggtgttcggcggagggaccaagctgaccgtcctaggtcagcccaaggctgccccctcggtcactctgttcccgccctcctctgaggagcttcaagccaacaaggccacactggtgtgtctcataagtgacttctacccgggagccgtgacagtggcctggaaggcagatagcagccccgtcaaggcgggagtggagaccaccacaccctccaaacaaagcaacaacaagtacgcggccagcagctacctgagcctgacgcctgagcagtggaagtcccacagaagctacagctgccaggtcacgcatgaagggagcaccgtggagaagacagtggcccctacagaatgttcataggttctcaaccctcaccccccaccacgggagactagagctgcaggatcccaggggaggggtctctcctcccaccccaaggcatcaagcccttctccctgcactcaataaaccctcaataaatattctcattgtcaatcag

SEQ ID NO: 29075 - protein, 145 aa, Homo sapiens
MAGFPLLLTLLTHCAGSWAQSVLTQPPSASGTPGQRVTISCSGSSSNIGSNYVYWYQQLPGTAPKLLIYSNNQRPSGVPDRFSGSKSGTSASLAISGLRSEDEADYYCAAWDDSLSVLGVRRRDQADRPRSAQGCPLGHSVPALL

SEQ ID NO: 29076 - DNA, 1256 bp, Homo sapiens
ggtcaaaaaccggggggatctgatttgcatggatggactctccccctctcagagtatgaagagagggagagatctgggggaagctcagcttcagctgtggtagagaagacaggattcaggacaatctccagcatggccggcttccctctcctcctcaccctcctcactcactgtgcagggtcctgggcccagtctgtgctgactcagccaccctcagcgtctgggacccccgggcagagggtcaccatctcttgttctggaagcagctccaacatcggaagtaattatgtatactggtaccagcagctcccaggaacggcccccaaactcctcatctatagtaataatcagcggccctcaggggtccctgaccgattctctggctccaagtctggcacctcagcctccctggccatcagtgggctccggtccgaggatgaggctgattattactgtgcagcatgggatgacagcctgagtgtgttgggtgttcggcggagggaccaagctgaccgtcctaggtcagcccaaggctgccccctcggtcactctgttcccgccctcctctgaggagcttcaagccaacaaggccacactggtgtgtctcataagtgacttctacccgggagccgtgacagtggcctggaaggcagatagcagccccgtcaaggcgggagtggagaccaccacaccctccaaacaaagcaacaacaagtacgcggccagcagctacctgagcctgacgcctgagcagtggaagtcccacagaagctacagctgccaggtcacgcatgaagggagcaccgtggagaagacagtggcccctacagaatgttcataggttctcaaccctcaccccccaccacgggagactagagctgcaggatcccaggggaggggtctctcctcccaccccaaggcatcaagcccttctccctgcactcaataaaccctcaataaatattctcattgtcaatcagaaatcttgttttatctcattttttcttttctcacatataattcctagccttccctgggttctcaatttatggtggagggaattctgcacccagtgggaaagtcacccaagggaggaggcttacagcctccccgagtcatctctctggaaggtccttcctcttccagtcaccccttccccaactctccaccatacccctgagcctccagcctggcctcagctcagaccagtcccacaccctcctcaattttacttctcaataaagacctgatcatgt

SEQ ID NO: 29077 - protein, 145 aa, Homo sapiens; identical to SEQ ID NO: 29075

SEQ ID NO: 29078 - DNA, 895 bp, Homo sapiens
cagcttcagctgtggtagagaagacaggattcaggacaatctccagcatggccggcttccctctcctcctcaccctcctcactcactgtgcagggtcctgggcccagtctgtgctgactcagccaccctcagcgtctgggacccccgggcagagggtcaccatctcttgttctggaagcagctccaacatcggaagtaattatgtatactggtaccagcagctcccaggaacggcccccaaactcctcatctatagtaataatcagcggccctcaggggtccctgaccgattctctggctccaagtctggcacctcagcctccctggccatcagtgggctccggtccgaggatgaggctgattattactgtgcagcatgggatgacagcctgagtgtgtgttatgtcttcggaactgggaccaaggtcaccgtcctaggtcagcccaaggccaaccccactgtcactctgttcccgccctcctctgaggagctccaagccaacaaggccacactagtgtgtctgatcagtgacttctacccgggagctgtgacagtggcctggaaggcagatggcagccccgtcaaggcgggagtggagaccaccaaaccctccaaacagagcaacaacaagtacgcggccagcagctacctgagcctgacgcccgagcagtggaagtcccacagaagctacagctgccaggtcacgcatgaagggagcaccgtggagaagacagtggcccctacagaatgttcataggttcccaactctaaccccacccacgggagcctggagctgcaggatcccaggggaggggtctctctccccatcccaagtcatccagcccttctccctgcactcatgaaaccccaataaatatcctcattgacaaccag

SEQ ID NO: 29079 - protein, 236 aa, Homo sapiens
MAGFPLLLTLLTHCAGSWAQSVLTQPPSASGTPGQRVTISCSGSSSNIGSNYVYWYQQLPGTAPKLLIYSNNQRPSGVPDRFSGSKSGTSASLAISGLRSEDEADYYCAAWDDSLSVCYVFGTGTKVTVLGQPKANPTVTLFPPSSEELQANKATLVCLISDFYPGAVTVAWKADGSPVKAGVETTKPSKQSNNKYAASSYLSLTPEQWKSHRSYSCQVTHEGSTVEKTVAPTECS

SEQ ID NO: 29080 - DNA, 1175 bp, Homo sapiens
cagcttcagctgtggtagagaagacaggattcaggacaatctccagcatggccggcttccctctcctcctcaccctcctcactcactgtgcagggtcctgggcccagtctgtgctgactcagccaccctcagcgtctgggacccccgggcagagggtcaccatctcttgttctggaagcagctccaacatcggaagtaattatgtatactggtaccagcagctcccaggaacggcccccaaactcctcatctatagtaataatcagcggccctcaggggtccctgaccgattctctggctccaagtctggcacctcagcctccctggccatcagtgggctccggtccgaggatgaggctgattattactgtgcagcatgggatgacagcctgagtgtgtgttatgtcttcggaactgggaccaaggtcaccgtcctaggtcagcccaaggccaaccccactgtcactctgttcccgccctcctctgaggagctccaagccaacaaggccacactagtgtgtctgatcagtgacttctacccgggagctgtgacagtggcctggaaggcagatggcagccccgtcaaggcgggagtggagaccaccaaaccctccaaacagagcaacaacaagtacgcggccagcagctacctgagcctgacgcccgagcagtggaagtcccacagaagctacagctgccaggtcacgcatgaagggagcaccgtggagaagacagtggcccctacagaatgttcataggttcccaactctaaccccacccacgggagcctggagctgcaggatcccaggggaggggtctctctccccatcccaagtcatccagcccttctccctgcactcatgaaaccccaataaatatcctcattgacaaccagaaatcttgttttatctcattttttttctcacataaattgctagcctccccggggttctcagtgtggggtacagggaattctgcacccagtgtgaaaatcacccaagggaggaggctcacagcctccctgagtcatctccccagagggtccttcctctcccagtcaccccttctccaactctccactgtacccctgagctaccagtctggcatcagttcagaccagtcccacaccctcctaaattttacttctcaataaatacctgatcatgtaaaacgca

SEQ ID NO: 29081 - protein, 236 aa, Homo sapiens; identical to SEQ ID NO: 29079

SEQ ID NO: 29082 - DNA, 898 bp, Homo sapiens
cagcttcagctgtggtagagaagacaggattcaggacaatctccagcatggccggcttccctctcctcctcaccctcctcactcactgtgcagggtcctgggcccagtctgtgctgactcagccaccctcagcgtctgggacccccgggcagagggtcaccatctcttgttctggaagcagctccaacatcggaagtaattatgtatactggtaccagcagctcccaggaacggcccccaaactcctcatctatagtaataatcagcggccctcaggggtccctgaccgattctctggctccaagtctggcacctcagcctccctggccatcagtgggctccggtccgaggatgaggctgattattactgtgcagcatgggatgacagcctgagtgtgtgtggtattcggcggagggaccaagctgaccgtcctaggtcagcccaaggctgccccctcggtcactctgttcccgccctcctctgaggagcttcaagccaacaaggccacactggtgtgtctcataagtgacttctacccgggagccgtgacagtggcctggaaggcagatagcagccccgtcaaggcgggagtggagaccaccacaccctccaaacaaagcaacaacaagtacgcggccagcagctatctgagcctgacgcctgagcagtggaagtcccacagaagctacagctgccaggtcacgcatgaagggagcaccgtggagaagacagtggcccctacagaatgttcataggttctcaaccctcaccccccaccacgggagactagagctgcaggatcccaggggaggggtctctcctcccaccccaaggcatcaagcccttctccctgcactcaataaaccctcaataaatattctcattgtcaatcagaaa

SEQ ID NO: 29083 - protein, 145 aa, Homo sapiens
MAGFPLLLTLLTHCAGSWAQSVLTQPPSASGTPGQRVTISCSGSSSNIGSNYVYWYQQLPGTAPKLLIYSNNQRPSGVPDRFSGSKSGTSASLAISGLRSEDEADYYCAAWDDSLSVCGIRRRDQADRPRSAQGCPLGHSVPALL

SEQ ID NO: 29084 - DNA, 858 bp, Homo sapiens
cagcttcagctgtggtagagaagacaggattcaggacaatctccagcatggccggcttccctctcctcctcaccctcctcactcactgtgcagggtcctgggcccagtctgtgctgactcagccaccctcagcgtctgggacccccgggcagagggtcaccatctcttgttctggaagcagctccaacatcggaagtaattatgtatactggtaccagcagctcccaggaacggcccccaaactcctcatctatagtaataatcagcggccctcaggggtccctgaccgattctctggctccaagtctggcacctcagcctccctggccatcagtgggctccggtccgaggatgaggctgattattactgtgcagcatgggatgacagcctgagtggtcagcccaaggctgccccctcggtcactctgttcccgccctcctctgaggagcttcaagccaacaaggccacactggtgtgtctcataagtgacttctacccgggagccgtgacagtggcctggaaggcagatagcagccccgtcaaggcgggagtggagaccaccacaccctccaaacaaagcaacaacaagtacgcggccagcagctatctgagcctgacgcctgagcagtggaagtcccacagaagctacagctgccaggtcacgcatgaagggagcaccgtggagaagacagtggcccctacagaatgttcataggttctcaaccctcaccccccaccacgggagactagagctgcaggatcccaggggaggggtctctcctcccaccccaaggcatcaagcccttctccctgcactcaataaaccctcaataaatattctcattgtcaatcagaaa

SEQ ID NO: 29085 - protein, 222 aa, Homo sapiens
MAGFPLLLTLLTHCAGSWAQSVLTQPPSASGTPGQRVTISCSGSSSNIGSNYVYWYQQLPGTAPKLLIYSNNQRPSGVPDRFSGSKSGTSASLAISGLRSEDEADYYCAAWDDSLSGQPKAAPSVTLFPPSSEELQANKATLVCLISDFYPGAVTVAWKADSSPVKAGVETTTPSKQSNNKYAASSYLSLTPEQWKSHRSYSCQVTHEGSTVEKTVAPTECS

SEQ ID NO: 29086 - DNA, 897 bp, Homo sapiens
cagcttcagctgtggtagagaagacaggattcaggacaatctccagcatggccggcttccctctcctcctcaccctcctcactcactgtgcagggtcctgggcccagtctgtgctgactcagccaccctcagcgtctgggacccccgggcagagggtcaccatctcttgttctggaagcagctccaacatcggaagtaattatgtatactggtaccagcagctcccaggaacggcccccaaactcctcatctatagtaataatcagcggccctcaggggtccctgaccgattctctggctccaagtctggcacctcagcctccctggccatcagtgggctccggtccgaggatgaggctgattattactgtgcagcatgggatgacagcctgagtgtgtgtggtattcggcggagggaccaagctgaccgtcctaggtcagcccaaggctgccccctcggtcactctgttcccgccctcctctgaggagagcttcaagccaacaaggccacactggtgtgtctcataagtgacttctacccgggagccgtgacagtggcctggaaggcagatagcagccccgtcaaggcgggagtggagaccaccacaccctccaaacaaagcaacaacaagtacgcggccagcagctacctgagcctgacgcctgagcagtggaagtcccacagaagctacagctgccaggtcacgcatgaagggagcaccgtggagaagacagtggcccctacagaatgttcataggttctcaaccctcaccccccaccacgggagactagagctgcaggatcccaggggaggggtctctcctcccaccccaaggcatcaagcccttctccctgcactcaataaaccctcaataaatattctcattgtcaatcag

SEQ ID NO: 29087 - protein, 145 aa, Homo sapiens; identical to SEQ ID NO: 29083

SEQ ID NO: 29088 - DNA, 1173 bp, Homo sapiens
cagcttcagctgtggtagagaagacaggattcaggacaatctccagcatggccggcttccctctcctcctcaccctcctcactcactgtgcagggtcctgggcccagtctgtgctgactcagccaccctcagcgtctgggacccccgggcagagggtcaccatctcttgttctggaagcagctccaacatcggaagtaattatgtatactggtaccagcagctcccaggaacggcccccaaactcctcatctatagtaataatcagcggccctcaggggtccctgaccgattctctggctccaagtctggcacctcagcctccctggccatcagtgggctccggtccgaggatgaggctgattattactgtgcagcatgggatgacagcctgagtgtgtgtggtattcggcggagggaccaagctgaccgtcctaggtcagcccaaggctgccccctcggtcactctgttcccgccctcctctgaggagagcttcaagccaacaaggccacactggtgtgtctcataagtgacttctacccgggagccgtgacagtggcctggaaggcagatagcagccccgtcaaggcgggagtggagaccaccacaccctccaaacaaagcaacaacaagtacgcggccagcagctacctgagcctgacgcctgagcagtggaagtcccacagaagctacagctgccaggtcacgcatgaagggagcaccgtggagaagacagtggcccctacagaatgttcataggttctcaaccctcaccccccaccacgggagactagagctgcaggatcccaggggaggggtctctcctcccaccccaaggcatcaagcccttctccctgcactcaataaaccctcaataaatattctcattgtcaatcagaaatcttgttttatctcattttttcttttctcacatataattcctagccttccctgggttctcaatttatggtggagggaattctgcacccagtgggaaagtcacccaagggaggaggcttacagcctccccgagtcatctctctggaaggtccttcctcttccagtcaccccttccccaactctccaccatacccctgagcctccagcctggcctcagctcagaccagtcccacaccctcctcaattttacttctcaataaagacctgatcatgt

SEQ ID NO: 29089 - protein, 145 aa, Homo sapiens; identical to SEQ ID NO: 29083

SEQ ID NO: 29090 - DNA, 895 bp, Homo sapiens
agccccagctctggcaccaggggtcccttccaatatcagcaccatggcctggactcctctctttctgttcctcctcacttgctgcccagggtccaattcccaggctgtggtgactcaggagccctcactgactgtgtccccaggagggacagtcactctcacctgtggctccagcactggagctgtcaccagtggtcattatccctactggttccagcagaagcctggccaagcccccaggacactgatttatgatacaagcaacaaacactcctggacacctgcccggttctcaggctccctccttgggggcaaagctgccctgacccttttgggtgcgcagcctgaggatgaggctgagtattactgcttgctctcctatagtggtgctcgtgtgtggtattcggcggagggaccaagctgaccgtcctaggtcagcccaaggctgccccctcggtcactctgttcccgccctcctctgaggagcttcaagccaacaaggccacactggtgtgtctcataagtgacttctacccgggagccgtgacagtggcctggaaggcagatagcagccccgtcaaggcgggagtggagaccaccacaccctccaaacaaagcaacaacaagtacgcggccagcagctatctgagcctgacgcctgagcagtggaagtcccacagaagctacagctgccaggtcacgcatgaagggagcaccgtggagaagacagtggcccctacagaatgttcataggttctcaaccctcaccccccaccacgggagactagagctgcaggatcccaggggaggggtctctcctcccaccccaaggcatcaagcccttctccctgcactcaataaaccctcaataaatattctcattgtcaatcagaaa

SEQ ID NO: 29091 - protein, 126 aa, Homo sapiens
MAWTPLFLFLLTCCPGSNSQAVVTQEPSLTVSPGGTVTLTCGSSTGAVTSGHYPYWFQQKPGQAPRTLIYDTSNKHSWTPARFSGSLLGGKAALTLLGAQPEDEAEYYCLLSYSGARVWYSAEGPS

SEQ ID NO: 29092 - DNA, 880 bp, Homo sapiens
ggcaccaggggtcccttccaatatcagcaccatggcctggactcctctctttctgttcctcctcacttgctgcccagggtccaattcccaggctgtggtgactcaggagccctcactgactgtgtccccaggagggacagtcactctcacctgtggctccagcactggagctgtcaccagtggtcattatccctactggttccagcagaagcctggccaagcccccaggacactgatttatgatacaagcaacaaacactcctggacacctgcccggttctcaggctccctccttgggggcaaagctgccctgacccttttgggtgcgcagcctgaggatgaggctgagtattactgcttgctctcctatagtggtgctcggcacaggtgttcggcggagggaccaagctgaccgtcctaggtcagcccaaggctgccccctcggtcactctgttcccgccctcctctgaggagcttcaagccaacaaggccacactggtgtgtctcataagtgacttctacccgggagccgtgacagtggcctggaaggcagatagcagccccgtcaaggcgggagtggagaccaccacaccctccaaacaaagcaacaacaagtacgcggccagcagctacctgagcctgacgcctgagcagtggaagtcccacagaagctacagctgccaggtcacgcatgaagggagcaccgtggagaagacagtggcccctacagaatgttcataggttctcaaccctcaccccccaccacgggagactagagctgcaggatcccaggggaggggtctctcctcccaccccaaggcatcaagcccttctccctgcactcaataaaccctcaataaatattctcattgtcaatcag

SEQ ID NO: 29093 - protein, 126 aa, Homo sapiens
MAWTPLFLFLLTCCPGSNSQAVVTQEPSLTVSPGGTVTLTCGSSTGAVTSGHYPYWFQQKPGQAPRTLIYDTSNKHSWTPARFSGSLLGGKAALTLLGAQPEDEAEYYCLLSYSGARHRCSAEGPS

SEQ ID NO: 29094 - DNA, 1156 bp, Homo sapiens
ggcaccaggggtcccttccaatatcagcaccatggcctggactcctctctttctgttcctcctcacttgctgcccagggtccaattcccaggctgtggtgactcaggagccctcactgactgtgtccccaggagggacagtcactctcacctgtggctccagcactggagctgtcaccagtggtcattatccctactggttccagcagaagcctggccaagcccccaggacactgatttatgatacaagcaacaaacactcctggacacctgcccggttctcaggctccctccttgggggcaaagctgccctgacccttttgggtgcgcagcctgaggatgaggctgagtattactgcttgctctcctatagtggtgctcggcacaggtgttcggcggagggaccaagctgaccgtcctaggtcagcccaaggctgccccctcggtcactctgttcccgccctcctctgaggagcttcaagccaacaaggccacactggtgtgtctcataagtgacttctacccgggagccgtgacagtggcctggaaggcagatagcagccccgtcaaggcgggagtggagaccaccacaccctccaaacaaagcaacaacaagtacgcggccagcagctacctgagcctgacgcctgagcagtggaagtcccacagaagctacagctgccaggtcacgcatgaagggagcaccgtggagaagacagtggcccctacagaatgttcataggttctcaaccctcaccccccaccacgggagactagagctgcaggatcccaggggaggggtctctcctcccaccccaaggcatcaagcccttctccctgcactcaataaaccctcaataaatattctcattgtcaatcagaaatcttgttttatctcattttttcttttctcacatataattcctagccttccctgggttctcaatttatggtggagggaattctgcacccagtgggaaagtcacccaagggaggaggcttacagcctccccgagtcatctctctggaaggtccttcctcttccagtcaccccttccccaactctccaccatacccctgagcctccagcctggcctcagctcagaccagtcccacaccctcctcaattttacttctcaataaagacctgatcatgt

SEQ ID NO: 29095 - protein, 126 aa, Homo sapiens; identical to SEQ ID NO: 29093

SEQ ID NO: 29096 - DNA, 893 bp, Homo sapiens
actgcgggggtaagaggttgtgtccaccatggcctggactcctctcctcctcctgttcctctctcactgcacaggttccctctcgcaggctgtgctgactcagccgtcttccctctctgcatctcctggagcatcagccagtctcacctgcaccttgcgcagtggcatcaatgttggtacctacaggatatactggtaccagcagaagccagggagtcctccccagtatctcctgaggtacaaatcagactcagataagcagcagggctctggagtccccagccgcttctctggatccaaagatgcttcggccaatgcagggattttactcatctctgggctccagtctgaggatgaggctgactattactgtatgatttggcacagcagctgtgtggtattcggcggagggaccaagctgaccgtcctaggtcagcccaaggctgccccctcggtcactctgttcccgccctcctctgaggagcttcaagccaacaaggccacactggtgtgtctcataagtgacttctacccgggagccgtgacagtggcctggaaggcagatagcagccccgtcaaggcgggagtggagaccaccacaccctccaaacaaagcaacaacaagtacgcggccagcagctatctgagcctgacgcctgagcagtggaagtcccacagaagctacagctgccaggtcacgcatgaagggagcaccgtggagaagacagtggcccctacagaatgttcataggttctcaaccctcaccccccaccacgggagactagagctgcaggatcccaggggaggggtctctcctcccaccccaaggcatcaagcccttctccctgcactcaataaaccctcaataaatattctcattgtcaatcagaaa

SEQ ID NO: 29097 - protein, 240 aa, Homo sapiens
MAWTPLLLLFLSHCTGSLSQAVLTQPSSLSASPGASASLTCTLRSGINVGTYRIYWYQQKPGSPPQYLLRYKSDSDKQQGSGVPSRFSGSKDASANAGILLISGLQSEDEADYYCMIWHSSCVVFGGGTKLTVLGQPKAAPSVTLFPPSSEELQANKATLVCLISDFYPGAVTVAWKADSSPVKAGVETTTPSKQSNNKYAASSYLSLTPEQWKSHRSYSCQVTHEGSTVEKTVAPTECS

SEQ ID NO: 29098 - DNA, 890 bp, Homo sapiens
actgcgggggtaagaggttgtgtccaccatggcctggactcctctcctcctcctgttcctctctcactgcacaggttccctctcgcaggctgtgctgactcagccgtcttccctctctgcatctcctggagcatcagccagtctcacctgcaccttgcgcagtggcatcaatgttggtacctacaggatatactggtaccagcagaagccagggagtcctccccagtatctcctgaggtacaaatcagactcagataagcagcagggctctggagtccccagccgcttctctggatccaaagatgcttcggccaatgcagggattttactcatctctgggctccagtctgaggatgaggctgactattactgtatgatttggcacagcagctgttgggtgttcggcggagggaccaagctgaccgtcctaggtcagcccaaggctgccccctcggtcactctgttcccgccctcctctgaggagcttcaagccaacaaggccacactggtgtgtctcataagtgacttctacccgggagccgtgacagtggcctggaaggcagatagcagccccgtcaaggcgggagtggagaccaccacaccctccaaacaaagcaacaacaagtacgcggccagcagctacctgagcctgacgcctgagcagtggaagtcccacagaagctacagctgccaggtcacgcatgaagggagcaccgtggagaagacagtggcccctacagaatgttcataggttctcaaccctcaccccccaccacgggagactagagctgcaggatcccaggggaggggtctctcctcccaccccaaggcatcaagcccttctccctgcactcaataaaccctcaataaatattctcattgtcaatcag

SEQ ID NO: 29099 - protein, 240 aa, Homo sapiens
MAWTPLLLLFLSHCTGSLSQAVLTQPSSLSASPGASASLTCTLRSGINVGTYRIYWYQQKPGSPPQYLLRYKSDSDKQQGSGVPSRFSGSKDASANAGILLISGLQSEDEADYYCMIWHSSCWVFGGGTKLTVLGQPKAAPSVTLFPPSSEELQANKATLVCLISDFYPGAVTVAWKADSSPVKAGVETTTPSKQSNNKYAASSYLSLTPEQWKSHRSYSCQVTHEGSTVEKTVAPTECS

SEQ ID NO: 29100 - DNA, 1166 bp, Homo sapiens
actgcgggggtaagaggttgtgtccaccatggcctggactcctctcctcctcctgttcctctctcactgcacaggttccctctcgcaggctgtgctgactcagccgtcttccctctctgcatctcctggagcatcagccagtctcacctgcaccttgcgcagtggcatcaatgttggtacctacaggatatactggtaccagcagaagccagggagtcctccccagtatctcctgaggtacaaatcagactcagataagcagcagggctctggagtccccagccgcttctctggatccaaagatgcttcggccaatgcagggattttactcatctctgggctccagtctgaggatgaggctgactattactgtatgatttggcacagcagctgttgggtgttcggcggagggaccaagctgaccgtcctaggtcagcccaaggctgccccctcggtcactctgttcccgccctcctctgaggagcttcaagccaacaaggccacactggtgtgtctcataagtgacttctacccgggagccgtgacagtggcctggaaggcagatagcagccccgtcaaggcgggagtggagaccaccacaccctccaaacaaagcaacaacaagtacgcggccagcagctacctgagcctgacgcctgagcagtggaagtcccacagaagctacagctgccaggtcacgcatgaagggagcaccgtggagaagacagtggcccctacagaatgttcataggttctcaaccctcaccccccaccacgggagactagagctgcaggatcccaggggaggggtctctcctcccaccccaaggcatcaagcccttctccctgcactcaataaaccctcaataaatattctcattgtcaatcagaaatcttgttttatctcattttttcttttctcacatataattcctagccttccctgggttctcaatttatggtggagggaattctgcacccagtgggaaagtcacccaagggaggaggcttacagcctccccgagtcatctctctggaaggtccttcctcttccagtcaccccttccccaactctccaccatacccctgagcctccagcctggcctcagctcagaccagtcccacaccctcctcaattttacttctcaataaagacctgatcatgt

SEQ ID NO: 29101 - protein, 240 aa, Homo sapiens; identical to SEQ ID NO: 29099

SEQ ID NO: 29102 - DNA, 875 bp, Homo sapiens
gaggttgtgtccaccatggcctggactcctctcctcctcctgttcctctctcactgcacaggttccctctcgcaggctgtgctgactcagccgtcttccctctctgcatctcctggagcatcagccagtctcacctgcaccttgcgcagtggcatcaatgttggtacctacaggatatactggtaccagcagaagccagggagtcctccccagtatctcctgaggtacaaatcagactcagataagcagcagggctctggagtccccagccgcttctctggatccaaagatgcttcggccaatgcagggattttactcatctctgggctccagtctgaggatgaggctgactattactgtatgatttggcacagcagcgcttatgtcttcggaactgggaccaaggtcaccgtcctaggtcagcccaaggccaaccccactgtcactctgttcccgccctcctctgaggagctccaagccaacaaggccacactagtgtgtctgatcagtgacttctacccgggagctgtgacagtggcctggaaggcagatggcagccccgtcaaggcgggagtggagaccaccaaaccctccaaacagagcaacaacaagtacgcggccagcagctacctgagcctgacgcccgagcagtggaagtcccacagaagctacagctgccaggtcacgcatgaagggagcaccgtggagaagacagtggcccctacagaatgttcataggttcccaactctaaccccacccacgggagcctggagctgcaggatcccaggggaggggtctctctccccatcccaagtcatccagcccttctccctgcactcatgaaaccccaataaatatcctcattgacaaccag

SEQ ID NO: 29103 - protein, 240 aa, Homo sapiens
MAWTPLLLLFLSHCTGSLSQAVLTQPSSLSASPGASASLTCTLRSGINVGTYRIYWYQQKPGSPPQYLLRYKSDSDKQQGSGVPSRFSGSKDASANAGILLISGLQSEDEADYYCMIWHSSAYVFGTGTKVTVLGQPKANPTVTLFPPSSEELQANKATLVCLISDFYPGAVTVAWKADGSPVKAGVETTKPSKQSNNKYAASSYLSLTPEQWKSHRSYSCQVTHEGSTVEKTVAPTECS

SEQ ID NO: 29104 - DNA, 1155 bp, Homo sapiens
gaggttgtgtccaccatggcctggactcctctcctcctcctgttcctctctcactgcacaggttccctctcgcaggctgtgctgactcagccgtcttccctctctgcatctcctggagcatcagccagtctcacctgcaccttgcgcagtggcatcaatgttggtacctacaggatatactggtaccagcagaagccagggagtcctccccagtatctcctgaggtacaaatcagactcagataagcagcagggctctggagtccccagccgcttctctggatccaaagatgcttcggccaatgcagggattttactcatctctgggctccagtctgaggatgaggctgactattactgtatgatttggcacagcagcgcttatgtcttcggaactgggaccaaggtcaccgtcctaggtcagcccaaggccaaccccactgtcactctgttcccgccctcctctgaggagctccaagccaacaaggccacactagtgtgtctgatcagtgacttctacccgggagctgtgacagtggcctggaaggcagatggcagccccgtcaaggcgggagtggagaccaccaaaccctccaaacagagcaacaacaagtacgcggccagcagctacctgagcctgacgcccgagcagtggaagtcccacagaagctacagctgccaggtcacgcatgaagggagcaccgtggagaagacagtggcccctacagaatgttcataggttcccaactctaaccccacccacgggagcctggagctgcaggatcccaggggaggggtctctctccccatcccaagtcatccagcccttctccctgcactcatgaaaccccaataaatatcctcattgacaaccagaaatcttgttttatctcattttttttctcacataaattgctagcctccccggggttctcagtgtggggtacagggaattctgcacccagtgtgaaaatcacccaagggaggaggctcacagcctccctgagtcatctccccagagggtccttcctctcccagtcaccccttctccaactctccactgtacccctgagctaccagtctggcatcagttcagaccagtcccacaccctcctaaattttacttctcaataaatacctgatcatgtaaaacgca

SEQ ID NO: 29105 - protein, 240 aa, Homo sapiens; identical to SEQ ID NO: 29103

SEQ ID NO: 29106 - DNA, 965 bp, Homo sapiens
ctgatttgcatggatggactctccccctctcagagtatgaagagagggagagatctgggggaagctcagcttcagctgtgggtagagaagacaggactcaggacaatctccagcatggccagcttccctctcctcctcaccctcctcactcactgtgcagggtcctgggcccagtctgtgctgactcagccaccctcagcgtctgggacccccgggcagagggtcaccatctcttgttctggaagcagctccaacatcggaagtaatactgtaaactggtaccagcagctcccaggaacggcccccaaactcctcatctatagtaataatcagcggccctcaggggtccctgaccgattctctggctccaagtctggcacctcagcctccctggccatcagtgggctccagtctgaggatgaggctgattattactgtgcagcatgggatgacagcctgaatgtgtgtggtattcggcggagggaccaagctgaccgtcctaggtcagcccaaggctgccccctcggtcactctgttcccgccctcctctgaggagcttcaagccaacaaggccacactggtgtgtctcataagtgacttctacccgggagccgtgacagtggcctggaaggcagatagcagccccgtcaaggcgggagtggagaccaccacaccctccaaacaaagcaacaacaagtacgcggccagcagctatctgagcctgacgcctgagcagtggaagtcccacagaagctacagctgccaggtcacgcatgaagggagcaccgtggagaagacagtggcccctacagaatgttcataggttctcaaccctcaccccccaccacgggagactagagctgcaggatcccaggggaggggtctctcctcccaccccaaggcatcaagcccttctccctgcactcaataaaccctcaataaatattctcattgtcaatcagaaa

SEQ ID NO: 29107 - protein, 180 aa, Homo sapiens
MDGLSPSQSMKRGRDLGEAQLQLWVEKTGLRTISSMASFPLLLTLLTHCAGSWAQSVLTQPPSASGTPGQRVTISCSGSSSNIGSNTVNWYQQLPGTAPKLLIYSNNQRPSGVPDRFSGSKSGTSASLAISGLQSEDEADYYCAAWDDSLNVCGIRRRDQADRPRSAQGCPLGHSVPALL

SEQ ID NO: 29108 - DNA, 960 bp, Homo sapiens
gatttgcatggatggactctccccctctcagagtatgaagagagggagagatctgggggaagctcagcttcagctgtgggtagagaagacaggactcaggacaatctccagcatggccagcttccctctcctcctcaccctcctcactcactgtgcagggtcctgggcccagtctgtgctgactcagccaccctcagcgtctgggacccccgggcagagggtcaccatctcttgttctggaagcagctccaacatcggaagtaatactgtaaactggtaccagcagctcccaggaacggcccccaaactcctcatctatagtaataatcagcggccctcaggggtccctgaccgattctctggctccaagtctggcacctcagcctccctggccatcagtgggctccagtctgaggatgaggctgattattactgtgcagcatgggatgacagcctgaatgtgtgttatgtcttcggaactgggaccaaggtcaccgtcctaggtcagcccaaggccaaccccactgtcactctgttcccgccctcctctgaggagctccaagccaacaaggccacactagtgtgtctgatcagtgacttctacccgggagctgtgacagtggcctggaaggcagatggcagccccgtcaaggcgggagtggagaccaccaaaccctccaaacagagcaacaacaagtacgcggccagcagctacctgagcctgacgcccgagcagtggaagtcccacagaagctacagctgccaggtcacgcatgaagggagcaccgtggagaagacagtggcccctacagaatgttcataggttcccaactctaaccccacccacgggagcctggagctgcaggatcccaggggaggggtctctctccccatcccaagtcatccagcccttctccctgcactcatgaaaccccaataaatatcctcattgacaaccag

SEQ ID NO: 29109 - protein, 271 aa, Homo sapiens [sequence omitted]

SEQ ID NO: 29110 - DNA, 1240 bp, Homo sapiens
gatttgcatggatggactctccccctctcagagtatgaagagagggagagatctgggggaagctcagcttcagctgtgggtagagaagacaggactcaggacaatctccagcatggccagcttccctctcctcctcaccctcctcactcactgtgcagggtcctgggcccagtctgtgctgactcagccaccctcagcgtctgggacccccgggcagagggtcaccatctcttgttctggaagcagctccaacatcggaagtaatactgtaaactggtaccagcagctcccaggaacggcccccaaactcctcatctatagtaataatcagcggccctcaggggtccctgaccgattctctggctccaagtctggcacctcagcctccctggccatcagtgggctccagtctgaggatgaggctgattattactgtgcagcatgggatgacagcctgaatgtgtgttatgtcttcggaactgggaccaaggtcaccgtcctaggtcagcccaaggccaaccccactgtcactctgttcccgccctcctctgaggagctccaagccaacaaggccacactagtgtgtctgatcagtgacttctacccgggagctgtgacagtggcctggaaggcagatggcagccccgtcaaggcgggagtggagaccaccaaaccctccaaacagagcaacaacaagtacgcggccagcagctacctgagcctgacgcccgagcagtggaagtcccacagaagctacagctgccaggtcacgcatgaagggagcaccgtggagaagacagtggcccctacagaatgttcataggttcccaactctaaccccacccacgggagcctggagctgcaggatcccaggggaggggtctctctccccatcccaagtcatccagcccttctccctgcactcatgaaaccccaataaatatcctcattgacaaccagaaatcttgttttatctcattttttttctcacataaattgctagcctccccggggttctcagtgtggggtacagggaattctgcacccagtgtgaaaatcacccaagggaggaggctcacagcctccctgagtcatctccccagagggtccttcctctcccagtcaccccttctccaactctccactgtacccctgagctaccagtctggcatcagttcagaccagtcccacaccctcctaaattttacttctcaataaatacctgatcatgtaaaacgca

SEQ ID NO: 29111 - protein, 271 aa, Homo sapiens [sequence omitted]

SEQ ID NO: 29112 - DNA, 960 bp, Homo sapiens
gatttgcatggatggactctccccctctcagagtatgaagagagggagagatctgggggaagctcagcttcagctgtgggtagagaagacaggactcaggacaatctccagcatggccagcttccctctcctcctcaccctcctcactcactgtgcagggtcctgggcccagtctgtgctgactcagccaccctcagcgtctgggacccccgggcagagggtcaccatctcttgttctggaagcagctccaacatcggaagtaatactgtaaactggtaccagcagctcccaggaacggcccccaaactcctcatctatagtaataatcagcggccctcaggggtccctgaccgattctctggctccaagtctggcacctcagcctccctggccatcagtgggctccagtctgaggatgaggctgattattactgtgcagcatgggatgacagcctgaatgtgttgggtgttcggcggagggaccaagctgaccgtcctaggtcagcccaaggctgccccctcggtcactctgttcccgccctcctctgaggagcttcaagccaacaaggccacactggtgtgtctcataagtgacttctacccgggagccgtgacagtggcctggaaggcagatagcagccccgtcaaggcgggagtggagaccaccacaccctccaaacaaagcaacaacaagtacgcggccagcagctacctgagcctgacgcctgagcagtggaagtcccacagaagctacagctgccaggtcacgcatgaagggagcaccgtggagaagacagtggcccctacagaatgttcataggttctcaaccctcaccccccaccacgggagactagagctgcaggatcccaggggaggggtctctcctcccaccccaaggcatcaagcccttctccctgcactcaataaaccctcaataaatattctcattgtcaatcag

SEQ ID NO: 29113 - protein, 180 aa, Homo sapiens
MDGLSPSQSMKRGRDLGEAQLQLWVEKTGLRTISSMASFPLLLTLLTHCAGSWAQSVLTQPPSASGTPGQRVTISCSGSSSNIGSNTVNWYQQLPGTAPKLLIYSNNQRPSGVPDRFSGSKSGTSASLAISGLQSEDEADYYCAAWDDSLNVLGVRRRDQADRPRSAQGCPLGHSVPALL

SEQ ID NO: 29114 - DNA, 1236 bp, Homo sapiens
gatttgcatggatggactctccccctctcagagtatgaagagagggagagatctgggggaagctcagcttcagctgtgggtagagaagacaggactcaggacaatctccagcatggccagcttccctctcctcctcaccctcctcactcactgtgcagggtcctgggcccagtctgtgctgactcagccaccctcagcgtctgggacccccgggcagagggtcaccatctcttgttctggaagcagctccaacatcggaagtaatactgtaaactggtaccagcagctcccaggaacggcccccaaactcctcatctatagtaataatcagcggccctcaggggtccctgaccgattctctggctccaagtctggcacctcagcctccctggccatcagtgggctccagtctgaggatgaggctgattattactgtgcagcatgggatgacagcctgaatgtgttgggtgttcggcggagggaccaagctgaccgtcctaggtcagcccaaggctgccccctcggtcactctgttcccgccctcctctgaggagcttcaagccaacaaggccacactggtgtgtctcataagtgacttctacccgggagccgtgacagtggcctggaaggcagatagcagccccgtcaaggcgggagtggagaccaccacaccctccaaacaaagcaacaacaagtacgcggccagcagctacctgagcctgacgcctgagcagtggaagtcccacagaagctacagctgccaggtcacgcatgaagggagcaccgtggagaagacagtggcccctacagaatgttcataggttctcaaccctcaccccccaccacgggagactagagctgcaggatcccaggggaggggtctctcctcccaccccaaggcatcaagcccttctccctgcactcaataaaccctcaataaatattctcattgtcaatcagaaatcttgttttatctcattttttcttttctcacatataattcctagccttccctgggttctcaatttatggtggagggaattctgcacccagtgggaaagtcacccaagggaggaggcttacagcctccccgagtcatctctctggaaggtccttcctcttccagtcaccccttccccaactctccaccatacccctgagcctccagcctggcctcagctcagaccagtcccacaccctcctcaattttacttctcaataaagacctgatcatgt

SEQ ID NO: 29115 - protein, 180 aa, Homo sapiens; identical to SEQ ID NO: 29113

SEQ ID NO: 29116 - DNA, 483 bp, Homo sapiens
gagaagacaggactcaggacaatctccagcatggccagcttccctctcctcctcaccctcctcactcactgtgcagggtcctgggcccagtctgtgctgactcagccaccctcagcgtctgggacccccgggcagagggtcaccatctcttgttctggaagcaccccgtcaaggcgggagtggagaccaccacaccctccaaacaaagcaacaacaagtacgcggccagcagctacctgagcctgacgcctgagcagtggaagtcccacagaagctacagctgccaggtcacgcatgaagggagcaccgtggagaagacagtggcccctacagaatgttcataggttctcaaccctcaccccccaccacgggagactagagctgcaggatcccaggggaggggtctctcctcccaccccaaggcatcaagcccttctccctgcactcaataaaccctcaataaatattctcattgtcaatcag

SEQ ID NO: 29117 - protein, 69 aa, Homo sapiens
MASFPLLLTLLTHCAGSWAQSVLTQPPSASGTPGQRVTISCSGSTPSRREWRPPHPPNKATTSTRPAAT

SEQ ID NO: 29118 - DNA, 890 bp, Homo sapiens
ctggcgccaggggtcccttccaatatcagcaccatggcctggactcctctctttctgttcctcctcacttgctgcccagggtccaattctcagactgtggtgactcaggagccctcactgactgtgtccccaggagggacagtcactctcacctgtgcttccagcactggagcagtcaccagtggttactatccaaactggttccagcagaaacctggacaagcacccagggcactgatttatagtacaagcaacaaacactcctggacccctgcccggttctcaggctccctccttgggggcaaagctgccctgacactgtcaggtgtgcagcctgaggacgaggctgagtattactgcctgctctactatggtggtgctcagcacatgtgtggtattcggcggagggaccaagctgaccgtcctaggtcagcccaaggctgccccctcggtcactctgttcccgccctcctctgaggagcttcaagccaacaaggccacactggtgtgtctcataagtgacttctacccgggagccgtgacagtggcctggaaggcagatagcagccccgtcaaggcgggagtggagaccaccacaccctccaaacaaagcaacaacaagtacgcggccagcagctatctgagcctgacgcctgagcagtggaagtcccacagaagctacagctgccaggtcacgcatgaagggagcaccgtggagaagacagtggcccctacagaatgttcataggttctcaaccctcaccccccaccacgggagactagagctgcaggatcccaggggaggggtctctcctcccaccccaaggcatcaagcccttctccctgcactcaataaaccctcaataaatattctcattgtcaatcagaaa

SEQ ID NO: 29119 - protein, 147 aa, Homo sapiens
MAWTPLFLFLLTCCPGSNSQTVVTQEPSLTVSPGGTVTLTCASSTGAVTSGYYPNWFQQKPGQAPRALIYSTSNKHSWTPARFSGSLLGGKAALTLSGVQPEDEAEYYCLLYYGGAQHMCGIRRRDQADRPRSAQGCPLGHSVPALL

SEQ ID NO: 29120 - DNA, 865 bp, Homo sapiens
gggtcccttccaatatcagcaccatggcctggactcctctctttctgttcctcctcacttgctgcccagggtccaattctcagactgtggtgactcaggagccctcactgactgtgtccccaggagggacagtcactctcacctgtgcttccagcactggagcagtcaccagtggttactatccaaactggttccagcagaaacctggacaagcacccagggcactgatttatagtacaagcaacaaacactcctggacccctgcccggttctcaggctccctccttgggggcaaagctgccctgacactgtcaggtgtgcagcctgaggacgaggctgagtattactgcctgctctactatggtgtgttgggtgttcggcggagggaccaagctgaccgtcctaggtcagcccaaggctgccccctcggtcactctgttcccgccctcctctgaggagcttcaagccaacaaggccacactggtgtgtctcataagtgacttctacccgggagccgtgacagtggcctggaaggcagatagcagccccgtcaaggcgggagtggagaccaccacaccctccaaacaaagcaacaacaagtacgcggccagcagctacctgagcctgacgcctgagcagtggaagtcccacagaagctacagctgccaggtcacgcatgaagggagcaccgtggagaagacagtggcccctacagaatgttcataggttctcaaccctcaccccccaccacgggagactagagctgcaggatcccaggggaggggtctctcctcccaccccaaggcatcaagcccttctccctgcactcaataaaccctcaataaatattctcattgtcaatcag

SEQ ID NO: 29121 - protein, 143 aa, Homo sapiens
MAWTPLFLFLLTCCPGSNSQTVVTQEPSLTVSPGGTVTLTCASSTGAVTSGYYPNWFQQKPGQAPRALIYSTSNKHSWTPARFSGSLLGGKAALTLSGVQPEDEAEYYCLLYYGVLGVRRRDQADRPRSAQGCPLGHSVPALL

SEQ ID NO: 29122 - DNA, 882 bp, Homo sapiens
gggtcccttccaatatcagcaccatggcctggactcctctctttctgttcctcctcacttgctgcccagggtccaattctcagactgtggtgactcaggagccctcactgactgtgtccccaggagggacagtcactctcacctgtgcttccagcactggagcagtcaccagtggttactatccaaactggttccagcagaaacctggacaagcacccagggcactgatttatagtacaagcaacaaacactcctggacccctgcccggttctcaggctccctccttgggggcaaagctgccctgacactgtcaggtgtgcagcctgaggacgaggctgagtattactgcctgctctactatggtggtgctcagcacatgtgtggtattcggcggagggaccaagctgaccgtcctaggtcagcccaaggctgccccctcggtcactctgttcccgccctcctctgaggagcttcaagccaacaaggccacactggtgtgtctcataagtgacttctacccgggagccgtgacagtggcctggaaggcagatagcagccccgtcaaggcgggagtggagaccaccacaccctccaaacaaagcaacaacaagtacgcggccagcagctatctgagcctgacgcctgagcagtggaagtcccacagaagctacagctgccaggtcacgcatgaagggagcaccgtggagaagacagtgtggcccctacagaatgttcataggttctcaaccctcaccccccaccacgggagactagagctgcaggatcccaggggaggggtctctcctcccaccccaaggcatcaagcccttctccctgcactcaataaaccctcaataaatattctcattgtcaatcagaaa

SEQ ID NO: 29123 - protein, 173 aa, Homo sapiens
MVVLSTCVVFGGGTKLTVLGQPKAAPSVTLFPPSSEELQANKATLVCLISDFYPGAVTVAWKADSSPVKAGVETTTPSKQSNNKYAASSYLSLTPEQWKSHRSYSCQVTHEGSTVEKTVWPLQNVHRFSTLTPHHGRLELQDPRGGVSPPTPRHQALLPALNKPSINILIVNQ

SEQ ID NO: 29124 - DNA, 1141 bp, Homo sapiens
gggtcccttccaatatcagcaccatggcctggactcctctctttctgttcctcctcacttgctgcccagggtccaattctcagactgtggtgactcaggagccctcactgactgtgtccccaggagggacagtcactctcacctgtgcttccagcactggagcagtcaccagtggttactatccaaactggttccagcagaaacctggacaagcacccagggcactgatttatagtacaagcaacaaacactcctggacccctgcccggttctcaggctccctccttgggggcaaagctgccctgacactgtcaggtgtgcagcctgaggacgaggctgagtattactgcctgctctactatggtgtgttgggtgttcggcggagggaccaagctgaccgtcctaggtcagcccaaggctgccccctcggtcactctgttcccgccctcctctgaggagcttcaagccaacaaggccacactggtgtgtctcataagtgacttctacccgggagccgtgacagtggcctggaaggcagatagcagccccgtcaaggcgggagtggagaccaccacaccctccaaacaaagcaacaacaagtacgcggccagcagctacctgagcctgacgcctgagcagtggaagtcccacagaagctacagctgccaggtcacgcatgaagggagcaccgtggagaagacagtggcccctacagaatgttcataggttctcaaccctcaccccccaccacgggagactagagctgcaggatcccaggggaggggtctctcctcccaccccaaggcatcaagcccttctccctgcactcaataaaccctcaataaatattctcattgtcaatcagaaatcttgttttatctcattttttcttttctcacatataattcctagccttccctgggttctcaatttatggtggagggaattctgcacccagtgggaaagtcacccaagggaggaggcttacagcctccccgagtcatctctctggaaggtccttcctcttccagtcaccccttccccaactctccaccatacccctgagcctccagcctggcctcagctcagaccagtcccacaccctcctcaattttacttctcaataaagacctgatcatgt

SEQ ID NO: 29125 - protein, 143 aa, Homo sapiens; identical to SEQ ID NO: 29121

SEQ ID NO: 29126 - DNA, 535 bp, Homo sapiens
gctgctcatggccctctccctgcccaggaatgctcttcctggtggatgccccatcagctcttagggtgagggcagagcgaggagcaggtccacagctacctctcccagttcagccccatcctgggtccagtataatgtgtcccatgtgataagagacttgcagtcatagtcatcgggatcctgtgaccagggatctcacctaggagtctgttctccatcactgaatgccaatctgcgggggatcctggcaaatgactttgcagtgttttgctaaagagcaaaacaagcaaatatgctcagtatttgaagatggaagagttaaaacttcagcttgttttgaccagagtctgtacttaagtgagcctgacacgtggtagcttttaggatcaaccattccaactaggatgtttaggaaagaatactgttcaaaatcgctaatgagtgttttgggcatgtctgaaagatgatagaaattattcatctttgatgtgtaatgaaatctagaatatgatacattaaaaacagtaaactgaag

SEQ ID NO: 29127 - protein, 50 aa, Homo sapiens
MPICGGSWQMTLQCFAKEQNKQICSVFEDGRVKTSACFDQSLYLSEPDTW

SEQ ID NO: 29128 - DNA, 539 bp, Homo sapiens
agtccctgctgcactccagggtctgagaagagacttcgacttggtggcatcacaggggaagaaggaagaagggactacaggagaaccaagggcatatgggcatgacctgaagattcctggtgttcaggtgaagatgtaaggaagtccacgaagtagatacagacttgcagtcatagtcatcgggatcctgtgaccagggatctcacctaggagtctgttctccatcactgaatgccaatctgcgggggatcctggcaaatgactttgcagtgttttgctaaagagcaaaacaagcaaatatgctcagtatttgaagatggaagagttaaaacttcagcttgttttgaccagagtctgtacttaagtgagcctgacacgtggtagcttttaggatcaaccattccaactaggatgtttaggaaagaatactgttcaaaatcgctaatgagtgttttgggcatgtctgaaagatgatagaaattattcatctttgatgtgtaatgaaatctagaatatgatacattaaaaacagtaaactg

SEQ ID NO: 29129 - protein, 50 aa, Homo sapiens; identical to SEQ ID NO: 29127

SEQ ID NO: 29130 - DNA, 943 bp, Homo sapiens
ctcagagtatgaagaggggcagggagagatttggggaggctctgcttcagctgtgggcacaagaggcagcactcaggacaatctccagcatggcctggtctcctctcctcctcactctcctcgctcactgcacagggtcctgggcccagtctgtgctgacgcagccgccctcagtgtctggggccccagggcagagggtcaccatctcctgcactgggagcagctccaacatcggggcaggttatgatgtacactggtaccagcagcttccaggaacagcccccaaactcctcatctatggtaacagcaatcggccctcaggggtccctgaccgattctctggctccaagtctggcacctcagcctccctggccatcactgggctccaggctgaggatgaggctgattattactgccagtcctatgacagcagcctgagtgtgtgtggtattcggcggagggaccaagctgaccgtcctaggtcagcccaaggctgccccctcggtcactctgttcccgccctcctctgaggagcttcaagccaacaaggccacactggtgtgtctcataagtgacttctacccgggagccgtgacagtggcctggaaggcagatagcagccccgtcaaggcgggagtggagaccaccacaccctccaaacaaagcaacaacaagtacgcggccagcagctatctgagcctgacgcctgagcagtggaagtcccacagaagctacagctgccaggtcacgcatgaagggagcaccgtggagaagacagtggcccctacagaatgttcataggttctcaaccctcaccccccaccacgggagactagagctgcaggatcccaggggaggggtctctcctcccaccccaaggcatcaagcccttctccctgcactcaataaaccctcaataaatattctcattgtcaatcagaaa

SEQ ID NO: 29131 - protein, 173 aa, Homo sapiens
MKRGRERFGEALLQLWAQEAALRTISSMAWSPLLLTLLAHCTGSWAQSVLTQPPSVSGAPGQRVTISCTGSSSNIGAGYDVHWYQQLPGTAPKLLIYGNSNRPSGVPDRFSGSKSGTSASLAITGLQAEDEADYYCQSYDSSLSVCGIRRRDQADRPRSAQGCPLGHSVPALL

SEQ ID NO: 29132 - DNA, 908 bp, Homo sapiens
ggggaggctctgcttcagctgtgggcacaagaggcagcactcaggacaatctccagcatggcctggtctcctctcctcctcactctcctcgctcactgcacagggtcctgggcccagtctgtgctgacgcagccgccctcagtgtctggggccccagggcagagggtcaccatctcctgcactgggagcagctccaacatcggggcaggttatgatgtacactggtaccagcagcttccaggaacagcccccaaactcctcatctatggtaacagcaatcggccctcaggggtccctgaccgattctctggctccaagtctggcacctcagcctccctggccatcactgggctccaggctgaggatgaggctgattattactgccagtcctatgacagcagcctgagtgtgttgggtgttcggcggagggaccaagctgaccgtcctaggtcagcccaaggctgccccctcggtcactctgttcccgccctcctctgaggagcttcaagccaacaaggccacactggtgtgtctcataagtgacttctacccgggagccgtgacagtggcctggaaggcagatagcagccccgtcaaggcgggagtggagaccaccacaccctccaaacaaagcaacaacaagtacgcggccagcagctacctgagcctgacgcctgagcagtggaagtcccacagaagctacagctgccaggtcacgcatgaagggagcaccgtggagaagacagtggcccctacagaatgttcataggttctcaaccctcaccccccaccacgggagactagagctgcaggatcccaggggaggggtctctcctcccaccccaaggcatcaagcccttctccctgcactcaataaaccctcaataaatattctcattgtcaatcag

SEQ ID NO: 29133 - protein, 146 aa, Homo sapiens
MAWSPLLLTLLAHCTGSWAQSVLTQPPSVSGAPGQRVTISCTGSSSNIGAGYDVHWYQQLPGTAPKLLIYGNSNRPSGVPDRFSGSKSGTSASLAITGLQAEDEADYYCQSYDSSLSVLGVRRRDQADRPRSAQGCPLGHSVPALL

SEQ ID NO: 29134 - DNA, 1184 bp, Homo sapiens
ggggaggctctgcttcagctgtgggcacaagaggcagcactcaggacaatctccagcatggcctggtctcctctcctcctcactctcctcgctcactgcacagggtcctgggcccagtctgtgctgacgcagccgccctcagtgtctggggccccagggcagagggtcaccatctcctgcactgggagcagctccaacatcggggcaggttatgatgtacactggtaccagcagcttccaggaacagcccccaaactcctcatctatggtaacagcaatcggccctcaggggtccctgaccgattctctggctccaagtctggcacctcagcctccctggccatcactgggctccaggctgaggatgaggctgattattactgccagtcctatgacagcagcctgagtgtgttgggtgttcggcggagggaccaagctgaccgtcctaggtcagcccaaggctgccccctcggtcactctgttcccgccctcctctgaggagcttcaagccaacaaggccacactggtgtgtctcataagtgacttctacccgggagccgtgacagtggcctggaaggcagatagcagccccgtcaaggcgggagtggagaccaccacaccctccaaacaaagcaacaacaagtacgcggccagcagctacctgagcctgacgcctgagcagtggaagtcccacagaagctacagctgccaggtcacgcatgaagggagcaccgtggagaagacagtggcccctacagaatgttcataggttctcaaccctcaccccccaccacgggagactagagctgcaggatcccaggggaggggtctctcctcccaccccaaggcatcaagcccttctccctgcactcaataaaccctcaataaatattctcattgtcaatcagaaatcttgttttatctcattttttcttttctcacatataattcctagccttccctgggttctcaatttatggtggagggaattctgcacccagtgggaaagtcacccaagggaggaggcttacagcctccccgagtcatctctctggaaggtccttcctcttccagtcaccccttccccaactctccaccatacccctgagcctccagcctggcctcagctcagaccagtcccacaccctcctcaattttacttctcaataaagacctgatcatgt

SEQ ID NO: 29135 - protein, 146 aa, Homo sapiens; identical to SEQ ID NO: 29133

SEQ ID NO: 29136 - DNA, 905 bp, Homo sapiens
gggaggctctgcttcagctgtgggcacaagaggcagcactcaggacaatctccagcatggcctggtctcctctcctcctcactctcctcgctcactgcacagggtcctgggcccagtctgtgctgacgcagccgccctcagtgtctggggccccagggcagagggtcaccatctcctgcactgggagcagctccaacatcggggcaggttatgatgtacactggtaccagcagcttccaggaacagcccccaaactcctcatctatggtaacagcaatcggccctcaggggtccctgaccgattctctggctccaagtctggcacctcagcctccctggccatcactgggctccaggctgaggatgaggctgattattactgccagtcctatgacagcagcctgagtgtgttatgtcttcggaactgggaccaaggtcaccgtcctaggtcagcccaaggccaaccccactgtcactctgttcccgccctcctctgaggagctccaagccaacaaggccacactagtgtgtctgatcagtgacttctacccgggagctgtgacagtggcctggaaggcagatggcagccccgtcaaggcgggagtggagaccaccaaaccctccaaacagagcaacaacaagtacgcggccagcagctacctgagcctgacgcccgagcagtggaagtcccacagaagctacagctgccaggtcacgcatgaagggagcaccgtggagaagacagtggcccctacagaatgttcataggttcccaactctaaccccacccacgggagcctggagctgcaggatcccaggggaggggtctctctccccatcccaagtcatccagcccttctccctgcactcatgaaaccccaataaatatcctcattgacaaccag

SEQ ID NO: 29137 - protein, 146 aa, Homo sapiens
MAWSPLLLTLLAHCTGSWAQSVLTQPPSVSGAPGQRVTISCTGSSSNIGAGYDVHWYQQLPGTAPKLLIYGNSNRPSGVPDRFSGSKSGTSASLAITGLQAEDEADYYCQSYDSSLSVLCLRNWDQGHRPRSAQGQPHCHSVPALL

SEQ ID NO: 29138 - DNA, 1185 bp, Homo sapiens
gggaggctctgcttcagctgtgggcacaagaggcagcactcaggacaatctccagcatggcctggtctcctctcctcctcactctcctcgctcactgcacagggtcctgggcccagtctgtgctgacgcagccgccctcagtgtctggggccccagggcagagggtcaccatctcctgcactgggagcagctccaacatcggggcaggttatgatgtacactggtaccagcagcttccaggaacagcccccaaactcctcatctatggtaacagcaatcggccctcaggggtccctgaccgattctctggctccaagtctggcacctcagcctccctggccatcactgggctccaggctgaggatgaggctgattattactgccagtcctatgacagcagcctgagtgtgttatgtcttcggaactgggaccaaggtcaccgtcctaggtcagcccaaggccaaccccactgtcactctgttcccgccctcctctgaggagctccaagccaacaaggccacactagtgtgtctgatcagtgacttctacccgggagctgtgacagtggcctggaaggcagatggcagccccgtcaaggcgggagtggagaccaccaaaccctccaaacagagcaacaacaagtacgcggccagcagctacctgagcctgacgcccgagcagtggaagtcccacagaagctacagctgccaggtcacgcatgaagggagcaccgtggagaagacagtggcccctacagaatgttcataggttcccaactctaaccccacccacgggagcctggagctgcaggatcccaggggaggggtctctctccccatcccaagtcatccagcccttctccctgcactcatgaaaccccaataaatatcctcattgacaaccagaaatcttgttttatctcattttttttctcacataaattgctagcctccccggggttctcagtgtggggtacagggaattctgcacccagtgtgaaaatcacccaagggaggaggctcacagcctccctgagtcatctccccagagggtccttcctctcccagtcaccccttctccaactctccactgtacccctgagctaccagtctggcatcagttcagaccagtcccacaccctcctaaattttacttctcaataaatacctgatcatgtaaaacgca

SEQ ID NO: 29139 - protein, 146 aa, Homo sapiens; identical to SEQ ID NO: 29137

SEQ ID NO: 29140 - DNA, 589 bp, Homo sapiens
ctctcccacttccagggtcctgggcccagtctgtgctgacgcagccgccctcagtgtctggggccccagggcagagggtcaccatctcctgcactgggagcagctccaacatcggggcaggttatgatgtacactggtaccagcagcttccaggaacagcccccaaactcctctgaggagcttcaagccaacaaggccacactggtgtgtctcataagtgacttctacccgggagccgtgacagtggcctggaaggcagatagcagccccgtcaaggcgggagtggagaccaccacaccctccaaacaaagcaacaacaagtacgcggccagcagctatctgagcctgacgcctgagcagtggaagtcccacagaagctacagctgccaggtcacgcatgaagggagcaccgtggagaagacagtggcccctacagaatgttcataggttctcaaccctcaccccccaccacgggagactagagctgcaggatcccaggggaggggtctctcctcccaccccaaggcatcaagcccttctccctgcactcaataaaccctcaataaatattctcattgtcaatcagaaa

SEQ ID NO: 29141 - protein, 107 aa, Homo sapiens
MMYTGTSSFQEQPPNSSEELQANKATLVCLISDFYPGAVTVAWKADSSPVKAGVETTTPSKQSNNKYAASSYLSLTPEQWKSHRSYSCQVTHEGSTVEKTVAPTECS

SEQ ID NO: 29142 - DNA, 275 bp, Homo sapiens
ggctgtgtccaccatggcctggactcctcttcttctcttgctcctctctcactgcacaggttccctctcccagcctgtgctgactcagccaccttcctcctccgcatctcctggagaatccgccagactcacctgcaccttgcccagtgacatcaatgttggtagctacaacatatactggtaccagcagaagccagggagccctcccaggtatctcctgtactactactcagactcagataagggccagggctctggagtccccagccgcttct

SEQ ID NO: 29143 - protein, 86 aa, Homo sapiens
MAWTPLLLLLLSHCTGSLSQPVLTQPPSSSASPGESARLTCTLPSDINVGSYNIYWYQQKPGSPPRYLLYYYSDSDKGQGSGVPSR

SEQ ID NO: 29144 - DNA, 894 bp, Homo sapiens
gcttcagctgcgggtagagaagacaggactcaggacaatctccagcatggcctggtcccctctcttcctcaccctcatcactcactgtgcagggtcctgggcccagtctgtgctgactcagccaccctcggtgtctgaagcccccaggcagagggtcaccatctcctgttctggaagcagctccaacatcggaaataatgctgtaaactggtaccagcagctcccaggaaaggctcccaaactcctcatctattatgatgatctgctgccctcaggggtctctgaccgattctctggctccaagtctggcacctcagcctccctggccatcagtgggctccagtctgaggatgaggctgattattactgtgcagcatgggatgacagcctgaatgtgttgggtgttcggcggagggaccaagctgaccgtcctaggtcagcccaaggctgccccctcggtcactctgttcccgccctcctctgaggagcttcaagccaacaaggccacactggtgtgtctcataagtgacttctacccgggagccgtgacagtggcctggaaggcagatagcagccccgtcaaggcgggagtggagaccaccacaccctccaaacaaagcaacaacaagtacgcggccagcagctacctgagcctgacgcctgagcagtggaagtcccacagaagctacagctgccaggtcacgcatgaagggagcaccgtggagaagacagtggcccctacagaatgttcataggttctcaaccctcaccccccaccacgggagactagagctgcaggatcccaggggaggggtctctcctcccaccccaaggcatcaagcccttctccctgcactcaataaaccctcaataaatattctcattgtcaatcag

SEQ ID NO: 29145 - protein, 145 aa, Homo sapiens
MAWSPLFLTLITHCAGSWAQSVLTQPPSVSEAPRQRVTISCSGSSSNIGNNAVNWYQQLPGKAPKLLIYYDDLLPSGVSDRFSGSKSGTSASLAISGLQSEDEADYYCAAWDDSLNVLGVRRRDQADRPRSAQGCPLGHSVPALL

SEQ ID NO: 29146 - DNA, 1170 bp, Homo sapiens
gcttcagctgcgggtagagaagacaggactcaggacaatctccagcatggcctggtcccctctcttcctcaccctcatcactcactgtgcagggtcctgggcccagtctgtgctgactcagccaccctcggtgtctgaagcccccaggcagagggtcaccatctcctgttctggaagcagctccaacatcggaaataatgctgtaaactggtaccagcagctcccaggaaaggctcccaaactcctcatctattatgatgatctgctgccctcaggggtctctgaccgattctctggctccaagtctggcacctcagcctccctggccatcagtgggctccagtctgaggatgaggctgattattactgtgcagcatgggatgacagcctgaatgtgttgggtgttcggcggagggaccaagctgaccgtcctaggtcagcccaaggctgccccctcggtcactctgttcccgccctcctctgaggagcttcaagccaacaaggccacactggtgtgtctcataagtgacttctacccgggagccgtgacagtggcctggaaggcagatagcagccccgtcaaggcgggagtggagaccaccacaccctccaaacaaagcaacaacaagtacgcggccagcagctacctgagcctgacgcctgagcagtggaagtcccacagaagctacagctgccaggtcacgcatgaagggagcaccgtggagaagacagtggcccctacagaatgttcataggttctcaaccctcaccccccaccacgggagactagagctgcaggatcccaggggaggggtctctcctcccaccccaaggcatcaagcccttctccctgcactcaataaaccctcaataaatattctcattgtcaatcagaaatcttgttttatctcattttttcttttctcacatataattcctagccttccctgggttctcaatttatggtggagggaattctgcacccagtgggaaagtcacccaagggaggaggcttacagcctccccgagtcatctctctggaaggtccttcctcttccagtcaccccttccccaactctccaccatacccctgagcctccagcctggcctcagctcagaccagtcccacaccctcctcaattttacttctcaataaagacctgatcatgt

SEQ ID NO: 29147 - protein, 145 aa, Homo sapiens; identical to SEQ ID NO: 29145

SEQ ID NO: 29148 - DNA, 889 bp, Homo sapiens
tcagctgcgggtagagaagacaggactcaggacaatctccagcatggcctggtcccctctcttcctcaccctcatcactcactgtgcagggtcctgggcccagtctgtgctgactcagccaccctcggtgtctgaagcccccaggcagagggtcaccatctcctgttctggaagcagctccaacatcggaaataatgctgtaaactggtaccagcagctcccaggaaaggctcccaaactcctcatctattatgatgatctgctgccctcaggggtctctgaccgattctctggctccaagtctggcacctcagcctccctggccatcagtgggctccagtctgaggatgaggctgattattactgtgcagcatgggatgacagcctgaatgtgttatgtcttcggaactgggaccaaggtcaccgtcctaggtcagcccaaggccaaccccactgtcactctgttcccgccctcctctgaggagctccaagccaacaaggccacactagtgtgtctgatcagtgacttctacccgggagctgtgacagtggcctggaaggcagatggcagccccgtcaaggcgggagtggagaccaccaaaccctccaaacagagcaacaacaagtacgcggccagcagctacctgagcctgacgcccgagcagtggaagtcccacagaagctacagctgccaggtcacgcatgaagggagcaccgtggagaagacagtggcccctacagaatgttcataggttcccaactctaaccccacccacgggagcctggagctgcaggatcccaggggaggggtctctctccccatcccaagtcatccagcccttctccctgcactcatgaaaccccaataaatatcctcattgacaaccag

SEQ ID NO: 29149 - protein, 145 aa, Homo sapiens
MAWSPLFLTLITHCAGSWAQSVLTQPPSVSEAPRQRVTISCSGSSSNIGNNAVNWYQQLPGKAPKLLIYYDDLLPSGVSDRFSGSKSGTSASLAISGLQSEDEADYYCAAWDDSLNVLCLRNWDQGHRPRSAQGQPHCHSVPALL

SEQ ID NO: 29150 - DNA, 1169 bp, Homo sapiens
tcagctgcgggtagagaagacaggactcaggacaatctccagcatggcctggtcccctctcttcctcaccctcatcactcactgtgcagggtcctgggcccagtctgtgctgactcagccaccctcggtgtctgaagcccccaggcagagggtcaccatctcctgttctggaagcagctccaacatcggaaataatgctgtaaactggtaccagcagctcccaggaaaggctcccaaactcctcatctattatgatgatctgctgccctcaggggtctctgaccgattctctggctccaagtctggcacctcagcctccctggccatcagtgggctccagtctgaggatgaggctgattattactgtgcagcatgggatgacagcctgaatgtgttatgtcttcggaactgggaccaaggtcaccgtcctaggtcagcccaaggccaaccccactgtcactctgttcccgccctcctctgaggagctccaagccaacaaggccacactagtgtgtctgatcagtgacttctacccgggagctgtgacagtggcctggaaggcagatggcagccccgtcaaggcgggagtggagaccaccaaaccctccaaacagagcaacaacaagtacgcggccagcagctacctgagcctgacgcccgagcagtggaagtcccacagaagctacagctgccaggtcacgcatgaagggagcaccgtggagaagacagtggcccctacagaatgttcataggttcccaactctaaccccacccacgggagcctggagctgcaggatcccaggggaggggtctctctccccatcccaagtcatccagcccttctccctgcactcatgaaaccccaataaatatcctcattgacaaccagaaatcttgttttatctcattttttttctcacataaattgctagcctccccggggttctcagtgtggggtacagggaattctgcacccagtgtgaaaatcacccaagggaggaggctcacagcctccctgagtcatctccccagagggtccttcctctcccagtcaccccttctccaactctccactgtacccctgagctaccagtctggcatcagttcagaccagtcccacaccctcctaaattttacttctcaataaatacctgatcatgtaaaacgca

SEQ ID NO: 29151 - protein, 145 aa, Homo sapiens; identical to SEQ ID NO: 29149

SEQ ID NO: 29152 - DNA, 892 bp, Homo sapiens
agctgcgggtagagaagacaggactcaggacaatctccagcatggcctggtcccctctcttcctcaccctcatcactcactgtgcagggtcctgggcccagtctgtgctgactcagccaccctcggtgtctgaagcccccaggcagagggtcaccatctcctgttctggaagcagctccaacatcggaaataatgctgtaaactggtaccagcagctcccaggaaaggctcccaaactcctcatctattatgatgatctgctgccctcaggggtctctgaccgattctctggctccaagtctggcacctcagcctccctggccatcagtgggctccagtctgaggatgaggctgattattactgtgcagcatgggatgacagcctgaatgtgtgtggtattcggcggagggaccaagctgaccgtcctaggtcagcccaaggctgccccctcggtcactctgttcccgccctcctctgaggagcttcaagccaacaaggccacactggtgtgtctcataagtgacttctacccgggagccgtgacagtggcctggaaggcagatagcagccccgtcaaggcgggagtggagaccaccacaccctccaaacaaagcaacaacaagtacgcggccagcagctatctgagcctgacgcctgagcagtggaagtcccacagaagctacagctgccaggtcacgcatgaagggagcaccgtggagaagacagtggcccctacagaatgttcataggttctcaaccctcaccccccaccacgggagactagagctgcaggatcccaggggaggggtctctcctcccaccccaaggcatcaagcccttctccctgcactcaataaaccctcaataaatattctcattgtcaatcagaaa

SEQ ID NO: 29153 - protein, 145 aa, Homo sapiens
MAWSPLFLTLITHCAGSWAQSVLTQPPSVSEAPRQRVTISCSGSSSNIGNNAVNWYQQLPGKAPKLLIYYDDLLPSGVSDRFSGSKSGTSASLAISGLQSEDEADYYCAAWDDSLNVCGIRRRDQADRPRSAQGCPLGHSVPALL

SEQ ID NO: 29154 - DNA, 470 bp, Homo sapiens
cttgaagttgacactcatacttttatctctttcttgaacctctcagatatgcttagaactgaagaagcccgaagttgattgattctgttttttcacctcagccagcaccttcttcttctcctttccaggagaatctgtatttctctgtatttccagaattctctgtatttccagtgaatctgtcagacacaaactaaagaccttttagcactgacaccacccttggagctcccagcacatcagcatcagcctgggatcacattctcatcaaaagctggaaagaaggaaaactcgaaccggcttgggaaggacactatctagtgcttctaactacagaaattgctgtccgcacagctgaaaggggatggacaccccacacacaagtgaaaggagtgattttcacagcgagagaaaaatgggccgtcaccccagggcccacccgcaccaaattaaaaagggctgaataatca

SEQ ID NO: 29155 - protein, 32 aa, Homo sapiens
MDTPHTSERSDFHSERKMGRHPRAHPHQIKKG

SEQ ID NO: 29156 - DNA, 1786 bp, Homo sapiens
gtgcgcgtcggcggcgccgggggcctgaggaggcgtagtcgccgccggctgtgccccgggagcgcctccggggctggtgcgtggccggcagctcgcgaacagcagctgatccggactggctgggaagttcaagatcaagatgctggacgatttggttccttagtgaaggctctcttcctggctggtggatgacagccttcttgctgtgttctcacatgacagaaagaggaagcaaggggctgtttcacagtattctggagtaccttttgagtattggttcctgaacatcagcagtcttggctgcctctgtggactcccggagttgtctccctgcttgtgttctggtgccatcctttgttcctccacccctgaccaaggtgcccagcagcctgtcttcaccagtcaaggaatccgccatcttggctgtagacataggtctggagaaatctctccctttttccttgatttctttttaaaggtaccttatctctccccactcctttcttccctcctcaatctagttaaatttcctaagctttcacaaaaatccgggaagagataattaagagcttagcatccctcttagagtagaaggcagtacagataacaaagaagttgtgagtatattatctacattttagaaaattttctgactctagatccatagattctgttgtatttatttgccggacactcatttgattgatttgcaccttgaacactatactaggtcttttcagttacgttgcttgggttaagacactttgctaaaattacagcctgaatcctttctttagttgaagaaagggtatgtgtgtgcaagtgggtgtgtgtgtgccagtttttcttgtctcaggtagatactcccactgtgtataaatagatctacagacttttcatacttacctcccgtattctgtttctgtggtaaaaatatgaagtgttttagttgtatgttgagtgattggttggtattatcaacactgttgtttgcagtttcattaaagcatgctcttaaggagtacatatggtcattaattgccaactgtagattccagtgatctggcccctgcctacctccttcctctctttttcattctctgtcatgcttctccactgttttccccaatgacgcactattttgacacactggccttgctattccttaagcaaatcacattcttcccaatccaaagactttgcacatgctgttgtctttcttagaatgcccttcccctaggcctgcatggcttgctacctcacttaattgtttgacacttcctttggttcattgagcttcaaggctcttaaaatgccactgacaatgagatctccctttaaaaaaaaaaaaaaacttctacttttcctcttaaaggcactttactctctccccactcttttcttcctcttcaaagtatttaaatttcctaggttttcatgaaaaagctggaaagcgatcagcatcaagggctttgcttctgtcttagaattgagctagcttgagtcaatttctgtgcctgcaaccaaatgaaaattaatatagtgagttctttcaggagctttctctgtttttctattgatacctctatatatttttaaggcaatgtcactttgttttgtttacaaatatattgaatatgtcaagattactattttgttattgccctttgtgaatttccttgtctattttgctcgcttgttctttcaggtgaaatttattattttattaatgttgccaaaaattataagtaaaatatcaattatagtaataaaatgttttgtgaaa

SEQ ID NO: 29157 - protein, 31 aa, Homo sapiens
MTAFLLCSHMTERGSKGLFHSILEYLLSIGS

SEQ ID NO: 29158 - DNA, 5729 bp, Homo sapiens
aattataacagctggccttctggtgggcaaaccatcccctgatggactggaagcctaccccccaccccaagccctggctgcgacagctctggaaccctgactgcctgggtgcccctcagctctggaaccctgactgcctggatgctcctcagctctggaaccctgactgcttggataccccctcagctctggaaccctgactgcctggaaccgtgatccggaacccaagatcctttcaaggcctcaggggtattgctgctgccctcctccttctcaatttaaccccgcgtccagccgtcgccaccaggggcgtcagagcgcgcgcatgctcctagctcggagccgcgccgatctcgcgccggcacctggcagccaatcgcaggtctccactggacgcgcgcgtgtggaggcgtgcgcgtcggcggcgccgggggcctgaggaggcgtagtcgccgccggctgtgccccgggagcgcctccggggctggtgcgtggccggcagctcgcgaacagcagctgatccggactggatgtgaccttctgcctggaatagctcaagttcttaaaagttgcgttgtaataaacctgaggctgggaagttcaagatcaagatgctggacgatttggttccttagtgaaggctctcttcctggctggtggatgacagccttcttgctgtgttctcacatgacagaaagaggaagcaaggtggcagtttatataaaggaagcattgggacttgtggccccaccattcaggaataaaaaaattagaaaatggaacaatcatgtgaggaagagaaagagcctgaaccacagaagaacatacaagaaaccaaacaagtagatgacgaagatgctgagctcatctttgttggtgtggaacatgtaaatgaagatgctgagctaatctttgttggggtgacttcaaattcaaaaccagtcgtttcaaacattttgaacagagtcaccccgggttcatggtcaaggagaaaaaagtatgatcaccttagaaaagatactgctcgcaaattgcagcctaaaagtcatgagaccgttacatcagaagcagtgaccgtcctgccagcttcccaacttgaatcgagatcaacagatagtcctattattattgagcctttgtctaaacctgattatagaaatagttcaccacaagttgtgcctaataactcttcagaattaccttctcctttgattacattcacagattcattgcatcatccagtaagtacagcactttcagtaggaggtataaatgaaagtcctcgtgtatcaaagcaactttccactttcgaagtaaacagcataaatcccaaaagggctaaactcagggatggaattatagaaggaaattcttcagcttcgttcccttcagatacctttcatacaatgaatactcagcaaagtacaccctcaaataatgttcatacctcattaagccatgttcagaatggagcaccttttccagcagcttttccaaaggacaatatccatttcaagcctataaatacaaatcttgatagggaaaatgaattggcaaaaacagacattttgagtctaacaagtcaaaacaagacctttgatcccaagaaagaaaatcccattgtgttacttagtgacttttactatggacagcataaaggagaagggcagccggaacagaagactcacaccacctttaaatgcctcagctgcgtgaaagttctaaaaaatgttaagtttatgaatcacgtgaagcatcatttggaatttgagaagcagaggaacgacagctgggaaaaccacaccacctgccagcactgccaccggcagtttcccactcccttccagctacagtgtcacatcgaaaatgtccacactgcccaggagccctctactgtctgtaaaatctgtgaattgtcatttgaaacagatcaggtcctcttacaacacatgaaggaccatcataagcctggcgaaatgccctatgtgtgccaggtttgccattatagatcgtcggtctttgctgatgtagaaacacattttagaacgtgccatgaaaacacaaagaatttgctttgtcccttttgtctcaaaattttcaaaacagcaacaccatacatgtgtcattataggggccactggggaaagagtgcacaccagtgttccaagtgccggctacagtttttaactttcaaggagaaaatggagcacaagacccagtgtcatcaaatgtttaagaagcctaagcaactagaaggattacctcctgaaacaaaagttactattcaagtgtcactggaacctcttcagccaggatcagtggatgtagcatccataactgtgagcacatctgactctgaaccatcactccccaggtctaaaagcaaaatttcaaaaaagtcccattaattctagtttcagtaaatctaaagcaagtatttcaaaccaaattaaaaaacctcataaaacaaaaaatacaaaccatacattattcagtagcaccaaaaatagtgaaactagtggattatatatgactttttaaacaagattcaggatatatattatttgatctgaattttgaggtattattttaaaacatctggttttcatgttaactgtatctggcttaacacataaaaggtgtttgtgtgtgtgtgtgtgagagagaaaggtattaatttatttttttaattttaattttttttttttttactttagagacagggtctcactgttacccaggctggagtgcagtggcgtgatcctagctcactgcaaccttgaacttccaggctcaagcattcctccgcctcagcctttggagagtagctaggactacaggcgcagccaccacacccagctagttttttattttaattttttgtagcgatggaatcttgttatgtcgcccagggtggtctcgaactcctgaccttaggggagcctcctgcctcagcctccccaagtgctgggttgtgtgagtcactgcccctggcacctatttattgttttggtatttcatgttactcctaagcttgaaagctcttttttctatatacagaattcatagaatttttgaaatacttagttttctttacagctttttccatgcattcagcatttcatggttaactctagtcagactggaatggctttgttatgccctggcccacttgctgccgaattcccagaagtgcctctgctgtgctggcataaaataacctgaaaagattctgaaaagccaggatgtggaattgaaagagaagctgctgcgtgagcagagaccaagaaggcggaggttagttgagggagagcagtggttctttgttctagttgaaggataggcacacattcattctagtcttggggccaggtcaaaaggaacactgcttcagagtatctttacctacctgaaaacatccaaggaagccaaaccattcaaagtaaaatggttttgtttggtgaagggcccctgcagacatcaaacagccgtcatgtatcattggtttgaggtgaaatagcaataaaattaatagaatggtgcctggtactagctgacttcctgttctgtgatctaaaggtgaatttgattcattccctctcctctcccttctggctagccgttagtggagaatgaactggccatattctcagccacagctgtaaagcaagtttcccaaggggaagaagccctaatatctataatttgaactgtactggacccatagttttaactgaaaagggccaaacaagtggtgtctgtccagttcctggactgggctaaatttagttttcccactgttaagctggaatgaggactgtcccaacaacagtaggtacagtggacaaaaatagcccagggtgactgactgaatttaaacccataatggctttatatttttctgtgcatatatatcttaccctaattgaacatgtgaagcttgcaactttatgtcttgctttggacatgaatgtattacagcttgcagctattctgttaaatgtatagtttcccagttttttgacactaatgctgtttgggtcttacctgacacacaccagtgtgcaagaaatgtctctctaattcaataagttttaagacttagagttaatgtccttcatctgatctatcctatctaatctgtactatgggtgaatctttttcccttgctctccccaggggctgtttcacagtattctggagtaccttttgagtattggttcctgaacatcagcagtcttggctgcctctgtggactcccggagttgtctccctgcttgtgttctggtgccatcctttgttcctccacccctgaccaaggtgcccagcagcctgtcttcaccagtcaaggaatccgccatcttggctgtagacataggtctggagaaatctctccctttttccttgatttctttttaaaggtaccttatctctccccactcctttcttccctcctcaatctagttaaatttcctaagctttcacaaaaatccgggaagagataattaagagcttagcatccctcttagagtagaaggcagtacagataacaaagaagttgtgagtatattatctacattttagaaaattttctgactctagatccatagattctgttgtatttatttgccggacactcatttgattgatttgcaccttgaacactatactaggtcttttcagttacgttgcttgggttaagacactttgctaaaattacagcctgaatcctttctttagttgaagaaagggtatgtgtgtgcaagtgggtgtgtgtgtgccagtttttcttgtctcaggtagatactcccactgtgtataaatagatctacagacttttcatacttacctcccgtattctgtttctgtggtaaaaatatgaagtgttttagttgtatgttgagtgattggttggtattatcaacactgttgtttgcagtttcattaaagcatgctcttaaggagtacatatggtcattaattgccaactgtagattccagtgatctggcccctgcctacctccttcctctctttttcattctctgtcatgcttctccactgttttccccaatgacgcactattttgacacactggccttgctattccttaagcaaatcacattcttcccaatccaaagactttgcacatgctgttgtctttcttagaatgcccttcccctaggcctgcatggcttgctacctcacttaattgtttgacacttcctttggttcattgagcttcaaggctcttaaaatgccactgacaatgagatctccctttaaaaaaaaaaaaaaacttctacttttcctcttaaaggcactttactctctccccactcttttcttcctcttcaaagtatttaaatttcctaggttttcatgaaaaagctggaaagcgatcagcatcaagggctttgcttctgtcttagaattgagctagcttgagtcaatttctgtgcctgcaaccaaatgaaaattaatatagtgagttctttcaggagctttctctgtttttctattgatacctctatatatttttaaggcaatgtcactttgttttgtttacaaatatattgaatatgtcaagattactattttgttattgccctttgtgaatttccttgtctattttgctcgcttgttctttcaggtgaaatttattattttattaatgttgccaaaaattataagtaaaatatcaattatagtaataaaatgttttgtgaaa

SEQ ID NO: 29159 - protein, 61 aa, Homo sapiens
MTAFLLCSHMTERGSKVAVYIKEALGLVAPPFRNKKIRKWNNHVRKRKSLNHRRTYKKPNK

SEQ ID NO: 29160 - DNA, 4847 bp, Homo sapiens
aattataacagctggccttctggtgggcaaaccatcccctgatggactggaagcctaccccccaccccaagccctggctgcgacagctctggaaccctgactgcctgggtgcccctcagctctggaaccctgactgcctggatgctcctcagctctggaaccctgactgcttggataccccctcagctctggaaccctgactgcctggaaccgtgatccggaacccaagatcctttcaaggcctcaggggtattgctgctgccctcctccttctcaatttaaccccgcgtccagccgtcgccaccaggggcgtcagagcgcgcgcatgctcctagctcggagccgcgccgatctcgcgccggcacctggcagccaatcgcaggtctccactggacgcgcgcgtgtggaggcgtgcgcgtcggcggcgccgggggcctgaggaggcgtagtcgccgccggctgtgccccgggagcgcctccggggctggtgcgtggccggcagctcgcgaacagcagctgatccggactggatgtgaccttctgcctggaatagctcaagttcttaaaagttgcgttgtaataaacctgaggctgggaagttcaagatcaagatgctggacgatttggttccttagtgaaggctctcttcctggctggtggatgacagccttcttgctgtgttctcacatgacagaaagaggaagcaaggtggcagtttatataaaggaagcattgggacttgtggccccaccattcaggaataaaaaaattagaaaatggaacaatcatgtgaggaagagaaagagcctgaaccacagaagaacatacaagaaaccaaacaagtagatgacgaagatgctgagctcatctttgttggtgtggaacatgtaaatgaagatgctgagctaatctttgttggggtgacttcaaattcaaaaccagtcgtttcaaacattttgaacagagtcaccccgggttcatggtcaaggagaaaaaagtatgatcaccttagaaaagatactgctcgcaaattgcagcctaaaagtcatgagaccgttacatcagaagcagtgaccgtcctgccagcttcccaacttgaatcgagatcaacagatagtcctattattattgagcctttgtctaaacctgattatagaaatagttcaccacaagttgtgcctaataactcttcagaattaccttctcctttgattacattcacagattcattgcatcatccagtaagtacagcactttcagtaggaggtataaatgaaagtcctcgtgtatcaaagcaactttccactttcgaagtaaacagcataaatcccaaaagggctaaactcagggatggaattatagaaggaaattcttcagcttcgttcccttcagatacctttcatacaatgaatactcagcaaagtacaccctcaaataatgttcatacctcattaagccatgttcagaatggagcaccttttccagcagcttttccaaaggacaatatccatttcaagcctataaatacaaatcttgatagggaaaatgaattggcaaaaacagacattttgagtctaacaagtcaaaacaagacctttgatcccaagaaagaaaatcccattgtgttacttagtgacttttactatggacagcataaaggagaagggcagccggaacagaagactcacaccacctttaaatgcctcagctgcgtgaaagttctaaaaaatgttaagtttatgaatcacgtgaagcatcatttggaatttgagaagcagaggaacgacagctgggaaaaccacaccacctgccagcactgccaccggcagtttcccactcccttccagctacagtgtcacatcgaaaatgtccacactgcccaggagccctctactgtctgtaaaatctgtgaattgtcatttgaaacagatcaggtcctcttacaacacatgaaggaccatcataagcctggcgaaatgccctatgtgtgccaggtttgccattatagatcgtcggtctttgctgatgtagaaacacattttagaacgtgccatgaaaacacaaagaatttgctttgtcccttttgtctcaaaattttcaaaacagcaacaccatacatgtgtcattataggggccactggggaaagagtgcacaccagtgttccaagtgccggctacagtttttaactttcaaggagaaaatggagcacaagacccagtgtcatcaaatgtttaagaagcctaagcaactagaaggattacctcctgaaacaaaagttactattcaagtgtcactggaacctcttcagccaggatcagtggatgtagcatccataactgtgagcacatctgactctgaaccatcactccccaggtctaaaagcaaaatttcaaaaaagtcccattaattctagtttcagtaaatctaaagcaagtatttcaaaccaaattaaaaaacctcataaaacaaaaaatacaaaccatacattattcagtagcaccaaaaatagtgaaactagtggattatatatgactttttaaacaagattcaggatatatattatttgatctgaattttgaggtattattttaaaacatctggttttcatgttaactgtatctggcttaacacataaaaggtgtttgtgtgtgtgtgtgtgagagagaaaggtattaatttatttttttaattttaattttttttttttttactttagagacagggtctcactgttacccaggctggagtgcagtggcgtgatcctagctcactgcaaccttgaacttccaggctcaagcattcctccgcctcagcctttggagagtagctaggactacaggcgcagccaccacacccagctagttttttattttaattttttgtagcgatggaatcttgttatgtcgcccagggtggtctcgaactcctgaccttaggggagcctcctgcctcagcctccccaagtgctgggttgtgtgagtcactgcccctggcacctatttattgttttggtatttcatgttactcctaagcttgaaagctcttttttctatatacagaattcatagaatttttgaaatacttagttttctttacagctttttccatgcattcagcatttcatggttaactctagtcagactggaatggctttgttatgccctggcccacttgctgccgaattcccagaagtgcctctgctgtgctggcataaaataacctgaaaagattctgaaaagccaggatgtggaattgaaagagaagctgctgcgtgagcagagaccaagaaggcggaggggctgtttcacagtattctggagtaccttttgagtattggttcctgaacatcagcagtcttggctgcctctgtggactcccggagttgtctccctgcttgtgttctggtgccatcctttgttcctccacccctgaccaaggtgcccagcagcctgtcttcaccagtcaaggaatccgccatcttggctgtagacataggtctggagaaatctctccctttttccttgatttctttttaaaggtaccttatctctccccactcctttcttccctcctcaatctagttaaatttcctaagctttcacaaaaatccgggaagagataattaagagcttagcatccctcttagagtagaaggcagtacagataacaaagaagttgtgagtatattatctacattttagaaaattttctgactctagatccatagattctgttgtatttatttgccggacactcatttgattgatttgcaccttgaacactatactaggtcttttcagttacgttgcttgggttaagacactttgctaaaattacagcctgaatcctttctttagttgaagaaagggtatgtgtgtgcaagtgggtgtgtgtgtgccagtttttcttgtctcaggtagatactcccactgtgtataaatagatctacagacttttcatacttacctcccgtattctgtttctgtggtaaaaatatgaagtgttttagttgtatgttgagtgattggttggtattatcaacactgttgtttgcagtttcattaaagcatgctcttaaggagtacatatggtcattaattgccaactgtagattccagtgatctggcccctgcctacctccttcctctctttttcattctctgtcatgcttctccactgttttccccaatgacgcactattttgacacactggccttgctattccttaagcaaatcacattcttcccaatccaaagactttgcacatgctgttgtctttcttagaatgcccttcccctaggcctgcatggcttgctacctcacttaattgtttgacacttcctttggttcattgagcttcaaggctcttaaaatgccactgacaatgagatctccctttaaaaaaaaaaaaaaacttctacttttcctcttaaaggcactttactctctccccactcttttcttcctcttcaaagtatttaaatttcctaggttttcatgaaaaagctggaaagcgatcagcatcaagggctttgcttctgtcttagaattgagctagcttgagtcaatttctgtgcctgcaaccaaatgaaaattaatatagtgagttctttcaggagctttctctgtttttctattgatacctctatatatttttaaggcaatgtcactttgttttgtttacaaatatattgaatatgtcaagattactattttgttattgccctttgtgaatttccttgtctattttgctcgcttgttctttcaggtgaaatttattattttattaatgttgccaaaaattataagtaaaatatcaattatagtaataaaatgttttgtgaaa

SEQ ID NO: 29161 - protein, 61 aa, Homo sapiens; identical to SEQ ID NO: 29159

SEQ ID NO: 29162 - DNA, 808 bp, Homo sapiens
agctggccttctggtgggcaaaccatcccctgatggactggaagcctaccccccaccccaagccctggctgcgacagctctggaaccctgactgcctgggtgcccctcagctctggaaccctgactgcctggatgctcctcagctctggaaccctgactgcttggataccccctcagctctggaaccctgactgcctggaaccgtgatccggaacccaagatcctttcaaggcctcaggggctgggaagttcaagatcaagatgctggacgatttggttccttagtgaaggctctcttcctggctggtggatgacagccttcttgctgtgttctcacatgacagaaagaggaagcaaggtggcagtttatataaaggaagcattgggacttgtggccccaccattcaggaataaaaaaattagaaaatggaacaatcatgtgaggaagagaaagagcctgaaccacagaagaacatacaagaaaccaaacaagtagatgacgaagatgctgagctcatctttgttggtgtggaacatgtaaatgaagatgctgagctaatctttgttggggtgacttcaaattcaaaaccagtcgtttcaaacattttgaacagagtcaccccgggttcatggtcaaggagaaaaaagtatgatcaccttagaaaagatactgctcgcaaattgcagcctaaaagtcatgagaccgttacatcagaagcagtgaccgtcctgccagcttcccaacttgaatcgagatcaacagatagtcctattattattgagcctttgtctaaacctgattatagaa

SEQ ID NO: 29163 - protein, 61 aa, Homo sapiens; identical to SEQ ID NO: 29159

SEQ ID NO: 29164 - DNA, 8192 bp, Homo sapiens
ttgtggagcccaggcctcgcctgaagagaaggcccgtgtctgccattttcacggagtccattcagcctcagaagccaggccccggcgcagcggccacagtgggcaaagtgccacccacccctcccgagaagacgtgggtgaggaagcccaggcccttgtccatggacctcacggcccggtttgagaacaaagaggccttgctgaggaaggtggccgatgaaggaagtggacccacagcaggggatatggctgggctagagaggcccagagcagcgtccaagctggacagggactgtttggtcaaggcggaggctcctcttcatgatcctgatttggacttcctggaggtggccaagaaaatccgtgaacggaaggagaagatgctttcgaagccggagatgggcagccccagagccctggtggggggctcatctggggtcacccccagcaatgaccagagtccctgggaagaaaaggccaagctggacccagagccagagaaggctgctgagtccccctcacccaggctgggaaggggcctagaacttgctgaggttaagagcagagtggcggatggggaggccgcggcagggggagagtgggcctccaggaggagtgtcaggaagtgcatcagcctgtttcgggaggacagcaccttggccttggcagtggggtctgaatctcccctggccacccctgcgtccccatcggcggcaccagagccggagaaaggggttgtgagcgttcaggaacggatcagaggctggactgccgagagctcagaggctaagcccgaggtcaggaggaggacgttccaggctcggccgctgtcggcggatttgaccaaattgttttcaagttcagcttccagcaacgaagtcaaatatgagaagagtgctgagctgagcggcgagtttcctaaggaaccgagagaaaagcaaaaggaggggcacagtttggatggagcatgcatcccgagaagcccctggaagcctgggacactccgggataagtccaggcagacggagcagaaggttagctctaaccaagaccccgacagctgtcgcggtggaagctcagtggaggccccgtgcccttctgacgtcactccagaggatgaccggagcttccagactgtgtgggccacagtatttgagcaccacgtggagagacacacagtggctgaccagtcgggacgttgtctctccaccacaccccctggtgacatggcccatgcccgtgtctcagaacccaggccgaggcctgagatgggctcttggctgggcagggacccaccagacatgacaaaactgaagaaagagaactccagagggtttgacaatcccgagacggagaaattgggaccaaccacccttttgaatggtgaactgagaccgtatcacacgcctctccgggacaaataccctttgtctgaaaaccacaataataacaccttcctcaaacacttggaaaatcctcccacatcgcagagaattgagcccagatatgacattgtgcatgcagtgggagagcgtgtgcacagcgaggccatctcaccggcaccggaggagaaagcggtcacgctccgcagcctcaggtcttggctctcactgaaggacaggcagctgtcccaggaggtcacccctgctgacctggagtgtggtttggaaggtcaggcggggtccgtccaaagggccagtttgatttgggaagctcgaggcatgcctgaggctagtggaccgaagtttgggggcaattgcccgtttcccaaatggacaggcggggcagtggtgagctcgcacaaagccaccgtggcagtcagcgaagagcactgtgctcccggggccacctccgtcagggctatcaaggctgccatctgggaaagccagcatgaggggccagagggggccagaagcaagccaggagtgggagcaaggggcccaccccagggatgccccctcgatcctctttccagggctacgaatgggccttctgactcccaagcacgaacacatccagatgcatttgctgtgcagaaagggcccttcattgtagccgccagggagggtgatccagggccggcccaggtgccacagcctgcagtcagaatgcggaaagccggcgccatggaccagagaatggacagatggcggcggcggactttaccccccaacgtgaaatttgatacattcagttctcttgtcccagaggactctccacatgtggggcacagacgaacagattatgtgagccccacagccagtgccttaagaaaacctcaactatcccactacagggtggagacccaggaggtgaacccaggtgcttcacgggaccagacttccccagcagtgaagcaagggtcacctgtggaacccaaggcgacattttttgcagtcacctatcagattcccaatactcaaaaggcaaagggtgtggttctgtcaggagctgaaagcttgctggaacattctagaaaaatcactccaccctcgtctcctcattctttaacatccactttggtttctcttggtcatgaagaggcattggagatggcaggcagtaaaaactggatgaagggacgagagcatgaaaatgcaagcattttaaaaactctgaagccaacagaccgtccatcatctcttggggcctggagtctggaccctttcaatggaagaatcattgatgtggatgccttatggagtcatcggggatcagaagatggccctcgtcctcaaagcaattggaaggaaagtgcgaacaagatgtcccccagcggcggagctccccaaaccaccccgactctgaggagtcgtccaaaagatcttcctgtgagaaggaagactgatgtgatcagtgacacgttcccaggtaaaatcagagatggctacagatccagcgttcttgacattgacgccctgatggcagagtaccaggagctgtcgctgaaagtccctggggaggctcaggagaggaggagtcccaccgtggagcccagtacgttgcctcgggagaggcctgttcagctgggcggggtggagcagagaaggaggagcctgaaggagatgcccgataccgggggtctctggaaaccggccagttctgccgaaataaatcacagtttcactcctggcttaggcaagcagctggcagagaccttggagacagccatgggcaccaaatctagccctcccttctgggctctgccaccctcggctccttctgaaaggtatccagggggctctcctatacctgcggatcccaggaaaaaaacggggtttgctgaggatgacagaaaggcctttgccagtaaacatcatgttgcaaagtgtcagaattacctggctgagtcaaagccctctggtcgggaggatccaggcagtggggtcagggtgtcacccaaatcgccccccactgaccagaagaaagggaccccaaggaaatccaccgggcggggagaggaggacagtgtggcccagtggggtgaccacccacgtgactgtggacgggtgccgctggatatcaagagggcctactcagagaaggggccccctgccaacatccgagagggcctgtccatcatgcatgaagccagagagaggaggcgagagcagcccaaagggaggcccagccttactggagagaatttggaggccaaaatgggaccctgttggtgggagtcagggactggagacagtcacaaggtgctgccacgggacctggagaaggaggatgccccccaggagaaggagcgaccgctccagcaggtgtcccctgtggcctcggttccctggagaagccacagcttctgcaaagacaggaggagtgggccctttgtggaccagctgaagcagtgtttctcccggcagcccactgaacccaaggacactgacaccctcgtgcacgaagccggcagccagtatgggacgtggacagagcagtgccagagtggggagagcttggccactgagtccccagatagcagtgccacatcgacaaggaaacagccccccagcagccgtttgtcttctctgtcctcccaaacggagcccacctcggcaggggaccagtatgactgctccagggaccagcggagcaccagcgtggaccactccagcactgacctggaatccaccgatgggatggaggggccgcctccaccggacgcctgccctgaaaagagagtagatgacttctccttcattgatcaaacctcagtcctcgactcaagtgccctcaagacccgggtgcagctcagcaagagaagccgccgccgggcccccatctcccactccctccggcgcagccgatttagtgagtccgagagcagatcacctttggaggatgagactgacaacacgtggatgttcaaagactcaacggaggagaaatcacccaggaaggaggagtcggatgaggaggagacggcatccaaagctgagaggacccctgtcagccatcctcagaggatgcctgcgtttccaggcatggatccggcagtgctaaaggctcagctgcacaagaggccagaggtggacagtcctggcgagacccccagctgggcaccccaacccaagagccccaagtcccccttccagcctggggtgctgggcagtcgcgtgctgccttccagcatggacaaggatgagaggtcggatgaaccctctccccagtggctaaaggaattgaaatccaagaagaggcaaagtctttatgagaaccaagtttgaccaggcagggaacactgccacatctacgtaacagaagccttaaccatcagaacccgcagacgaggccgagctgctgccgtttcttcctgcacaacgcttacgtgcctgggcccttcccattggattgagaacgctatccagtgcccctgtcctcgccaggctctccctggatccagacgggaagacccaacctccaggagcactcgctcatctccccagacagcacttcaggctgggaaaggagccaggctgcccagaaacgtccatgtgggtggttttgctttttatgtaaaaatttgcatttctacctattttagacaccttcatcagctccaagaacatcagtgtgaggctggaattgtctccccaggttctgaaaaacacctgcatttgtgaaagcacctcctcacccgaccccggggcaggtctttttttggaaggacatttccaaggaagatcaaactgttcattttctgctgtagtctcggtgcagggtattaccgctgggttgaggttttctattctttttttttggtgagttccttcttccccttgaggaatcagcagttccaatttttaaacatactctccctgattatgtgtatttctctttctagtggggctgtgtgcatcgttggcctatgttattgtatgtcatttttgtttgctttagaaggcgataaagcaataattcagctaattttctttgaaacttgataggtatatatgtgtttacgttaaaggacaggaggaaagatgtgcgaataatttgttctgaagtatccagtcacctcaggttatcttatccctatccaagctgtttagaagttataattgtcactcttgtatttatttccatggcttcttttcatttgagctctggtttcggtagggtgacctttgccccttggccttaagggttcataaactgcagcccaagtggtggtgcctttgcttatgaatcatcagacctgccctagtaatctttttctccagagtcttctttgaacatgacgtgggctgctggcatggaggagttgttccaaactggcctcagaacagatgcatgaatgaagggtactttttgcttttgctcacctcattttccttcatctttcttgatgaatccattatttgcaaatgctgtcaaaacatgctttccttctccctggctacctctcaggagttcatttgtctctctgtctcagcttcctccctcatcttcctttacccctcttctctgtcttagtgggtggatgggcatggatagaaatcctctgtttctttaggttaggataaacacctgggccctggtgaggcagttgctgttcagcaccagggacagcaactgcagggctgtgaggccggagcccaccttgtgtcctgttcgatgagctttggttactgatgagcaattgccagatcatgtcacccacccagccttttacacctgggagcctcatgcatctgggtttgggagtttggccctgctgatgatagtttgttttctcttcattccctgaattagtcatcagttctccgtggccatttggggattcatgcctgcaactgcttcagtcgaattcttttttaaagatccagtttatgttttataataattttgatcttatggctttcaacgtcaataggatcccctttaaaaataccctgctagtgttttgttttgttttgtttttctgagacaaggtcttactctgttgctcaagctggagtggagtggcacgatcatagctcactaacacctgggctcaagtgattctcccacctcagcctcccaagtagctgggactacaggtgtatgctaccatgaccagctaatttttaaatatttttgtagagacaagggtcttaccatgttgcccaggctggtctcgaacttctgggctcaagcaattgtccctcctcagcctcccaaagtgctcggattacagacatgagccactgcacctggcctgaaacacattcctagtcttttgatcctgacttcttatctgggctgctgtctctctttccttcaggtggaaaggaccccttggtaccatctcaagcagtaggaaaggacctgctcttacatatattgatggtcctcatgcaaaactctcaattcttaattagtcatgtctcagctcaaggatatcagacaggaatgaaacacacttgaaaatgagattgacctggagattttttttccctaatctctcataccttaattggaaaaataatcaattaattctatgttaattaggatatacaaagttcaccctccttgaaagtgactagggcaagccctgaagatcttcctcacctccttttatttttctataaccttgtctcctccagcaccacagggaagacaatcacagtgggtcaagagcgaccctctttcacgtgggctctgccatgacctctgagacctgcttatgatcagtgcaatgaagttagaagtaactgatgattgggagcctttgcagatagctgggcaaatgggtgatttacttatccccattctaaatggagtgagctctctttgaggctaagcaaggaggcgttgtatgctagtttctagactttgcctggagacccctttggaaatctgtcttctttttaaactcacttaatatgccttaatcatctgtgtgtaatggagtcatccgctcctcaatctaaccctcctcccctggggctttggctgtcctcaatgagagtttcatgcagaatggaaaatcctctatatgtacaatctctctccccctcatttctcttcctcctcacctccaccacccctttgcacatcagcattttaacagctgatcttttgagaagcctgtatctttttcctcttcagtagatacccttcttcatggtcctttgcctaatcaaacagaggcttttggcctttgaaaatccatgacaaggcctcagaaatcagtgttgtggaggattactccatgccaccggagaaactctggtgaaagagaaacctcgtggtctttaggatgttgggattttgagtgaacctgacctgatagcctcaggattcagggaaaggacaatcagatggcggtgttttccagggggacgcgccaaatcatgtggtttcagacaattgtgtttgcctttgtgcctccctggaagggaggccaactaagggtatcaccaagaagccaaaagagaaataggcatgagcctgtggttttaaactttacaggctgggcaaaggatttagaaagacccttagcatgattttcctaaaagagaccttagctgctccaacctggtgctgatagctgctttgttgatctatgctttaaaatttttctttataatgcccccagatggctcctggaactagtcgtaattgcaaactgtaaaaatccctcctccccagtgtagatatttaaaccagagtaagtgatggggagacattctgtggtctctgaa

SEQ ID NO: 29165 - protein, 1522 aa, Homo sapiens
MDLTARFENKEALLRKVADEGSGPTAGDMAGLERPRAASKLDRDCLVKAEAPLHDPDLDFLEVAKKIRERKEKMLSKPEMGSPRALVGGSSGVTPSNDQSPWEEKAKLDPEPEKAAESPSPRLGRGLELAEVKSRVADGEAAAGGEWASRRSVRKCISLFREDSTLALAVGSESPLATPASPSAAPEPEKGVVSVQERIRGWTAESSEAKPEVRRRTFQARPLSADLTKLFSSSASSNEVKYEKSAELSGEFPKEPREKQKEGHSLDGACIPRSPWKPGTLRDKSRQTEQKVSSNQDPDSCRGGSSVEAPCPSDVTPEDDRSFQTVWATVFEHHVERHTVADQSGRCLSTTPPGDMAHARVSEPRPRPEMGSWLGRDPPDMTKLKKENSRGFDNPETEKLGPTTLLNGELRPYHTPLRDKYPLSENHNNNTFLKHLENPPTSQRIEPRYDIVHAVGERVHSEAISPAPEEKAVTLRSLRSWLSLKDRQLSQEVTPADLECGLEGQAGSVQRASLIWEARGMPEASGPKFGGNCPFPKWTGGAVVSSHKATVAVSEEHCAPGATSVRAIKAAIWESQHEGPEGARSKPGVGARGPPQGCPLDPLSRATNGPSDSQARTHPDAFAVQKGPFIVAAREGDPGPAQVPQPAVRMRKAGAMDQRMDRWRRRTLPPNVKFDTFSSLVPEDSPHVGHRRTDYVSPTASALRKPQLSHYRVETQEVNPGASRDQTSPAVKQGSPVEPKATFFAVTYQIPNTQKAKGVVLSGAESLLEHSRKITPPSSPHSLTSTLVSLGHEEALEMAGSKNWMKGREHENASILKTLKPTDRPSSLGAWSLDPFNGRIIDVDALWSHRGSEDGPRPQSNWKESANKMSPSGGAPQTTPTLRSRPKDLPVRRKTDVISDTFPGKIRDGYRSSVLDIDALMAEYQELSLKVPGEAQERRSPTVEPSTLPRERPVQLGGVEQRRRSLKEMPDTGGLWKPASSAEINHSFTPGLGKQLAETLETAMGTKSSPPFWALPPSAPSERYPGGSPIPADPRKKTGFAEDDRKAFASKHHVAKCQNYLAESKPSGREDPGSGVRVSPKSPPTDQKKGTPRKSTGRGEEDSVAQWGDHPRDCGRVPLDIKRAYSEKGPPANIREGLSIMHEARERRREQPKGRPSLTGENLEAKMGPCWWESGTGDSHKVLPRDLEKEDAPQEKERPLQQVSPVASVPWRSHSFCKDRRSGPFVDQLKQCFSRQPTEPKDTDTLVHEAGSQYGTWTEQCQSGESLATESPDSSATSTRKQPPSSRLSSLSSQTEPTSAGDQYDCSRDQRSTSVDHSSTDLESTDGMEGPPPPDACPEKRVDDFSFIDQTSVLDSSALKTRVQLSKRSRRRAPISHSLRRSRFSESESRSPLEDETDNTWMFKDSTEEKSPRKEESDEEETASKAERTPVSHPQRMPAFPGMDPAVLKAQLHKRPEVDSPGETPSWAPQPKSPKSPFQPGVLGSRVLPSSMDKDERSDEPSPQWLKELKSKKRQSLYENQV

SEQ ID NO: 29166 - DNA, 6582 bp, Homo sapiens
cgaacagattatgtgagccccacagccagtgccttaagaaaacctcaactatcccactacagggtggagacccaggaggtgaacccaggtgcttcacgggaccagacttccccagcagtgaagcaagggtcacctgtggaacccaaggcgacattttttgcagtcacctatcagattcccaatactcaaaaggcaaagggtgtggttctgtcaggagctgaaagcttgctggaacattctagaaaaatcactccaccctcgtctcctcattctttaacatccactttggtttctcttggtcatgaagaggcattggagatggcaggcagtaaaaactggatgaagggacgagagcatgaaaatgcaagcattttaaaaactctgaagccaacagaccgtccatcatctcttggggcctggagtctggaccctttcaatggaagaatcattgatgtggatgccttatggagtcatcggggatcagaagatggccctcgtcctcaaagcaattggaaggaaagtgcgaacaagatgtcccccagcggcggagctccccaaaccaccccgactctgaggagtcgtccaaaagatcttcctgtgagaaggaagactgatgtgatcagtgacacgttcccaggtaaaatcagagatggctacagatccagcgttcttgacattgacgccctgatggcagagtaccaggagctgtcgctgaaagtccctggggaggctcaggagaggaggagtcccaccgtggagcccagtacgttgcctcgggagaggcctgttcagctgggcggggtggagcagagaaggaggagcctgaaggagatgcccgataccgggggtctctggaaaccggccagttctgccgaaataaatcacagtttcactcctggcttaggcaagcagctggcagagaccttggagacagccatgggcaccaaatctagccctcccttctgggctctgccaccctcggctccttctgaaaggtatccagggggctctcctatacctgcggatcccaggaaaaaaacggggtttgctgaggatgacagaaaggcctttgccagtaaacatcatgttgcaaagtgtcagaattacctggctgagtcaaagccctctggtcgggaggatccaggcagtggggtcagggtgtcacccaaatcgccccccactgaccagaagaaagggaccccaaggaaatccaccgggcggggagaggaggacagtgtggcccagtggggtgaccacccacgtgactgtggacgggtgccgctggatatcaagagggcctactcagagaaggggccccctgccaacatccgagagggcctgtccatcatgcatgaagccagagagaggaggcgagagcagcccaaagggaggcccagccttactggagagaatttggaggccaaaatgggaccctgttggtgggagtcagggactggagacagtcacaaggtgctgccacgggacctggagaaggaggatgccccccaggagaaggagcgaccgctccagcaggtgtcccctgtggcctcggttccctggagaagccacagcttctgcaaagacaggaggagtgggccctttgtggaccagctgaagcagtgtttctcccggcagcccactgaacccaaggacactgacaccctcgtgcacgaagccggcagccagtatgggacgtggacagagcagtgccagagtggggagagcttggccactgagtccccagatagcagtgccacatcgacaaggaaacagccccccagcagccgtttgtcttctctgtcctcccaaacggagcccacctcggcaggggaccagtatgactgctccagggaccagcggagcaccagcgtggaccactccagcactgacctggaatccaccgatgggatggaggggccgcctccaccggacgcctgccctgaaaagagagtagatgacttctccttcattgatgtaagtcagtggccaggagcatttcttcttaaatggaaattccagcctctctctgtgaattgccacttcaggtgtaggatctgtgtgccagggacccttggagtgggtacggagggcactgtctttgaaatgggactcacttatgcatgtatcttggacctgccatacacctgctgtgtgtcttggggcaaatgtcttcacctctctgagcctcagcttccttatccacttgtaaccagcatcatcagctccacagcctcaaatacaattgcatgcattcaaattaaaactgatctaagcccttacctgctaggtaagcagggagtctgaccacttacccctgggaagtcaccctgaggtttatagttgcaagcatgaagaggctggagtttgctcagaatgattctgctgaacgttctcactaaggtcttgcttggtacaacagtgtccctggtatcaggggatccgactgtctctgtagtggctcttccaggacagaaagtcccctcaggcatgggcacctttcatggaggtcccaggggacagtccctagcactcagctctttcaggtcccaagcacagccaggatgtcagctgccccagcatagcaggtcaaacggtctcctgctctagcatcttccagaccagaacttatcctcctttcccctgggagccccacctccaggggtcaggcaggtcttccttttcaacccttgaaacccaggggtgatgtcattattctcctcgcgtaacaatagggctacctgcccactttctgggggatggaacatctgcaaaatgtgaaagggaccctctctcctggcagtaaagcctcccacctacacacttgggcatggctacccacatttccccagaggaggaacaccgctgctttagaaaaagggcttcctttagggcttcaaagaggattctccttcagtatatggccaaggtctctcgctggcacctctagatcagggcggagacaaagaaagacacaagttgagtcttgattggggaaccccattatataaccatggccatgcccacctccctgggtgtcatcaggatttagttaggtgatatattcagttattcactcaacagacatgtattgagatcttgctgtgtgccttacatgccagcatcatgtcactgcatcatgaactttcctgctagaacgctaagtggttccttcttgatgtccattataaacaacaatcagtgagtgttgaccactggcccaggcacatgttaataaccccagaggcaaaactgcctgcgctttttgcaaattagcaaatcagagtggccatggagtgactctaaatgctggtgtcccgaagcataggtctaacgcttactgaaattatactgcggtttatgtgtgatgcccaccacgatttgggtctcctgtggggatactgaggtttatgtatggtgccaaccatgatttaggtctcctgtggggacggtttggaggccaaatggggaggcggaggcggagcactaaggaatccagtctctgtaccaggctgaggatgcaagggtggcaccatcttcccctccaagccagcccctctgtcagtgtgattctgtcctgctctcttggagtctgaaaacctggctctgttaagtggccggagaagcaagcctgcctctaggtgcagcaggcactttctgatttccgtctttccccctctttcactggtcccgtgcaagtctcctcacaagataccactgtggctggtttgggaagtagctatgatcagctccttccaccaccccattgggacttttgttacttaccattgttgggaaatgattcattgaaattagcctgtcatcactgacttagaaggccttgggtgatggaatttctccaaagtggacctaggcggaagaaaccaacatttcatgtaagaacgtgagcttgccggaaagagctcttggctgtgagccgtggtcaggctctgtctgaaacaagggctttccacacctgagcacagggagttctctcagccactgtaggaaggaggcactctgtttatctcctttttataaatagggacacccaagctcagagaagtgaagctcattgcccaaggtcacataaccaggattcgaacccagcagggtttgaaccccagctctgagcacttcactgctgtctcccgggagaattctgagccaggcacttcccatctccttactggggcccacccagatggtctgtgctccccaccctttcactgggggggccctcaccaaccccccacctgtcgcagctccgagtgtgagtcttcagggatgcctgaaaatggactcctgatgtttagtaagctgccccctcccttcccacctgcaccctagattatgtgagtaatggaggaattccacggagaacgtctcaacccggggactctgtgtgaatacagttgacagaaggatttagttagatgttgaatccattattcattcaacaaacaaacattaattgagctcctgctgtgtactgatcattgctgtagattacatgcttgtgtggtggatgtcactgggagggaaaaggcatttgtattatgtgcctactgggtgccaggaagccaggcactgtactagggcactcaaggttcattgttccacctgacttttgtcatcagcctatggggtatgttttatggggaaatttaggctttgggtgttaggttactattaaaatgtggaagccctggcctaggtaccacctaaatagcctctcatctgtcaacgaagctgtgtaccgccaactgtgttgtggtaccctccattgatggttcccttgatttttttcctcttcctccctgctgctcccaaagcaaacctcagtcctcgactcaagtgccctcaagacccgggtgcagctcagcaagagaagccgccgccgggcccccatctcccactccctccggcgcagccgatttagtgagtccgagagcagatcacctttggaggatgagactgacaacacgtggatgttcaaagactcaacggaggagaaatcacccaggaaggaggagtcggatgaggaggagacggcatccaaagctgagaggacccctgtcagccatcctcagaggatgcctgcgtttccaggcatggatccggcagtgctaaaggctcagctgcacaagaggccagaggtggacagtcctggcgagacccccagctgggcaccccaacccaagagccccaagtcccccttccagcctggggtgctgggcagtcgcgtgctgccttccagcatggacaaggatgagaggtgaggggtcttggggaatgggggtccctctccttccaaactcaggctatacttctagagaggtgctcgcataggttttagagctgaatagaagagagttacaactttttaattttctctagcagcagaagctttgttcatgagaattctcaatactcagatacctaaaaagtacaacagaggccggggaaggaggccaggaatcaggccagctggcctctcctcttccccgcccactgccacctgctacatggaacgccagggcaccattgctggagaactactgatctagtttagccctctccagaccgatggggaaactgaggcattctccctcctcttcccctttggggaagtatctttattatcagagatctggaggacctgggaaggtggatcaaagggcacggccaggttgaatgagatcggtttcactcccttcgtggaacagctatcccgatcctgggctgttctgtgtagagacgagcacaaagcagcttctgccccccaagaggctctcaggctctcagaggggtgtttcagcagctggaggtggaggttaagaacaggggatctaaggtcacacagccagggtttaattccaccattgctgcttaagagctgcatgatgtgggaaaaggtacttgacctcctgaacctcagtttcctcaactgtaaagtgggttttctaacctcctaaccttccgaggtggtcatgaggatgaaacaagagtgtgtctaaagccctgtgcctgagccctgggatgtagaagtactcagtgaagcagagtggaaatcttatcatgagcactgttaatccatgaaagttagggattgttcctgatgctagagttgtaatgatagtaagtgctggttggatcagagcaagagtgggtaagctatggcccacaggctaaatccagcccacatcagtttttgtaagtaagctttattggaacacagccacatgcattcatttatgtattgtccataactgctttagtgctaccactgcagagttaagaagtagcacagatgtcccacagcccacagaatcaggaatattttactctctggccctttctctgacccctgtgatggagggaggcaggtgaagggctcataatgcacacttgaggatgggcggcagaaaagacttccagctgggtgcagtggctcacgtctatagtcccaggactttggaaggcagaggtgagaggatcacttgaggccaggggttggagtgcagtgagctatgattgcaccattgcactccagcctggactaaagaatgagaccttgtcacg

SEQ ID NO: 29167 - protein, 661 aa, Homo sapiens
MAGSKNWMKGREHENASILKTLKPTDRPSSLGAWSLDPFNGRIIDVDALWSHRGSEDGPRPQSNWKESANKMSPSGGAPQTTPTLRSRPKDLPVRRKTDVISDTFPGKIRDGYRSSVLDIDALMAEYQELSLKVPGEAQERRSPTVEPSTLPRERPVQLGGVEQRRRSLKEMPDTGGLWKPASSAEINHSFTPGLGKQLAETLETAMGTKSSPPFWALPPSAPSERYPGGSPIPADPRKKTGFAEDDRKAFASKHHVAKCQNYLAESKPSGREDPGSGVRVSPKSPPTDQKKGTPRKSTGRGEEDSVAQWGDHPRDCGRVPLDIKRAYSEKGPPANIREGLSIMHEARERRREQPKGRPSLTGENLEAKMGPCWWESGTGDSHKVLPRDLEKEDAPQEKERPLQQVSPVASVPWRSHSFCKDRRSGPFVDQLKQCFSRQPTEPKDTDTLVHEAGSQYGTWTEQCQSGESLATESPDSSATSTRKQPPSSRLSSLSSQTEPTSAGDQYDCSRDQRSTSVDHSSTDLESTDGMEGPPPPDACPEKRVDDFSFIDVSQWPGAFLLKWKFQPLSVNCHFRCRICVPGTLGVGTEGTVFEMGLTYACILDLPYTCCVSWGKCLHLSEPQLPYPLVTSIISSTASNTIACIQIKTDLSPYLLGKQGV

SEQ ID NO: 29168 - DNA, 6140 bp, Homo sapiens
cgactggctggtcccctggccgtgagccggcttctgaatgatttatgccgccttgaacttgactccagcgtgacaggagtgagaagagccgctcccgctagaggaaagctggaaaccgtactgtgctcaccacataacctctgggtgctggaaatggagtattactactgccccagcctgctgaagctcttgcgctacctctgggaccagctgaagcagtgtttctcccggcagcccactgaacccaaggacactgacaccctcgtgcacgaagccggcagccagtatgggacgtggacagagcagtgccagagtggggagagcttggccactgagtccccagatagcagtgccacatcgacaaggaaacagccccccagcagccgtttgtcttctctgtcctcccaaacggagcccacctcggcaggggaccagtatgactgctccagggaccagcggagcaccagcgtggaccactccagcactgacctggaatccaccgatgggatggaggggccgcctccaccggacgcctgccctgaaaagagagtagatgacttctccttcattgatcaaacctcagtcctcgactcaagtgccctcaagacccgggtgcagctcagcaagagaagccgccgccgggcccccatctcccactccctccggcgcagccgatttagtgagtccgagagcagatcacctttggaggatgagactgacaacacgtggatgttcaaagactcaacggaggagaaatcacccaggaaggaggagtcggatgaggaggagacggcatccaaagctgagaggacccctgtcagccatcctcagaggatgcctgcgtttccaggcatggatccggcagtgctaaaggctcagctgcacaagaggccagaggtggacagtcctggcgagacccccagctgggcaccccaacccaagagccccaagtcccccttccagcctggggtgctgggcagtcgcgtgctgccttccagcatggacaaggatgagaggtcggatgaaccctctccccagtggctaaaggaattgaaatccaagaagaggcaaagtctttatgagaaccaagtttgaccaggcagggaacactgccacatctacgtaacagaagccttaaccatcagaacccgcagacgaggccgagctgctgccgtttcttcctgcacaacgcttacgtgcctgggcccttcccattggattgagaacgctatccagtgcccctgtcctcgccaggctctccctggatccagacgggaagacccaacctccaggagcactcgctcatctccccagacagcacttcaggctgggaaaggagccaggctgcccagaaacgtccatgtgggtggttttgctttttatgtaaaaatttgcatttctacctattttagacaccttcatcagctccaagaacatcagtgtgaggctggaattgtctccccaggttctgaaaaacacctgcatttgtgaaagcacctcctcacccgaccccggggcaggtctttttttggaaggacatttccaaggaagatcaaactgttcattttctgctgtagtctcggtgcagggtattaccgctgggttgaggttttctattctttttttttggtgagttccttcttccccttgaggaatcagcagttccaatttttaaacatactctccctgattatgtgtatttctctttctagtggggctgtgtgcatcgttggcctatgttattgtatgtcatttttgtttgctttagaaggcgataaagcaataattcagctaattttctttgaaacttgataggtatatatgtgtttacgttaaaggacaggaggaaagatgtgcgaataatttgttctgaagtatccagtcacctcaggttatcttatccctatccaagctgtttagaagttataattgtcactcttgtatttatttccatggcttcttttcatttgagctctggtttcggtagggtgacctttgccccttggccttaagggttcataaactgcagcccaagtggtggtgcctttgcttatgaatcatcagacctgccctagtaatctttttctccagagtcttctttgaacatgacgtgggctgctggcatggaggagttgttccaaactggcctcagaacagatgcatgaatgaagggtactttttgcttttgctcacctcattttccttcatctttcttgatgaatccattatttgcaaatgctgtcaaaacatgctttccttctccctggctacctctcaggagttcatttgtctctctgtctcagcttcctccctcatcttcctttacccctcttctctgtcttagtgggtggatgggcatggatagaaatcctctgtttctttaggttaggataaacacctgggccctggtgaggcagttgctgttcagcaccagggacagcaactgcagggctgtgaggccggagcccaccttgtgtcctgttcgatgagctttggttactgatgagcaattgccagatcatgtcacccacccagccttttacacctgggagcctcatgcatctgggtttgggagtttggccctgctgatgatagtttgttttctcttcattccctgaattagtcatcagttctccgtggccatttggggattcatgcctgcaactgcttcagtcgaattcttttttaaagatccagtttatgttttataataattttgatcttatggctttcaacgtcaataggatcccctttaaaaataccctgctagtgttttgttttgttttgtttttctgagacaaggtcttactctgttgctcaagctggagtggagtggcacgatcatagctcactaacacctgggctcaagtgattctcccacctcagcctcccaagtagctgggactacaggtgtatgctaccatgaccagctaatttttaaatatttttgtagagacaagggtcttaccatgttgcccaggctggtctcgaacttctgggctcaagcaattgtccctcctcagcctcccaaagtgctcggattacagacatgagccactgcacctggcctgaaacacattcctagtcttttgatcctgacttcttatctgggctgctgtctctctttccttcaggtggaaaggaccccttggtaccatctcaagcagtaggaaaggacctgctcttacatatattgatggtcctcatgcaaaactctcaattcttaattagtcatgtctcagctcaaggatatcagacaggaatgaaacacacttgaaaatgagattgacctggagattttttttccctaatctctcataccttaattggaaaaataatcaattaattctatgttaattaggatatacaaagttcaccctccttgaaagtgactagggcaagccctgaagatcttcctcacctccttttatttttctataaccttgtctcctccagcaccacagggaagacaatcacagtgggtcaagagcgaccctctttcacgtgggctctgccatgacctctgagacctgcttatgatcagtgcaatgaagttagaagtaactgatgattgggagcctttgcagatagctgggcaaatgggtgatttacttatccccattctaaatggagtgagctctctttgaggctaagcaaggaggcgttgtatgctagtttctagactttgcctggagacccctttggaaatctgtcttctttttaaactcacttaatatgccttaatcatctgtgtgtaatggagtcatccgctcctcaatctaaccctcctcccctggggctttggctgtcctcaatgagagtttcatgcagaatggaaaatcctctatatgtacaatctctctccccctcatttctcttcctcctcacctccaccacccctttgcacatcagcattttaacagctgatcttttgagaagcctgtatctttttcctcttcagtagatacccttcttcatggtcctttgcctaatcaaacagaggcttttggcctttgaaaatccatgacaaggcctcagaaatcagtgttgtggaggattactccatgccaccggagaaactctggtgaaagagaaacctcgtggtctttaggatgttgggattttgagtgaacctgacctgatagcctcaggattcagggaaaggacaatcagatggcggtgttttccagggggacgcgccaaatcatgtggtttcagacaattgtgtttgcctttgtgcctccctggaagggaggccaactaagggtatcaccaagaagccaaaagagaaataggcatgagcctgtggttttaaactttacaggctgggcaaaggatttagaaagacccttagcatgattttcctaaaagagaccttagctgctccaacctggtgctgatagctgctttgttgatctatgctttaaaatttttctttataatgcccccagatggctcctggaactagtcgtaattgcaaactgtaaaaatccctcctccccagtgtagatatttaaaccagagtaagtgatggggagacattctgtggtctctgaatgtgccttccccctcaccgtgtgttaaaacacaaaagccgaagttccatggcatcatgattccgaggggctggagggataggacccactccacatctaaaggggatctgctttgggctcggtcccattagcgagtgggggactcttgctgtgtgctaagaggctgctaggactcacccagttggaattctgggtgggctcaggaagtttagagccacgtaaaaagctggtaggcatgagtgtgccaggtctttgccagcctgcgtctccttttgcaccccccaatccagagtttgctttcttttgactaaattggctcctgcagggggaagggcagaaagctaggccctctgctctggaaagtcggcctgaggtttccggcaagttaacccttaaaatggacacccctcagcccgccctcccctttggccttcccagaatctccttcagtggttgctctcacacctgtgccataacatcatcttccatgacttggacgggcacttccttgacaattcctattggcatcacacgggctacaaattatgctgttttctaaagaatttgaacttttttttttttcttttcttgagacacggtcttgctctgttggccaggctggaatgcagtggcacaatcatagctcactccagcctccaactcctgggctcaagcaatcctctcatctccacctccagagtagcctagatgacaggcgcacatcaccacgcccagctgatcttttaaatctgttttgtagaaacaggatctcactatattgcccaagctggtcttaaacttggtctcaagtgattctactgcctcagcctcccaaagtgctgggattacaggcctgagccaccatgcccagctgaatttgagctttttaataatctcattccacatagccttatagatcctgtaaatagggggggtcacaaaagtaatatattgtgttatggaagataattttgtactgtgctgtttcctaaatcataccaatatcctaaagtcatgcacttcccagatgatcgtgatcctccaaatgctttgtaagatggggcagggcgtggaaatatatatatatacacacacacacagagacacacacacacacaagtatagtatatattttcctaacctttcttctgggtccttcctcagatctttgagtcacgatagaaaaggagctcgagttctttgtgtaggaaagttaagcttcctgcctgcggtgttcttgcaattgccttaggaattcacaagctctaggagttctgaacggaaggcagacgagaggcactttatccagtcccagaaagaatctctaaccgtgtgactgagaagtcatctagaaaaacttatatttttaatgtaaaaacaaatggggcttaccagacctcacagagtattggacgtctacaagtgcttttatattttgtaactgtaaagaagtttcatatgcacagaagagcagttggaaatctggtcgactgcaataaaacaagatgacctttgcatgtacaaagatgttgcattcagactatgaaaatagcaaataaagctttggtgcaagttgcattggag

SEQ ID NO: 29169 - protein, 313 aa, Homo sapiens
MEYYYCPSLLKLLRYLWDQLKQCFSRQPTEPKDTDTLVHEAGSQYGTWTEQCQSGESLATESPDSSATSTRKQPPSSRLSSLSSQTEPTSAGDQYDCSRDQRSTSVDHSSTDLESTDGMEGPPPPDACPEKRVDDFSFIDQTSVLDSSALKTRVQLSKRSRRRAPISHSLRRSRFSESESRSPLEDETDNTWMFKDSTEEKSPRKEESDEEETASKAERTPVSHPQRMPAFPGMDPAVLKAQLHKRPEVDSPGETPSWAPQPKSPKSPFQPGVLGSRVLPSSMDKDERSDEPSPQWLKELKSKKRQSLYENQV

SEQ ID NO: 29170 - DNA, 929 bp, Homo sapiens
acagacgtcgactccagcaaaaatgtcctgactgacttcaggagagaggaattattgctacgtgcctctttcccagtgaagaaaatctctgttggctgcgagcagagaagcggcggaaggattcccgactccgggaagccaggtgtcggaaggaggaagtacgcttgaagggggtccggctggccgactctgcactcgtccgttcgtggcccaccgtggtggtcaccaaattgagggcttcctggaaggacctcctcacggtgcccatccactgggtcatgtgggtctgggccactgtgagtttatctcccagctgtctctccctccctctctggaaggcaacactgatccaggatctcactctgttgcccaggctggactgcagtggcatgatcacagctcactgcagccttggcctcccaggctcaagcgatcctcccacctcagcctcctcggtagctaggactacaggtggagcaacaccgtcagtcagaaggcagcggatggcacagggcttccgcgtaaggcctgcatcgcctgagtcatggttttctcatcttgtatgaggcccacccccttcaaaaggttgtgacaaaaaaaacaactgagataatttgtgccgctggcacatagttaacactcaataaggccgggcgcagtggcttacacctctaatcccagcactttgggaggctgaggcaggtggatcacttgaggccaggagttcgataccagcctgaccaacatggtgaaaccccatctcaactaaaaatacaaaaattagccaggcatggtggtgtgcacctgtagtcccagctacttgggagcctgaggcaggagcatctcttgaacccgggaggtggaggttgcagtgagcggagatggcaccactgcactccagcctgggcgacagaacaagactctgtctc

SEQ ID NO: 29171 - protein, 95 aa, Homo sapiens
MWVWATVSLSPSCLSLPLWKATLIQDLTLLPRLDCSGMITAHCSLGLPGSSDPPTSASSVARTTGGATPSVRRQRMAQGFRVRPASPESWFSHLV

SEQ ID NO: 29172 - DNA, 6283 bp, Homo sapiens
tggaagtgcgacctagccctgtgtatgtttcctgtgtatgtttcctcacctgcatggtggagtaatacttctggattcccagcctggcacttagctgcctcttaattctgagcggcacccgtggatgcagccggctcctggctcagggatgtttacttacccttggtttgcctgaagaaagctgctgtttttaattttttttcctccaagcaagcccaaaacttccatgagcaaaagagtccaaagaggcaagaggacactggcgttttaattgctctctccctccctaacttccttcttccctctcctcctggctggccccatggattacctgggagataaactcacagtggcccagacccacatgacccagtggatgggcaccgtgaggaggtccttccaggaagccctcaatttggtgaccaccacggtgggccacgaacggacgagtgcagagtcggccagccggacccccttcaagcgtacttcctccttccgacacctggcttcccggagtcgggaatccttccgccgcttctctgctcgcagccaacagagattttcttcactgaggaaaaggcatacagattcggaaccgccagatattgtaagcttattatgttttaaaaaatattaaaacaacactgaaagctcctcccctccagtcctcccagggagggggtcccagacatcaaaccggggaagttacttcttccagaatagttgtcagtcaaagcccaggcacttcctgtcccctgtacctgggaaagaggcacgtagcaataattcctctctcctgaagtcagtcaggacatttttgctggagtcgacgtctgtgtggacagggccagcacgtgagttgggctgaatttgccagttgatttatgtttaagtgtgaacaccccaacccccgacacgaaagctcatccttctccctatttttagggtggattagtggcacctgcctcatctcctctcaccctcctaggaagcacaagtggcggtgtcatgtgcacgctgagttgtagcttttgtcgttccaccgagctttcattggattgccaaggaaagggtcttaggagaccgaggtgtggtgggcgagtttgcccgctggccgtgaaccttgggtttggtgtgagtgggccagggagggaggccttgatttcttactcaggcaggctcgggagggcttggattgggacagcagggtggaatgacagctaatgattaaaaccttggcctgtgtcctgctaggcgacagtgcagaaacaatcgtaaggtccttctgatgatttggagaggtgggactgggcccagaaagcgaaagtgcctactgtgggggaagcacagtgagtgagtggcagagccaggtcccgaaccccaggctctgacctccccattcacggctctttgcagtccagctcccagcagatgttctccccagaccctcccaattaattcagggctgcccaggtcactgaccagacctgagcctaaagagagggcctgccattttcacataggagacttctgccacctgactgtgttggcccagtttatgggagcacttgaggacaggcgaagggctaagccagcccctttttctgggttcctcctagccaggagtgctatagtcattaagggacccagcatttagggaggagccctgagctggccctccctacactcgaggtggcagggctcacagctgccctgccaggtgcaggggctcagtatcccctctgctgacccagaggtgtgactcaccccaggtcacgcagcagccagagcaggcagttgcaaatgcaaggcaggagccgagcacttgggcatgacacgtgtctcgttcacaggacgtctccttcacagtgggtctgtgcttctttgtggcccagaacaaattagtggggcttggatttatgagacagattccccaacctctggaaggtgtgacttgccacagggaaagaaggcccctcattcattctgtctccctctgtgtgtatctctgtctctgtgatgtgtctttctgccttgctctgtctctgtttgtttctctgtcactcctgttctctctcagggtatggggttggtgacaggcaggctctgttggcatccctctttccccaccctggggagtggtgtgaccatgggcattggcatgaatcccctaggcgtcttaccctgtgttacaggttggtgccactggcaggagtggcctctccagctggttgaataaatgaagttgggtggtgcagagaaccattccgtgttgcgtcgagatgccaccaagagtgtaaatacatgctaaatacattcaagcttcaggctccttcccatgtagccaccctactgggtggtaggcaccagctggccttggccttgacagcttgaatcagactcctggctgaggagccctgacccattcttaagcctcagtttcttcctgtgtccaatgaggagaaccaaggccttggtatgagattgaagcaagcccccagcacagtgccaggcacacagaatctgcacacttgtgaatgctctctctctgttgcttgcctagatactctgcctgagcaggataaaggcagagttaggataggaacatgtgcagtgttgcagataagtcaacgaaacgcaaggccagggaccccctgcctaggggttgagtcctggctctgccgcttcccagctgtgtgatcttggacagactccttccctctctgtgccttgatttcctcctctgtgaaatggggatgatcgtgcattgatgtgctggtaaatgtgtggtgagcgtggccgttcttagcttgtggtgcttaaaaattagttcttgtggcaaccaaacctttcctctcaaaccatcacttcaaagattttcaatgagctggaaaacccacacacgccctttttactcagggacttcacttaaatattcgttttatgggaagaaactttttaaagccacagacaattacttaagagtttgggacaacagcagtatccgtggctggggctgggagggggcaggattttagtctttctgaccttgtacatgatttatctaaataatccattcatttcatcctggttcctgcctccggcttgtatttactcagagcagtgtagaagaatctattgcgggcacaaaataaccctcaaaggcgtgccctgaaatgttttctaaagccagccttgaagtaatttgctaatggcctgcctgcttctgtgtccaagggataaaagggggaaagagggaaaacaaatgctttgtctctgagccacaaaggcaggaagaggcacgtttatgctgcactcccatgtgagcctgagaaacacgcctggtactccaggtttagccgaggagacaaggtggactccagttagaggccagacagaaaattccagaacccaggaacaatggcagtggcacaggggccaagactggaataaaagcgggaagtggggggtctctgaggccatggggtgccgcaccaaggagggctttggagtcagacagacttaggcctgagtctcaactcaccacgtgcaaactgagtgaccttgggcagcttaaatcacctcttgcagcctcagtgccctcatctgaaacatggagattcagctgggacttgtctggtgggtggttcaatgggacagagtggactaagagcaagcatagccctggcatgcaggaggtgctgaataaatgttcgttccacgttgctttttggggggctcagactgtaatgtgagtcctaccttcctagaaggctagactggtgcctcagggaagcagagtaagagcctgatcaacctgtgtttgtatttactgtgtgcagggctccatgctaagcatcaggtgcatataacttgcatgtcttcattaattcactcatattttcattcaaccagtatttatttttatttatttatttagagacagagcctcactttgtcacccaggctggagtgcagtggcacagtctcggctcactgcaacctccacctcccaggttcaagtgattctcctgcctcagcctccccagtagctgggattacaggtgccctccacaacactggctaatttttgtatttttagtagagacagggtttcaccatgatgaccaggctggtctcgaactcctgacctcaagtgatccacccgcttcaacctcctaaagtgctgggattacaggcatgagccactgtgcccagcctattttcatttacttattttgaagacaaggtcttgccctgtcactggagctggagtggagtggcacgatcatagctcaccacagcctcgataccctgcgttcaagccatcctctcacctctggaatagctgggactacaggcatgtgccaccacacccagccattttttttcttttgtgtagagacagggtcctgctatgttgcccaggctggtcttgagctcctggcctcaagtgatcctcccacctcagcctcccaaagtgtggggattgcaagcatgagccactgtaccccaccccctccaccagtatgtatgtatgtatgtatgtatgtatgtatgtatgtatgtatgtatgtacgtattgagatggagtcttgctctgtcccctaggctggagtgcaatggtgcagtcttggctcactgcaacctccgcctcctgggttcaagcaattctcctgcctcagcctcctgagtagctgggactgcaggcgtgttccaccacacccggctaatttttgtatttttagtagagacagggtttcaccatgttggccaggctggtctcgaactctggcctcaggtgatccacccacctcagcctcccaaagtgctgagattacaggtgtgagccaccacacctggccccctcagtcagtatttactgagtatctaccacaactctggtgcaggagaaatggctgtgaacgaaagagacaaaactcctgccttcacagagctgccttctagtgaggctgataataaaacacatcagaatgtaaatatgtcatatatgtgctgaaaatgagagaactatcttaaaatatcaagggtctgtctttaacctcaaactattgctgtatattagagtttctcagcctcagctctaatgatatattgggctacataattgtttatggctgtggggggtaaggggtagagtctgtgcattgtaagcttatccctggttcctacccactagaagccagtagcatcccacagttgtgacaaccaaaaatatccagacattgccaagtctcttgggggcagaatcacaatgccccctcccagcccccatccaggtttgagaacactgtcgtatataatgtggtgtggggcacaataattgtagctggggtatattctcccagtgacttaaatatggggagaagggcagggatcccacatccatgagcctctcctgcttgccaggaaccacacagctgcccctgtggggtatagccccatactttgtgaatggagaaatctgaagcacagagaggggaagtcacaggactggggatccatgaagtggggactccatccagcatgtgtcggccttgctgggagcatgaccacaccctgcactggggattcactattaaacatcggccccagagctgagcgttcagtcctccagcccaaggccgagtgggagtatttgcttctgtgttaattatggactgtaatggaggcttaaaatattcagcagggctcagcatctcccccaaccacacacacacacacacacacacacacacacacacacacacacacacacacagacacactgcttcagcaagtgggggagaattgcaaggaaaggatgtatagaactcctgccttcagaagctgcatttcagccccatctccatcagtactctctccctactggggtcctccggctctgtaacaaattaccacaaacttggtggcttaaattaatataacttcatctctcacagttccggagtccagaagtccaaaatcaaaatgtcagcagtcggccgggtgtggtgactcacctgtaatcccagcactttgggaggccgaggcgggcggatcacctgagatcgggagttcaagaccagcttgaccaacatggagaaaccccatctctactaaaaatacaaaattagcccagtgtggtgacgcatgcctgtaatcccagctactcaggaggctgaggcaggagaattgcttgaacccgggaggtggaggttgcagtgagtcgagatcacaccattgcactccagcctgggcaacaagaatgcaactctgtctc

SEQ ID NO: 29173 - protein, 104 aa, Homo sapiens [sequence omitted]

SEQ ID NO: 29174 - DNA, 771 bp, Homo sapiens
ggcagcttggccactgagtccccagatagcagtgccacatcgacaaggaaacagccccccagcagccgtttgtcttctctgtcctcccaaacggagaatcagcagttccaatttttaaacatactctccctgattatgtgtatttctctttctagtggggctgtgtgcatcgttggcctatgttattgtatgtcatttttgtttgctttagaaggcgataaagcaataattcagctaattttctttgaaacttgataggtatatatgtgtttacgttaaaggacaggaggaaagatgtgcgaataatttgttctgaagtatccagtcacctcaggttatcttatccctatccaagctgtttagaagttataattgtcactcttgtatttatttccatggcttcttttcatttgagctctggtttcggtagggtgacctttgccccttggccttaagggttcataaactgcagcccaagtggtggtgcctttgcttatgaatcatcagacctgccctagtaatctttttctccagagtcttctttgaacatgacgtgggctgctggcatggaggagttgttccaaactggcctcagaacagatgcatgaatgaagggtactttttgcttttgctcacctcattttccttcatctttcttgatgaatccattatttgcaaatgctgtcaaaacatgctttccttctccctggctacctctcaggagttcatttgtctctctgtctcagcttcctccctcatcttcctttaccc

SEQ ID NO: 29175 - protein, 54 aa, Homo sapiens
MNEGYFLLLLTSFSFIFLDESIICKCCQNMLSFSLATSQEFICLSVSASSLIFL

SEQ ID NO: 29176 - DNA, 1026 bp, Homo sapiens
acgcaggaggcgcaggtgctgaagcagctggtggagccgcgcgagcacgagcgggaggtgctgcacaaggcgctggaggagaataacaacttcagccgccaggcggaggagaagctcaactacaaatggagctcagcaaggagatccgcgaggcgcacctggccgcactgcgcgagcggctgcgcgaggagctgcacgcggccgaggtgcgcaggaacaaggagcagcgagaggagatgtcgggctaagggcccgggacgggcggcgcccatcctgcgagagaacacgttcgggttttggttttgtttcgttcacctctgtctagatgcaacttttgttcctcctcccccacccccgcccccagcttcatgcttctcttccgcactcagccgccctgccctgtcctcgtggtgagtcgctgaccacggcttcccctgcaggagccgccgggcgtgagacgcggtccctcggtgcagacaccaggccgggcgcggctgggtcccccgggggccctgtgagagaggtggcggtgaccgtggtaaacccagggcggtggcgtgggatcgcgggtccttacgctgggctgtctggtcagcacgtgcaggtcagggcaggtcctctgagccggcgcccctggccagcaggcgaggctacagtacctgctgtctttccaggaggaaggggccctccccaccagggctttgcagatgtccttgaaagacccaccctagagccctttggagtgctggcccctcctgtgtcctctgccctggtggaagtggcagccacaagtcctcctcagggagccccaagggggattttgtgggaccgctgcccacagatccaggtgttggaagggcagtgggtaaggttcccaagccagcccccacacccttcccacttggcacccagagggggctgtgggtcgaggcctgactctaggcctctcctgcccacaccctctgggctgagttccttctttcccttgaatgcccagtgctggccttggaggatggtcagctggag

SEQ ID NO: 29177 - protein, 232 aa, Homo sapiens
MQLLFLLPHPRPQLHASLPHSAALPCPRGESLTTASPAGAAGRETRSLGADTRPGAAGSPGGPVREVAVTVVNPGRWRGIAGPYAGLSGQHVQVRAGPLSRRPWPAGEATVPAVFPGGRGPPHQGFADVLERPTLEPFGVLAPPVSSALVEVAATSPPQGAPRGILWDRCPQIQVLEGQWVRFPSQPPHPSHLAPRGGCGSRPDSRPLLPTPSGLSSFFPLNAQCWPWRMVS

SEQ ID NO: 29178 - DNA, 791 bp, Homo sapiens
tgctaagaagaaggttaaaaaataaaagtcaaaagtagtaccatgtagatggtggctactcagatgtattcactttgagaaaattcattgagctgtgcacattttgatttgagtacctttctgtatgtgttcttccatttaaaaacgtttgaacaggctgggcatggtggctcacacctgtacgcccagctcggcctcccaaagtgcagggattacgggcgtgagccaccgtgcctggcgaggccagtctttttctattcaggccttcaactgagtagatgaggcccttttatatcacggagggtagtctgtgctactcagcgcctactgatttaaatgttaacctcatctaagaaaaaatatctttgcataaacatctagaatagtgtctgaccaaatatctgggtacacattaggtttaagttgatgcataaaactaaccatcacagacacttacctggatagagagatggaaggatgaatagctatttgcatgacaaatggatggatggaaataattttatataggacgaattttttgtttgtttgtttgctttttgtggagaatggggtctcactgtgttgcgtaggctggtctcaaactcctgggctcaagctatcctcctgcctctgcctccctaagtgttggagttacaggcatgagccactgtgtccaaccaagataaatttttataactgcagtttatctcatagaacagatatatcgtgatttatttcagcggtccccaacctttttggcaccatggaccagttttgtgaaagacaatttt

SEQ ID NO: 29179 - protein, 36 aa, Homo sapiens
MVAHTCTPSSASQSAGITGVSHRAWRGQSFSIQAFN

SEQ ID NO: 29180 - DNA, 867 bp, Homo sapiens
agacaggcgagtctgcagacggccgtggctcctctgttcttcccgaggctacagcaacagccagaggtgttcctggggagatggcggaacagcacggagcacccgaacaggctgcagctggcaagagccatggagaccttgggggcagctacaaggtgatcttgtacgaactagagaacttccaaggcaaacgctgcgagctctcggccgagtgccccagcctgaccgacagcctgctggagaaggtgggctccatccaagtggagtccgggccgtggctggcatttgagtccagggccttccgcggggagcagtttgttctggagaagggggattatcctcgctgggatgcctggtccaacagccgtgatagtgacagccttctgtccctccggcctctgaatattgatagtccacatcacaagctgcatctgtttgagaacccagctttcagtggccgcaagatggagatagtggatgatgacgtgcccagcctgtgggctcatggcttccaggaccgtgtggcgagtgtccgtgccatcaacgggacgtgggttggctatgagttccccggctaccgtgggcgccagtacgtgtttgagcggggcgagtaccgccactggaatgagtgggacgccagccagccgcagctgcagtctgtgcgccgcatccgtgaccagaagtggcacaagcggggccgcttccccagcagctgaaaggcacccagacttcaaggacccagacccaccctggggggctgcaagggcaagaagaggaggctccagggttggggcgagggccgacctgtccacccttccctggaatctgctcaataaagcctggggttggtcccccacccgccacgtt

SEQ ID NO: 29181 - protein, 211 aa, Homo sapiens; identical to SEQ ID NO: 4003

SEQ ID NO: 29182 - DNA, 710 bp, Homo sapiens
agtctgcagacggccgtggctcctctgttcttcccgaggctacagcaacagccagaggtgttcctggggagatggcggaacagcacggagcacccgaacaggctgcagctggcaagagccatggagaccttgggggcagctacaaggtgatcttgtacgaactagagaacttccaaggcaaacgctgcgagctctcggccgagtgccccagcctgaccgacagcctgctggagaaggtgggctccatccaagtggagtccgggccgtggctggcatttgagtccagggccttccgcggggagcagtttgttctggagaagggggattatcctcgctgggatgcctggtccaacagccgtgatagtgacagccttctgtccctccggcctctgaatattgtgggttggctatgagttccccggctaccgtgggcgccagtacgtgtttgagcggggcgagtaccgccactggaatgagtgggacgccagccagccgcagctgcagtctgtgcgccgcatccgtgaccagaagtggcacaagcggggccgcttccccagcagctgaaaggcacccagacttcaaggacccagacccaccctggggggctgcaagggcaagaagaggaggctccagggttggggcgagggccgacctgtccacccttccctggaatctgctcaataaagcctggggttggtcccccacccgcc

SEQ ID NO: 29183 - protein, 113 aa, Homo sapiens
MAEQHGAPEQAAAGKSHGDLGGSYKVILYELENFQGKRCELSAECPSLTDSLLEKVGSIQVESGPWLAFESRAFRGEQFVLEKGDYPRWDAWSNSRDSDSLLSLRPLNIVGWL

SEQ ID NO: 29184 - DNA, 817 bp, Homo sapiens
gcacttctggggaaggtataaatgccacctcccgctggccgagcttcacggcactcgcaggggctggtgtcactggtcattcctgcacaggacagtccaccatggcctcagatcaccagacccaggcgggcaagccacagtccctcaaccccaagatcatcatctttgagcaggaaaactttcaaggccactcgcatgagctcaatgggccctgccccaacctgaaggaaactggcgtggagaaggcaggttctgtcctagtgcaggctggaccctgggtgggctatgaacaggccaactgcaagggcgagcagtttgtgtttgagaagggtgagtacccccgctgggactcatggaccagcagccgaaggacggactccctcagctccctgaggcccatcaaagtggacagccaagagcacaagatcatcctctatgaaaaccccaacttcaccgggaagaagatggaaatcatagatgacgatgtacccagcttccacgcccatggctaccaggagaaggtgtcatctgtgcgggtgcagagtggcacgtgggttggctaccagtaccccggctaccgtgggctgcagtacctgctggagaagggagactacaaggacagcagcgactttggggcccctcacccccaggtgcagtccgtgcgccgtatccgcgacatgcagtggcaccaacgtggtgccttccacccctccaactagtgccctccccaccatgcctccttcccaggacccaggtctgctgcccaggaaccctccagacctcccagagagtgaataaagtgtgacttgcaacttgt

SEQ ID NO: 29185 - protein, 205 aa, Homo sapiens; identical to SEQ ID NO: 4005

SEQ ID NO: 29186 - DNA, 3476 bp, Homo sapiens
atgacttgtgttaataccaaatggctggaaatataccaaccctacctgtcatggcctactggggtcctgctacataaatgcatggaggtcgctgacggccgcttggggacggcggcgtggggaccagcgcgggccggggcagctggtacctgggatcgggcaggacggtcctcttgctggcgcgggcggccggagtcgccttgctcttctccatggccatcaggtaatgatgaagcccctgctctggtccaagctacctgtgaacagcgcccagcgggccgggcccccaacctcgctcctgaacgtacccgcaagcccgccgtgagaattcagcgaagagtaaaggctggagaaagttgcgtgtctcaggctaagcagagcaaagtggggtgagggcttcgccgctaggaacagagatgcccttagggagccccctgatggaagagctctctgcttaagaaggtcagcacgcccttacactcaggtgagaggttttagtttgggtgttgaaatagaaggagagagagtattcctgcccttagggttttacggtcaatacaagagacaattagggagcatctgctgcgagcacgctcgcaccacgagggtgatttagggaagtggaaaagcaagatacagcccaaacaccgaagctggggggtaatttccagcttcccaatcttccgtctcggtgtctttcatcatcacaccactccgctgcctggggttttcagttgcttctaatttttctacagtttgcacacaagtccgcattcagtattcatgtgacactcaggctggagtggtggtaagggacacgcaggcagtcttaggaagacttaacctggaaattgatgttttaaaatccctttcattcacctgaattggtcacgtgttcccatgagcctagacgttgctagaattggagtaaatgttctgtctaaacttacagggttaatgggacccaccagatacagttaaggtcaaatttcagatatttcatgtaatgtcattgcagaagcagcctgattccatcatcaagtagcctgatgccctcttttattttctgtccccacccccacccccctcaatctgattccctgctatgcctgccgtcaccattggccagttttaccacgtttttcaagatccaaggcacaataggcataaagttatcctgaaaaggacaagaggagtgtcagaagtaggaatggcagtcgaaggagcttcgtctggcagcagaaagccaaaatgacaggcaagcacaaaatatattaatgagacaaagctatgcatgagcgaaatatcaaactttcatcttctacccacttttttttttttttgcttaaaaataggaagacagaatgtcttgtcaagggtcaccccaggaggaggagtaaattctccaaaaatcagaacatatttttatgatttaattaatgcaatttctctcaatgtttctgtttgtcatttgagcatccacatgatcagacctgacatctgcctacattttattggtcatctttgacttcagttaagaaccctttgggttttgctttttgcttttttttccccccagcagcacactgtagtaagtttggaacaagacacacctgaaatcaagtccctgctctgggctgggtgatcttagaggcaatctcttaacctcattctactttattgttctcataggaaaagtggaaatgaggccttttaccccagggttgttgagaagacaggggagaaaaagcacataaaaatgcaccttgtcgggcgcagtggctcacacctgtaatcctgcactttgggagtctgaggcaggtggatcgcttgaggccaggagttcaagaccagcctggccaacatgaaaaatacattaaaaataatgtctctattaaaaatacaaaaattagccaggcatggtggtgcacgcctgtaacccagctactcaggaggctgaggcacaagaatcgcttgaacccaggaagtagaagctacagtgagtcgagattgcaccactgcacgccagcctgggtgaaagagtgagaccctgtctgaaaaaaaaaaaaaaaaaaaagcattttgcctggcacccagtagatcctcaataaaggtcatgtcacttcctctgtttattttgcttcattttaccctggcatgctagagaagatgctgaaactagttgttcacagttgttacacttgaagcaggaagaccccttaccaaaaataacatctccctagggcatttctcagaactaaaatggcaaaaacatttgcatttacaaacaagaacaattactcttttggcagaaagaacaaggagtccaaaatttggtcctctaactgaggcccctacaccatttgagtcagctgactcaattacccaggggtatttttttccggtgttcatagtgtatgaatttctgttccctggctgtctctttggttgtctcactttctccaccccctcttctttctctttttcttgactcttttaatactgaacagctttttgtcttcactgcaaacagaaggggttaatgacagtgatgatgaagttgtcataactgacctgctggatcctgttactaaacaccatccccagcctgtaatcatcacaaagaacagagaaaacaaatagcaacccatttgtacttagctaataatgttcccttgcaaataattatgtctcccacccccagaggatttaaatgacttggggctcacgctgtttgtgaaaatagacaaaactccagcgttcccacaagattaataatgttcccttttcttcttttctatgcctttccatcgttataggagatgttgctgagatgggtgcattaaagtttaggctttccagagtttatattgctaacgacttgaaaggaaaaaagctaactagagaactgactggtcttatttgttttagatttcgggctttactaagacttcctacactcaatctctggactgtaaatgctgggtggggtgggagctgggaatgttattctgggaaattaatcacaaatgaaaagaaaatcaactctaagacttcaattacaagatttttgaaaatggcagaacatggctggccttcattcaagtccgaatatttaaagcaatccttgctaagaagaacttgattttatataaggagtcccttaaatacagttgcttctcaagaaaaccacacacaattgatgtttgaatggctttatttacaaacatctcactctgtaagcctctgcaggtatttctagcctccctgggaggccactgtcccgtttcacctgtaatttggatcacaattctgtttgttgtcacacacatcatacgagctgcttttcatgctacttttatccacaaagctttacaaactttaatggcagctctatatatgacaactttaaaaagatctgccaaaaggtatgatgccaagctttggttttattaaactattagctattagcactg

SEQ ID NO: 29187 - protein, 130 aa, Homo sapiens
MTCVNTKWLEIYQPYLSWPTGVLLHKCMEVADGRLGTAAWGPARAGAAGTWDRAGRSSCWRGRPESPCSSPWPSGNDEAPALVQATCEQRPAGRAPNLAPERTRKPAVRIQRRVKAGESCVSQAKQSKVG

SEQ ID NO: 29188 - DNA, 3081 bp, Homo sapiens
ggcggcgtggggaccagcgcgggccggggcagctggtacctgggatcgggcaggacggtcctcttgctggcgcgggcggccggagtcgccttgctcttctccatggccatcaggtaatgatgaagcccctgctctggtccaagctacctgtgaacagcgcccagcgggccgggcccccaacctcgctcctgaacgtacccgcaagcccgccgtgagaattcagcgaagagtaaaggctggagaaagttgcgtgtctcaggctaagcagagcaaagtggggtgagggcttcgccgctaggaacagagatgcccttagggagccccctgatggaagagctctctgcttaagaaggtcagcacgcccttacactcaggtgagaggttttagtttgggtgttgaaatagaaggagagagagtattcctgcccttagggttttacggtcaatacaagagacaattagggagcatctgctgcgagcacgctcgcaccacgagggtgatttagggaagtggaaaagcaagatacagcccaaacaccgaagctggggggtaatttccagcttcccaatcttccgtctcggtgtctttcatcatcacaccactccgctgcctggggttttcagttgcttctaatttttctacagtttgcacacaagtccgcattcagtattcatgtgacactcaggctggagtggtggtaagggacacgcaggcagtcttaggaagacttaacctggaaattgatgttttaaaatccctttcattcacctgaattggtcacgtgttcccatgagcctagacgttgctagaattggagtaaatgttctgtctaaacttacagggttaatgggacccaccagatacagttaaggtcaaatttcagatatttcatgtaatgtcattgcagaagcagcctgattccatcatcaagtagcctgatgccctcttttattttctgtccccacccccacccccctcaatctgattccctgctatgcctgccgtcaccattggccagttttaccacgtttttcaagatccaaggcacaataggcataaagttatcctgaaaaggacaagaggagtgtcagaagtaggaatggcagtcgaaggagcttcgtctggcagcagaaagccaaaatgacaggcaagcacaaaatatattaatgagacaaagctatgcatgagcgaaatatcaaactttcatcttctacccacttttttttttttttgcttaaaaataggaagacagaatgtcttgtcaagggtcaccccaggaggaggagtaaattctccaaaaatcagaacatatttttatgatttaattaatgcaatttctctcaatgtttctgtttgtcatttgagcatccacatgatcagacctgacatctgcctacattttattggtcatctttgacttcagttaagaaccctttgggttttgctttttgcttttttttccccccagcagcacactgtagtaagtttggaacaagacacacctgaaatcaagtccctgctctgggctgggtgatcttagaggcaatctcttaacctcattctactttattgttctcataggaaaagtggaaatgaggccttttaccccagggttgttgagaagacaggggagaaaaagcacataaaaatgcaccttgtcgggcgcagtggctcacacctgtaatcctgcactttgggagtctgaggcaggtggatcgcttgaggccaggagttcaagaccagcctggccaacatgaaaaatacattaaaaataatgtctctattaaaaatacaaaaattagccaggcatggtggtgcacgcctgtaacccagctactcaggaggctgaggcacaagaatcgcttgaacccaggaagtagaagctacagtgagtcgagattgcaccactgcacgccagcctgggtgaaagagtgagaccctgtctgaaaaaaaaaaaaaaaaaaaagcattttgcctggcacccagtagatcctcaataaaggtcatgtcacttcctctgtttattttgcttcattttaccctggcatgctagagaagatgctgaaactagttgttcacagttgttacacttgaagcaggaagaccccttaccaaaaataacatctccctagggcatttctcagaactaaaatggcaaaaacatttgcatttacaaacaagaacaattactcttttggcagaaagaacaaggagtccaaaatttggtcctctaactgaggcccctacaccatttgagtcagctgactcaattacccaggggtatttttttccggtgttcatagtgtatgaatttctgttccctggctgtctctttggttgtctcactttctccaccccctcttctttctctttttcttgactcttttaatactgaacagctttttgtcttcactgcaaacagaaggggttaatgacagtgatgatgaagttgtcataactgacctgctggatcctgttactaaacaccatccccagcctgtaatcatcacaaagaacagagaaaacaaatagcaacccatttgtacttagctaataatgttcccttgcaaataattatgtctcccacccccagaggatttaaatgacttggggctcacgctgtttgtgaaaatagacaaaactccagcgttcccacaagattaataatgttcccttttcttcttttctatgcctttccatcgttataggagatgttgctgagatgggtgcattaaagtttaggctttccagagtttatattgctaacgacttgaaaggaaaaaagctaactagagaactgactggtcttatttgttttagatttcgggctttactaagacttcctacactcaatctctggactgtaaatgctgggtggggtgggagctgggaatgttattctgggaaattaatcacaaatgaaaagaaaatcaactctaagacttcaattacaagatttttgaaaatggcagaacatggctggccttcattcaagtccgaatatttaaagcaatccttgctaagaagaacttgattttatataaggagtcccttaaatacagttgcttctcaagaaaacc

SEQ ID NO: 29189 - protein, 103 aa, Homo sapiens [sequence omitted]

SEQ ID NO: 29190 - DNA, 581 bp, Homo sapiens
gcaggttcctgctccagcgcggctcctggactggccccgggtgctggccccgggggtttcaatccaagcataattcagtgaagcatgtgtttggcagcgggacccagctcaccgttttaggtcagcccaaggccaccccctcggtcactctgttcctgccgtcctctgaggagctccaagccaacaaggccacactggtgtgtctcatgaatgacttctatctgggaatcttgacggtgacctggaaggcagatggtacccccatcacccagggcgtggagatgaccacgccctccaaacagagcaacagcaagtacatggccagcagctacctgagcctgacgcccgagcagtggaggtcccgcagaagctacagctgccaggtcatgcatgaagggagcactgcagagaagacggtggcccctgcagaatgttcataggttcccagcccccaccccacccacaggggcctggagctgcaggatcccaggggaggcgtctctctctgcatcccaagccatccagcccttctccctgtacccagtaaaccctcagtaaatatcctctttgtcaaccagaaa

SEQ ID NO: 29191 - protein, 77 aa, Homo sapiens [sequence omitted]

SEQ ID NO: 29192 - DNA, 373 bp, Homo sapiens
gtgcctcttggcgcttgtcgtgtttctttttgagtcagctccgactgtggctggcccagggggaaggcagcatccagttatgaatctgatatttatgaggccgtggctgctgcaacatcagaatccactaccgtagagcctggcaagctggatgtgggagccacggagggccaagacctgcagcacatcagcaaccaaaagatgcccacagcttctgttctggacctggaagatattgcgcttgatattgcggaggaggtgttatctgaaatggtgagatgcattccttcatctggaagagaattttttttttttctggggcttcttcccttattaatgaaatgaagacataaaagtctgaccatatacataa

SEQ ID NO: 29193 - protein, 47 aa, Homo sapiens [sequence omitted]

SEQ ID NO: 29194 - DNA, 2037 bp, Homo sapiens
atgacctgttaccaaccaagccctccagagcccagtaccatgggccaatggtggccttccctcgcctgctcctggggcaagttgccaggagtcgtcctggtccgcggcgcccaacggggaagacgaagatgcagggacacgcgcgaggagccgccgcagccgccgccgccgcgctgtggagcccgagtgagcgcggcgccagcccgtccggccgctggacaacatggaggctgcactgcccgggccgccgtggccgctgctgctggcgctgtgcggctgcccggcccccgccgcaggtacatgtactgggcagattggggtgagacgccctggatcgagcaggtggggatggacgacagcacccagaagatcattgtggacttggacatttactggcccaatagactgaccatcgacctgggggagaagaagctctactgggctgacactaagctcggcttcatccaccgtgccaacctggacggctcgttccggcagaaggtggtgaagggcagcctgacgcaccccttcaccctgacactctccggggacactctgcactggatggactggctgacgtgctccatccatgcctgcaacaggaacactgcggggaagaggaacgagatcttgagcgccctctactcagcatggatatccaggtgctgagccaggagcagcagcctttctgagccaaggaggtcctgctgctggcccggtagacggaccaatggagggtctcgctggacacaccggacttcaccgacatcgtgctgcagctggacgacatccagcatgccatcgccatcaactatgacccaatggagggccacgtctactggacggatgacgaggtgtgggccatccgcagggcatacctggatgggtctggggcgcagacgctgatcaacaccaagatcaacgaccccgatgacatcgcagtcaactgggtggcccgaagcctctattggacccacacaggcactgaacacatcgaggtgacgtgcctcaacagcacctcccacaagatcctggtgtcagaggacatggacgagccccgtgccattgcactgcatcccgagatgggcctcacgtactggatagactggggagagaaccctgaaatcaagcgtgccaacctggacaggcaggagctgcgcgtgctggtcaatgcttccctcgggtggcccaacggcctggccctggacctgcaggaagggaagctctactggggagatgccaagacagacaagatcgaggcgatcagtgtcgatgagacgaagaggcagaccctcctgaaggacaagctcccacacattttcaggttcaccctgctgggggacttcatctactggaccgcctggcagcaccacagcatcaagcgggtacacaaggtcaaggccaaccgggacgtcatcattgaccagctgcccgacctgatggggctcaaagctgtgaacgtggacaaggtcgtcggaaccaaccctcatgcggacaggaatgggggtgcagccacctgtgcttcttcacgccccacacaacccggtttggctgccccatctagggcctggaactgctgagtgacatgaagacctgcatcatgcccaaggccttcttggtcttcaccagtagagccgccatccacaggatctccctcgagaccaacaacaacgatgtggccatcctgctctcggcgtcaaggaggcctcggccctggactttgatgtgtccagcaaccacatctactggacagacatcagcctgaaggtagcgtgggcccgaacatgcacacgtgcagcctatatgggaaaaccttccctctgtacctgcctcaaaggtttcagacatttttcttaaagcactataatatttattgtaacacaattcaagctaattaaatatgagcaagcctatttcaaaaaaaatagacgattataatgagcaaatccggtagacacacatgacggcttttgtgaaatgcttgtgtgaatgtgaaatgtctgttgtccgttgagcttgacctcagacaccccaccc

SEQ ID NO: 29195 - protein, 252 aa, Homo sapiens; identical to SEQ ID NO: 4009

SEQ ID NO: 29196 - DNA, 1949 bp, Homo sapiens
atgacctgttaccaaccaagccctccagagcccagtaccatgggccaatggtggccttccctcgcctgctcctggggcaagttgccaggagtcgtcctggtccgcggcgcccaacggggaagacgaagatgcagggacacgcgcgaggagccgccgcagccgccgccgccgcgctgtggagcccgagtgagcgcggcgccagcccgtccggccgctggacaacatggaggctgcactgcccgggccgccgtggccgctgctgctggcgctgtgcggctgcccggcccccgccgcaggtacatgtactgggcagattggggtgagacgccctggatcgagcaggtggggatggacgacagcacccagaagatcattgtggacttggacatttactggcccaatagactgaccatcgacctgggggagaagaagctctactgggctgacactaagctcggcttcatccaccgtgccaacctggacggctcgttccggcagaaggtggtgaagggcagcctgacgcaccccttcaccctgacactctccggggacactctgcactggatggactggctgacgtgctccatccatgcctgcaacaggaacactgcggggaagaggaacgagatcttgagcgccctctactcagcatggatatccaggtgctgagccaggagcagcagcctttctgagccaaggaggtcctgctgctggcccggtagacggaccaatggagggtctcgctggacacaccggacttcaccgacatcgtgctgcagctggacgacatccagcatgccatcgccatcaactatgacccaatggagggccacgtctactggacggatgacgaggtgtgggccatccgcagggcatacctggatgggtctggggcgcagacgctgatcaacaccaagatcaacgaccccgatgacatcgcagtcaactgggtggcccgaagcctctattggacccacacaggcactgaacacatcgaggtgacgtgcctcaacagcacctcccacaagatcctggtgtcagaggacatggacgagccccgtgccattgcactgcatcccgagatgggcctcacgtactggatagactggggagagaaccctgaaatcaagcgtgccaacctggacaggcaggagctgcgcgtgctggtcaatgcttccctcgggtggcccaacggcctggccctggacctgcaggaagggaagctctactggggagatgccaagacagacaagatcgaggcgatcagtgtcgatgagacgaagaggcagaccctcctgaaggacaagctcccacacattttcaggttcaccctgctgggggacttcatctactggaccgcctggcagcaccacagcatcaagcgggtacacaaggtcaaggccaaccgggacgtcatcattgaccagctgcccgacctgatggggctcaaagctgtgaacgtggacaaggtcgtcgggcctggaactgctgagtgacatgaagacctgcatcatgcccaaggccttcttggtcttcaccagtagagccgccatccacaggatctccctcgagaccaacaacaacgatgtggccatcctgctctcggcgtcaaggaggcctcggccctggactttgatgtgtccagcaaccacatctactggacagacatcagcctgaaggtagcgtgggcccgaacatgcacacgtgcagcctatatgggaaaaccttccctctgtacctgcctcaaaggtttcagacatttttcttaaagcactataatatttattgtaacacaattcaagctaattaaatatgagcaagcctatttcaaaaaaaatagacgattataatgagcaaatccggtagacacacatgacggcttttgtgaaatgcttgtgtgaatgtgaaatgtctgttgtccgttgagcttgacctcagacaccccaccc

SEQ ID NO: 29197 - protein, 224 aa, Homo sapiens
MEGHVYWTDDEVWAIRRAYLDGSGAQTLINTKINDPDDIAVNWVARSLYWTHTGTEHIEVTCLNSTSHKILVSEDMDEPRAIALHPEMGLTYWIDWGENPEIKRANLDRQELRVLVNASLGWPNGLALDLQEGKLYWGDAKTDKIEAISVDETKRQTLLKDKLPHIFRFTLLGDFIYWTAWQHHSIKRVHKVKANRDVIIDQLPDLMGLKAVNVDKVVGPGTAE

SEQ ID NO: 29198 - DNA, 710 bp, Homo sapiens
ctgctgctggcccggtagacggaccaatggagggtctcgctggacacaccggacttcaccgacatcgtgctgcagctggacgacatccagcatgccatcgccatcaactatgacccaatggagggccacgtctactggacggatgacgaggtgtgggccatccgcagggcatacctggatgggtctggggcgcagacgctgatcaacaccaagatcaacgaccccgatgacatcgcagtcaactgggtggcccgaagcctctattggacccacacaggcactgaacacatcgaggtgacgtgcctcaacagcacctcccacaagatcctggtgtcagaggacatggacgagccccgtgccattgcactgcatcccgagatgggcctcacgtactggatagactggggagagaaccctgaaatcaagcgtgccatcctgctctcggcgtcaaggaggcctcggccctggactttgatgtgtccagcaaccacatctactggacagacatcagcctgaaggtagcgtgggcccgaacatgcacacgtgcagcctatatgggaaaaccttccctctgtacctgcctcaaaggtttcagacatttttcttaaagcactataatatttattgtaacacaattcaagctaattaaatatgagcaagcctatttcaaaaaaaatagacgattataatgagcaaatccggtagacaca

SEQ ID NO: 29199 - protein, 132 aa, Homo sapiens
MEGHVYWTDDEVWAIRRAYLDGSGAQTLINTKINDPDDIAVNWVARSLYWTHTGTEHIEVTCLNSTSHKILVSEDMDEPRAIALHPEMGLTYWIDWGENPEIKRAILLSASRRPRPWTLMCPATTSTGQTSA

SEQ ID NO: 29200 - DNA, 3561 bp, Homo sapiens
gcctagagggagaaaacttgttgaaattcagagatccccctccccctaccaatacacaccaaatcagacgcctctgaccagatctgaatttggctctcagagatttccattgtagccaggcagttggggcactttctgagtgctgcctccacctcactgtccccagcctgcctgcctccgtttccctagccctgggcctgtgccgctgtcaccatcacctgggcgccctctagtggatgaatcggattatgcacgagggggcttggagcaggattcagaaggggctcctgtccttccttgaaatgctggacgccgggatcctggaacagctcttcaggtctctgcattcctcctggcaacagccagagcctgggcgcagggggctactgttgtttgaaggctgaaggctgcagcctggtagggcactcaggagacctggcagttggctgcagggccaggtctaggggccagggcatgagggatgctctgggctggctcagccccgggcccccatgcggattgtgactgtgggggcatggccacatgatgttgaggggggatctctgaccctgaccttcttggctctgtgcatccttgaaaccagaaaggtctggaacaaatcagtgaacaatgccctaactcggggagggagccacatcctgaccccagcagcctcagaaggatccgtgtcagggttatggggcaccctgggggccccgagtctgcatgggtctccacatgcaacttctgccggaaactctgaaaaatcccaactggggggtcataggacacaatcagaaatgctgatgccactgtgtgtggatccccgggccctggggggtcaggagcatgtagaaggtgggccacagggggttcataagagaatcctgtaaccgcccctgccccccaaacttagaagcccactggagggccatgggtgaaagcttgggggggtgtcctgtggagtgggtggtggggggtctttgggtttacatgctgctgggcctgagcagcaggaccccgtccacagctgatccctgggccctgctgctcagctgctctcttgagtgttgctgtggctgccgagagagcctgagtcgagcctctcttgtgccggccgtacgctgtcaggccacgctggtgagtttggcaaggcacagatgcccagagcagagaactttccttggggatttaatatgtgcgaatcttgaggtccggcaaatctttccctcagctagagagggggtttttgagactagaatcacctcagcatcctcctgtccccagctgtgtccagcctgtctgcagggacatcctgagaggactaggctctcccctcatccacctgcgtaagtgccaccctgaagcctgtccacccatgcttggagaggcttggcctcaacctgcttagccagcagcaggcttgggcctggggtgcagcagagacccaggtggctgtggggtggttgcttcatggggtggttctgaaacgcagttggaagtgcatggacagtgccttacctgttctctgtgggaccctgtttagaaaccaggtctgagttactgggggtcatcgctacattctgatggcctagctgtgtggaggccacggtggagccccatccaaggagccagggccctgggtctagccgtgaccagaacgcatgccctggaggtgtttctcatcttgcacctgtgttgcctggtgtctcaagtggccacaaaactgtgttagctcttggtgcccctgggcttcggaaccagggtttcccttcatctcagtgacccgggagcatctgggcagtgagtaaagagggtgatttacttgatgggtacgtttggtcctgcctgggagcccccccaggcacggtcctgggacctgaagctgccctcgttggtggaggggagggagagagcttcagggatgaggtggcgttgagctgggcgggaagggtgagcccctgcaaggtggggtgggtgtgctggggacgctgagcagcacggccagcaggtgggtcttcagctcggtacccggtgggacttgtggttggggctggtgtgtggccaggagaggggctggcagaagacaagggggactgtgaggcagctcccatccagcggttgaagcctgatggcctggctctgtgcctcagttctctcatctataaaatgagaaaacagtgccagcctcccagacctgtcatgaggatgaacgagtgaccacgtagcatgggctgggtgcgtgtcacctaacattaccagcctttgcaaggagagccctggggacctggctgagtttttcccttgcctggcccactgcacctgtccccacaggagccaaggaggtcctgctgctggcccggtagacggaccaatggagggtctcgctggacacaccggacttcaccgacatcgtgctgcagctggacgacatccagcatgccatcgccatcaactatgacccaatggagggccacgtctactggacggatgacgaggtgtgggccatccgcagggcatacctggatgggtctggggcgcagacgctgatcaacaccaagatcaacgaccccgatgacatcgcagtcaactgggtggcccgaagcctctattggacccacacaggcactgaacacatcgaggtgacgtgcctcaacagcacctcccacaagatcctggtgtcagaggacatggacgagccccgtgccattgcactgcatcccgagatgggcctcacgtactggatagactggggagagaaccctgaaatcaagcgtgccaacctggacaggcaggagctgcgcgtgctggtcaatgcttccctcgggtggcccaacggcctggccctggacctgcaggaagggaagctctactggggagatgccaagacagacaagatcgaggcgatcagtgtcgatgagacgaagaggcagaccctcctgaaggacaagctcccacacattttcaggttcaccctgctgggggacttcatctactggaccgcctggcagcaccacagcatcaagcgggtacacaaggtcaaggccaaccgggacgtcatcattgaccagctgcccgacctgatggggctcaaagctgtgaacgtggacaaggtcgtcggaaccaaccctcatgcggacaggaatgggggtgcagccacctgtgcttcttcacgccccacacaacccggtttggctgccccatctagggcctggaactgctgagtgacatgaagacctgcatcatgcccaaggccttcttggtcttcaccagtagagccgccatccacaggatctccctcgagaccaacaacaacgatgtggccatcctgctctcggcgtcaaggaggcctcggccctggactttgatgtgtccagcaaccacatctactggacagacatcagcctgaaggtagcgtgggcccgaacatgcacacgtgcagcctatatgggaaaaccttccctctgtacctgcctcaaaggtttcagacatttttcttaaagcactataatatttattgtaacacaattcaagctaattaaatatgagcaagcctatttc

SEQ ID NO: 29201 - protein, 252 aa, Homo sapiens; identical to SEQ ID NO: 4009

SEQ ID NO: 29202 - DNA, 597 bp, Homo sapiens
agacgaagaaggtgactagacttagggacttcaagaagagcaagcactgaaaagagcagtttaactacctcggacagtaagcaacaagcctgcagtccccagataatcggcccagagggagctgaaaggatggagttggaaaggggaaccacagagcccgggaagaaggagcgaccaggatggagcgcaaacgagtgacaggcaaggagcccaaagggaccacaccaatgcaacaggtggtgatgaaactcctgctctggtccgggctaccggtgaacagcgtccagcggccgggcccccaacctccttcctgagcctgaacatccccccaaccccgccttgagaattcagcgaagagtaaaagctggagaaaattgcgtgtctcaggctaagcagagcaaagtggggtgacggctcccccgctaggaacagagatgcccttagggaaccccctgatggaagagctcccggcttaagaaggtcaccactcccttacactcagcccccctcaatctgattccctgctatgcctgccatcaccactggccagttttaccacatatttctcaagatccaaggcacaataggcataaagtt

SEQ ID NO: 29203 - protein, 44 aa, Homo sapiens
MERKRVTGKEPKGTTPMQQVVMKLLLWSGLPVNSVQRPGPQPPS

SEQ ID NO: 29204 - DNA, 951 bp, Homo sapiens
cgtggcgtgcgtggcgtggagtccagaatgagaagaaggaaagcggggccggttccttcaggacccgcctcagggggcaccgcggcggcttggggaccacttggagccccgtcctggggagaaaacagctcacgtctatggccctgactgcttaggcgggagctgcgtgcagctcagcttctccggggcatttttttctacacgctgggtgagctatgaacaggccaactgcaagggcgagcagtttgtgtttgagaagggcgagtacgcccactgggactggtggaccagcagccagaggacagactcagcagcctgaggcccatcaaagtggacagccaagagcacaagatcatcctctatgaaaaccccaacttcaccgggaagaagatggaaatcatagatgacgatgtacccagcttccacgcccatggctaccaggagaaggtgtcatctgtgtgggtgcggagtggcatgtgggttggctactagtaccctggctaccgtgggctgcagtacctgctggagaagggagactacaaggacagcagcgactttggggcccgtcaccctcaggaagtttctcttttcatcatcatgagtcctcgaagggtgctgtgttctgtccctctcactcctgactggcagtgactctaaaaaatgccccacccgtggggaggccttggaaagtagaagtggagatgcagtcactgatctcgggagaagctgaaaacacagtcatcagccctaggagaggggttttctgcacttccttggccatcgctggcctctggggtgtttcaagtttttctggaaaacaggatcattctgtggagtgagtctcaggaccttgacatgggaggaacaaaacttttcttgcttttttggtgcaccctgggctgaaataagaaaaccactaggggtgagtcttcaaagcaaagacaacccagg

SEQ ID NO: 29205 - protein, 65 aa, Homo sapiens
MTMYPASTPMATRRRCHLCGCGVACGLATSTLATVGCSTCWRRETTRTAATLGPVTLRKFLFSSS

SEQ ID NO: 29206 - DNA, 820 bp, Homo sapiens
cgtggagtccagaatgagaagaaggaaagcggggccggttccttcaggacccgcctcagggggcaccgcggcggcttggggaccacttggagccccgtcctggggagaaaacagctcacgtctatggccctgactgcttaggcgggagctgcgtgcagctcagcttctccggggcatttttttctacacgctgggtgagctatgaacaggccaactgcaagggcgagcagtttgtgtttgagaagggcgagtacgcccactgggactggtggaccagcagccagaggacagactcagcagcctgaggcccatcaaagtggacagccaagagcacaagatcatcctctatgaaaaccccaacttcaccgggaagaagatggaaatcatagatgacgatgtacccagcttccacgcccatggctaccaggagaaggtgtcatctgtgtgggtgcggagtggcatgtgggttggctactagtaccctggctaccgtgggctgcagtacctgctggagaagggagactacaaggacagcagcgactttggggcccgtcaccctcagatgttacagaagcacagagaggttaagtaacttgcccagtgctgcacagaaactaagtggtggagctgggatccgaacccaagctatctgactgtattgacaaacaaaagatgcatcaaaacccaaaagggcgagcgaggtattatggccattactggggcagctggtcatcttggcaatcaaaaatcctgccagctggacacagttcaagttcaattgcatctccctgaccaggtagaacccatccgtgttgaaata

SEQ ID NO: 29207 - protein, 87 aa, Homo sapiens
MTMYPASTPMATRRRCHLCGCGVACGLATSTLATVGCSTCWRRETTRTAATLGPVTLRCYRSTERLSNLPSAAQKLSGGAGIRTQAI

SEQ ID NO: 29208 - DNA, 727 bp, Homo sapiens
gtggagtccagaatgagaagaaggaaagcggggccggttccttcaggacccgcctcagggggcaccgcggcggcttggggaccacttggagccccgtcctggggagaaaacagctcacgtctatggccctgactgcttaggcgggagctgcgtgcagctcagcttctccggggcatttttttctacacgctgggtgagctatgaacaggccaactgcaagggcgagcagtttgtgtttgagaagggcgagtacgcccactgggactggtggaccagcagccagaggacagactcagcagcctgaggcccatcaaagtggacagccaagagcacaagatcatcctctatgaaaaccccaacttcaccgggaagaagatggaaatcatagatgacgatgtacccagcttccacgcccatggctaccaggagaaggtgtcatctgtgtgggtgcggagtggcatgtgggttggctactagtaccctggctaccgtgggctgcagtacctgctggagaagggagactacaaggacagcagcgactttggggcccgtcaccctcaggtacagtccgtgcgctgcatccacgacatgcaggggcaccaatgtggtgccttccacccctccaactagtgcccaccccaccatgcctccttcccaggacccaggtctgctgcccaggaaccctccagacctcccagagagtgaatgaagtgtgacttgcaacttg

SEQ ID NO: 29209 - protein, 106 aa, Homo sapiens
MTMYPASTPMATRRRCHLCGCGVACGLATSTLATVGCSTCWRRETTRTAATLGPVTLRYSPCAASTTCRGTNVVPSTPPTSAHPTMPPSQDPGLLPRNPPDLPESE

SEQ ID NO: 29210 - DNA, 1132 bp, Homo sapiens
gtggagtccagaatgagaagaaggaaagcggggccggttccttcaggacccgcctcagggggcaccgcggcggcttggggaccacttggagccccgtcctggggagaaaacagctcacgtctatggccctgactgcttaggcgggagctgcgtgcagctcagcttctccggggcatttttttctacacgctgggtgagctatgaacaggccaactgcaagggcgagcagtttgtgtttgagaagggcgagtacgcccactgggactggtggaccagcagccagaggacagactcagcagcctgaggcccatcaaagtggacagccaagagcacaagatcatcctctatgaaaaccccaacttcaccgggaagaagatggaaatcatagatgacgatgtacccagcttccacgcccatggctaccaggagaaggtgtcatctgtgtgggtgcggagtggcatgtgggttggctactagtaccctggctaccgtgggctgcagtacctgctggagaagggagactacaaggacagcagcgactttggggcccgtcaccctcaggtacagtccgtgcgctgcatccacgacatgcaggggcaccaatgtggtgccttccacccctccaactagtgcccaccccaccatgcctccttcccaggacccaggtctgctgcccaggaaccctccagacctcccagagagtgaatgaagtgtgacttgcaacttgtctgctgtgggtctttgatctcccctggcagctggtgtgtgtgtgtgtgtgtgtgtgtgtgcgtgcgtgtgtgtgatagaaatgagaattggcaagtatctgggctatgagtagggcaacagaacccttactgagtcttacggttctgcagcttcttagctcttaactgtgtgaccttggacacagtgcccaacctctctgagcctttgtttcttcacctgacttgcaattcccttgcctctgagtgtctggctggtctcgaacccctgaacttgtgatctgcctgcctcagcctcccaaaatgctgggattacaggcgtgagccactgcacctggccaaacttgaagaaattatttctaatccccggtcacaaagaaattccctaatagatttttttctctaaa

SEQ ID NO: 29211 - protein, 106 aa, Homo sapiens; identical to SEQ ID NO: 29209

SEQ ID NO: 29212 - DNA, 1003 bp, Homo sapiens
gtggagtccagaatgagaagaaggaaagcggggccggttccttcaggacccgcctcagggggcaccgcggcggcttggggaccacttggagccccgtcctggggagaaaacagctcacgtctatggccctgactgcttaggcgggagctgcgtgcagctcagcttctccggggcatttttttctacacggacagccaagagcacaagatcatcctctatgaaaaccccaacttcaccgggaagaagatggaaatcatagatgacgatgtacccagcttccacgcccatggctaccaggagaaggtgtcatctgtgtgggtgcggagtggcatgtgggttggctactagtaccctggctaccgtgggctgcagtacctgctggagaagggagactacaaggacagcagcgactttggggcccgtcaccctcaggtacagtccgtgcgctgcatccacgacatgcaggggcaccaatgtggtgccttccacccctccaactagtgcccaccccaccatgcctccttcccaggacccaggtctgctgcccaggaaccctccagacctcccagagagtgaatgaagtgtgacttgcaacttgtctgctgtgggtctttgatctcccctggcagctggtgtgtgtgtgtgtgtgtgtgtgtgtgcgtgcgtgtgtgtgatagaaatgagaattggcaagtatctgggctatgagtagggcaacagaacccttactgagtcttacggttctgcagcttcttagctcttaactgtgtgaccttggacacagtgcccaacctctctgagcctttgtttcttcacctgacttgcaattcccttgcctctgagtgtctggctggtctcgaacccctgaacttgtgatctgcctgcctcagcctcccaaaatgctgggattacaggcgtgagccactgcacctggccaaacttgaagaaattatttctaatccccggtcacaaagaaattccctaatagatttttttctctaaa

SEQ ID NO: 29213 - protein, 106 aa, Homo sapiens; identical to SEQ ID NO: 29209

SEQ ID NO: 29214 - DNA, 1372 bp, Homo sapiens
gtggagtccagaatgagaagaaggaaagcggggccggttccttcaggacccgcctcagggggcaccgcggcggcttggggaccacttggagccccgtcctggggagaaaacagctcacgtctatggccctgactgcttaggcgggagctgcgtgcagctcagcttctccggggcatttttttctacacgctgggtgagctatgaacaggccaactgcaagggcgagcagtttgtgtttgagaagggcgagtacgcccactgggactggtggaccagcagccagaggacagactcagcagcctgaggcccatcaaagtggacagccaagagcacaagatcatcctctatgaaaaccccaacttcaccgggaagaagatggaaatcatagatgacgatgtacccagcttccacgcccatggctaccaggagaaggtgtcatctgtgtgggtgcggagtggcatgtgggttggctactagtaccctggctaccgtgggctgcagtacctgctggagaagggagactacaaggacagcagcgactttggggcccgtcaccctcagggacatggatgaagctggaaaccatcattctcagcaaactaacacagaagcagaaaaccaaacaccacatgttctcactcataagtgggagttgaacagtgagaacacatggacacaaggaggggaacatcacacaccgaggcctgtcagggagtgggggacaagagggagagagagcattgggacaaataccaaatgcatgcacggcttaaaacctagatgacaggttgatgggtgcagcaaaccaccatggcacatgtatacctgtgtaacaaacctgcacgttctgcacatgtatcccagaacttataataaaaaagaaaccagtaagtgctcaataaatgttactaacatctatttcttcattcattcttcaaccattacccactgagtgcctatttggatacttggcttagtacctgggtgatgaaataatctacagcaaacccccatggcatgagtttataacaaacctgcacatgtatccccgaacttaaaagttaaaaaaacagaatctgcacaagtctaagctacttccttgaggaaaagactcgagctgagatctcaaagaagagtagaagttgcaggggtaaagaggccaaagaagagtgtctcagatgagagcggcacgtgcaaaggccctgtggtgggaggagcctggtagctctgagaaactccacaaaggcacggtggtggctggaatgcagagatgtgggggcacattgaaaaccttgttaaagtgcttaaaatgattatcataaaggtagaaactaataagtgctaaataaatgttattctcgtccgtttctcc

SEQ ID NO: 29215 - protein, 131 aa, Homo sapiens
MTMYPASTPMATRRRCHLCGCGVACGLATSTLATVGCSTCWRRETTRTAATLGPVTLRDMDEAGNHHSQQTNTEAENQTPHVLTHKWELNSENTWTQGGEHHTPRPVREWGTRGRESIGTNTKCMHGLKPR

SEQ ID NO: 29216 - DNA, 999 bp, Homo sapiens
gtggagtccagaatgagaagaaggaaagcggggccggttccttcaggacccgcctcagggggcaccgcggcggcttggggaccacttggagccccgtcctggggagaaaacagctcacgtctatggccctgactgcttaggcgggagctgcgtgcagctcagcttctccggggcatttttttctacacgctgggtgagctatgaacaggccaactgcaagggcgagcagtttgtgtttgagaagggcgagtacgcccactgggactggtggaccagcagccagaggacagactcagcagcctgaggcccatcaaagtggacagccaagagcacaagatcatcctctatgaaaaccccaacttcaccgggaagaagatggaaatcatagatgacgatgtacccagcttccacgcccatggctaccaggagaaggtgtcatctgtgtgggtgcggagtggcatgtgggttggctactagtaccctggctaccgtgggctgcagtacctgctggagaagggagactacaaggacagcagcgactttggggcccgtcaccctcaggaagtttctcttttcatcatcatgagtcctcgaagggtgctgtgttctgtccctctcactcctgactggcagtgactctaaaaaatgccccacccgtggggaggccttggaaagtagaagtggagatgcagtcactgatctcgggagaagctgaaaacacagtcatcagcccggataattttttatttttattttttgtagaggtggggtctcgctgtgttgcccagactagtctcaaactcctgggctcagctcaagcaatcttcccgtctcggtctcccaaagcactgggattataggtatgagccacggcccccagccttcaatttttctttaatgttggtttccctgttagaatgaaagctcagtgaagcacatcttgttcacaattgcattaccaccaccgcgtaccatgacaggctcacaggaggcatttat

SEQ ID NO: 29217 - protein, 65 aa, Homo sapiens; identical to SEQ ID NO: 29205

SEQ ID NO: 29218 - DNA, 293 bp, Homo sapiens
cggcatgcccccacctggatagcgcaggtggttggcctctgtcactcaaccaaagggaactgcttccagccttttccctctttccccaactcctcacactagacagaaggaatgttccccagggccaattgtgccaggtgactctcttccttagaattctcccatggagagccacctccattccctctcgtccagtagtttttctcaccttgataattttgcatgtgtgaccccttgctctggaaaaggcccttaccccctgccagccttgtcggtctgatgcccggagtcct

SEQ ID NO: 29219 - protein, 38 aa, Homo sapiens [sequence omitted]

SEQ ID NO: 29220 - DNA, 1026 bp, Homo sapiens
caacctggaattctgtccatggggactcttctccttgtactcccacacacagaaacccttcagcttatgcttccaacgtcagtgtccaaagaaactttagacaaatccagccccttcattcacagatggagacattattgttagttgtagtaaatgttagctaactaccagtacttacactttaaacgtgcctggcataggagaatgattttatatgtctgatagtatcaaatccccacaactacctgataaactaagtattataatgaccctcattttgcaggcttgctttgtaagactcctggactccttaggttttatcaatcctggtgcccttccattgtatcacatccttggatcacagtgatgggttcaggaatagacacatgacccaagggaggctaatcaggtgaatatagggagatgttctttctttcttaaggtggctacgtttaggacatgagccagggttgccagtgtcacccatcacatgtaccatatgaataactcttgtctaagatctggcaagagatggtggagcctaatgacattgttaaagatcctggatacagccatacctgaagcgtatccagaattccggctgagtatctgtactagtcaatgttctccaaataatatacacaggcataactcagagatactgtaggtttggttgcaggccacctcaataaaacaaatattgcaataaagtgggtcataggaatttttgatttcccagtgcacgtaaaagttacactatagtgtattaagtgtgcaataccattacatctaaaaaccactgtacgtaccttaattaaaaatactttattgctagcaatcatctgagccttctgcaaattgtaatctttttgctcgtggagggtcatgccttgatgtttatggctgctgactcattagggtggtggttgctgaaggttggggtggctgtggcagtttcttaaaatatgacaacaataaagttggccacattgatggactctttcattaaagatttcatggaagcat

SEQ ID NO: 29221 - protein, 50 aa, Homo sapiens
MSDSIKSPQLPDKLSIIMTLILQACFVRLLDSLGFINPGALPLYHILGSQ

SEQ ID NO: 29222 - DNA, 731 bp, Homo sapiens
atttatttatacagaaaccaacccagactggggcataatatttttaatttttcatgtttctggcaaaacagtgactgagttgcttttatttatttcacagagttagaaatttcttttcactggagagataaatggtgtttctgttccagattgtgaactggccatgcctggctctaggctttgggacagttcaactctgttccacatgtctgattctggatcccatgctgaagaggcagctgctgtataaggcatgttctttttgtgatgatggcagaagtttgagagacaagtcacactatgcaaacatggctcaagattctatcatacaacatctgctcacattcaactggccaaagtcagtcaaggtcagtggggcagaaaagaatatactgcccgaaaaggaaggaaaaagtgagtgaacatgtgttgaacaatactccaatttattatcggtaggtcaaggaatctttgcagcctgagtctcgtatggtgattctcaaacctcagcaaacatagatatcatctggggaatctggttcaaaatgcagacctgagactattctcctgcagaatatctgagtcagtggatttgggtggggcccaggaatctgcactttaaacagccactccctggggttattctgatactgatggtccagggtccacactttgagaatcactggtttaatggttctgagcatgtgctgagggctcagagatgcaagttc

SEQ ID NO: 29223 - protein, 96 aa, Homo sapiens [sequence omitted]

SEQ ID NO: 29224 - DNA, 807 bp, Homo sapiens
actttgcatccttcaatccaatcaaattttgacactcaatattaaccatcacagggttgtagagaggattcagaaatggtgctggtaaagcaaacagcaatagtgcttgggacacatgaaaccaataaagggtcatctgcctgaagctgctacctcagcatcatgcaatagcatcatcctcatctcctattgtcatcattaccattgccgttgtcttcatatgacatcatcactattagcaccgttgttttgtttcttctagctccagtagtctatgattccacaccacctcacattgttctttgaccataaatctgatttcctcagactgctagaattcttttcttgaatccccatggtggggaatgttctgcttatggcgaggtccaatgtccaagtttaatttcacccacctcactgggccatgatgttctggatgctgcgtggcaagtcagagatgtatttccccccttcagaaccaggtagaccgcagtttctgaaggcttaaggattcagagtggtttaagagcagtaaaccatggcccatcatcattgcataaggaagcaatgaaaggtgttggagtgtggatatgagtcatggaactctggggctatgttgctgccaggccctcaatggattggatggtgtccacctgcataattgaaggtggatcttctttactcagtcgactgattcaaatgctgatctcttccagcaacaccctcacagacacaccagaaataatgttttaccagctatctgtgtatcccttagcccagtaaaactgacacatacaattaactatc

SEQ ID NO: 29225 - protein, 61 aa, Homo sapiens [sequence omitted]

SEQ ID NO: 29226 - DNA, 485 bp, Homo sapiens
cttacttaggcccagtccacaggctcatgtctggggccccgggggagtgagggcagcaaagaagaacagacaatgggctccacgcagacctctgcaacacactggagcctgagcccaatgctgcacgacccatcaactacaagaaggagggagaaggtgtatgaccccccctacacccgcaactctcccatgatctccatggagacccaaagatatacactgcagcacccagcaaagatgtggtacttggtgttggagtgtggatatgagtcatggaactctggggctatgttgctgccaggccctcaatggattggatggtgtccacctgcataattgaaggtggatcttctttactcagtcgactgattcaaatgctgatctcttccagcaacaccctcacagacacaccagaaataatgttttaccagctatctgtgtatcccttagcccagtaaaactgacacatacaattaactatcaca

SEQ ID NO: 29227 - protein, 87 aa, Homo sapiens
MGSTQTSATHWSLSPMLHDPSTTRRREKVYDPPYTRNSPMISMETQRYTLQHPAKMWYLVLECGYESWNSGAMLLPGPQWIGWCPPA

SEQ ID NO: 29228 - DNA, 716 bp, Homo sapiens
atactaatcatgtctgagatagcccctgagatgggcttgaatacccggctgtggagaagttataagagctgaggtcctatggagccaagaggcagtcaagttggtatttatttatgcatttacaactattaatggggcaccttttatgcccacagactgctgaggcccggattaagctagcacaagagtttgataagaggacaactaaccctgtgctttgaaaatccaattcacatttcttgagtatgactatgtcctaggcagtggggatataaaggagaataacataacaccatctattggagacaccaatgagaaaaccagaattgtagttcaacgcaataaaggctatgctggtaatacttgtgataatccctgaaccaactggtatggccaatcataggcatgagatctcagctagtccagtcagagtgaatctcagagctctttactgtctaaaaagcttgttcttttttcttctaggtgttggagtgtggatatgagtcatggaactctggggctatgttgctgccaggccctcaatggattggatggtgtccacctgcataattgaaggtggatcttctttactcagtcgactgattcaaatgctgatctcttccagcaacaccctcacagacacaccagaaataatgttttaccagctatctgtgtatcccttagcccagtaaaactgacacatacaattaactatc

SEQ ID NO: 29229 - protein, 61 aa, Homo sapiens [sequence omitted]

SEQ ID NO: 29230 - DNA, 486 bp, Homo sapiens
tctgctccctggacacagtagttctcaaactggacagtgtcaatcagcatcctccgggaggtctggggtggccccggaaatacatgtgtcccacctatcccagcaggagatgttgctgagatgggtgcattaaagtttaggctttccagagtttatattgctaacaacttgaaaggaaaaaagctaactagagaactgactggtcttatttgttttagattctgggctttactaagacttcctactctcagaatctctggactataaacgctgggtggggtgggagctgggaatgttattctggaaaattaatcacaaatgaaaagaaaatcaactctaagactccagttagaagatttttgaaaatggcagaacatgactggccttcattcaagtcagaatatttaaagcaatccttgctaagaagaacttgattttgtataagcagtcccttaaatacagttgcttctcaagaaaaccacacac

SEQ ID NO: 29231 - protein, 48 aa, Homo sapiens
MGALKFRLSRVYIANNLKGKKLTRELTGLICFRFWALLRLPTLRISGL

SEQ ID NO: 29232 - DNA, 664 bp, Homo sapiens
cggggagcgcgcgtccaacggtaatgatgaaactcctgctctggtccgggctaccggtgaacagcgcccagcgggccgggcccccaacctcgctcctgagcctgaacatccccccaaccccaccgtgagaattcagcgaagagtaaaagctggaaaaagttgcgtgtcttaggctaagcagaacaaagtggggtgacggctccccggctaggaacagagatgcccttagggagccctctgatggaagagctctccgcttaagaaggtcaccactcccttacactcaggagatgttgctgagatgggtgcattaaagtttaggctttccagagtttatattgctaacaacttgaaaggaaaaaagctaactagagaactgactggtcttatttgttttagattctgggctttactaagacttcctactctcagaatctctggactataaacgctgggtggggtgggagctgggaatgttattctggaaaattaatcacaaatgaaaagaaaatcaactctaagactccagttagaagatttttgaaaatggcagaacatgactggccttcattcaagtcagaatatttaaagcaatccttgctaagaagaacttgattttgtataagcagtcccttaaatacagttgcttctcaagaaaaccaca

SEQ ID NO: 29233 - protein, 48 aa, Homo sapiens; identical to SEQ ID NO: 29231

SEQ ID NO: 29234 - DNA, 2478 bp, Homo sapiens
ggccggctacagcctgcggcgcgcgcagagcgctagtggggcgcgcggcgcgcgcgcggggcgggggcgcgcggaggggggggctgccccggggcggcccccccaggtcggggcgcggcgggcggcggcggcgggcgcgcgtcccgtccaggtccggagtaaccgccgccgccgccgccaaagctcgccaacatggcggacctggaggctgtgctggccgatgtcagttacctgatggccatggagaagagcaaggcgaccccggccgcccgcgccagcaagaggatcgtcctgccggagcccagtatccggagtgtgatgcagaagtaccttgcagagagaaatgaaataacctttgacaagattttcaatcagaaaattggtttcttgctatttaaagatttttgtttgaatgaaattaatgaagctgtacctcaggtgaagttttatgaagagataaaggaatatgaaaaacttgataatgaggaagaccgcctttgcagaagtcgacaaatttatgatgcctacatcatgaaggaacttctttcctgttcacatcctttctcaaagcaagctgtagaacacgtacaaagtcatttatccaagaaacaagtgacatcaactctttttcagccatacatagaagaaatttgtgaaagccttcgaggtgacatttttcaaaaatttatggaaagtgacaagttcactagattttgtcagtggaaaaacgttgaattaaatatccatttgaccatgaatgagttcagtgtgcataggattattggacgaggaggattcggggaagtttatggttgcaggaaagcagacactggaaaaatgtatgcaatgaaatgcttagataagaagaggatcaaaatgaaacaaggagaaacattagccttaaatgaaagaatcatgttgtctcttgtcagcacaggagactgtcctttcattgtatgtatgacctatgccttccataccccagataaactctgcttcatcctggatctgatgaacgggggcgatttgcactaccacctttcacaacacggtgtgttctctgagaaggagatgcggttttatgccactgaaatcattctgggtctggaacacatgcacaatcggtttgttgtctacagagatttgaagccagcaaatattctcttggatgaacatggacacgcaagaatatcagatcttggtcttgcctgcgatttttccaaaaagaagcctcatgcgagtgttggcacccatgggtacatggctcccgaggtgctgcagaaggggacggcctatgacagcagtgccgactggttctccctgggctgcatgcttttcaaacttctgagaggtcacagccctttcagacaacataaaaccaaagacaagcatgaaattgaccgaatgacactcaccgtgaatgtggaacttccagacaccttctctcctgaactgaagtcccttttggagggcttgcttcagcgagacgttagcaagcggctgggctgtcacggaggcggctcacaggaagtaaaagagcacagctttttcaaaggtgttgactggcagcatgtctacttacaaaagtacccaccacccttgattcctccccggggagaagtcaatgctgctgatgcctttgatattggctcatttgatgaagaggataccaaagggattaagctacttgattgcgaccaagaactctacaagaacttccctttggtcatctctgaacgctggcagcaagaagtaacggaaacagtttatgaagcagtaaatgcagacacagataaaatcgaggccaggaagagagctaaaaataagcaacttggccacgaagaagattacgctctggggaaggactgtattatgcacgggtacatgctgaaactgggaaacccatttctgactcagtggcagcgtcgctatttttacctctttccaaatagacttgaatggagaggagagggagagtcccggcaaaatttactgacaatggaacagattctctctgtggaagaaactcaaattaaagacaaaaaatgcattttgttcagaataaaaggagggaaacaatttgtcttgcaatgtgagagtgatccagagtttgtgcagtggaagaaagagttgaacgaaaccttcaaggaggcccagcggctattgcgtcgtgccccgaagttcctcaacaaacctcggtcaggtactgtggagctcccaaagccatccctctgtcacagaaacagcaacggcctctagcacccagaaacagggagggtcctcgaggaggacacaccagggtctcagccttttggggtgaacgaggatgaggcatctgatctattcgctaccgggactcctccaggctcccgagaggagtcgggacccttcggcttggggtcagctcagctccctgccttgtcacatttgtctgcattagaaactactgaagaaataaaagttctttttctttgctac

SEQ ID NO: 29235 - protein, 688 aa, Homo sapiens
MADLEAVLADVSYLMAMEKSKATPAARASKRIVLPEPSIRSVMQKYLAERNEITFDKIFNQKIGFLLFKDFCLNEINEAVPQVKFYEEIKEYEKLDNEEDRLCRSRQIYDAYIMKELLSCSHPFSKQAVEHVQSHLSKKQVTSTLFQPYIEEICESLRGDIFQKFMESDKFTRFCQWKNVELNIHLTMNEFSVHRIIGRGGFGEVYGCRKADTGKMYAMKCLDKKRIKMKQGETLALNERIMLSLVSTGDCPFIVCMTYAFHTPDKLCFILDLMNGGDLHYHLSQHGVFSEKEMRFYATEIILGLEHMHNRFVVYRDLKPANILLDEHGHARISDLGLACDFSKKKPHASVGTHGYMAPEVLQKGTAYDSSADWFSLGCMLFKLLRGHSPFRQHKTKDKHEIDRMTLTVNVELPDTFSPELKSLLEGLLQRDVSKRLGCHGGGSQEVKEHSFFKGVDWQHVYLQKYPPPLIPPRGEVNAADAFDIGSFDEEDTKGIKLLDCDQELYKNFPLVISERWQQEVTETVYEAVNADTDKIEARKRAKNKQLGHEEDYALGKDCIMHGYMLKLGNPFLTQWQRRYFYLFPNRLEWRGEGESRQNLLTMEQILSVEETQIKDKKCILFRIKGGKQFVLQCESDPEFVQWKKELNETFKEAQRLLRRAPKFLNKPRSGTVELPKPSLCHRNSNGL

SEQ ID NO: 29236 - DNA, 2977 bp, Homo sapiens
ggccggctacagcctgcggcgcgcgcagagcgctagtggggcgcgcggcgcgcgcgcggggcgggggcgcgcggaggggggggctgccccggggcggcccccccaggtcggggcgcggcgggcggcggcggcgggcgcgcgtcccgtccaggtccggagtaaccgccgccgccgccgccaaagctcgccaacatggcggacctggaggctgtgctggccgatgtcagttacctgatggccatggagaagagcaaggcgaccccggccgcccgcgccagcaagaggatcgtcctgccggagcccagtatccggagtgtgatgcagaagtaccttgcagagagaaatgaaataacctttgacaagattttcaatcagaaaattggtttcttgctatttaaagatttttgtttgaatgaaattaatgaagctgtacctcaggtgaagttttatgaagagataaaggaatatgaaaaacttgataatgaggaagaccgcctttgcagaagtcgacaaatttatgatgcctacatcatgaaggaacttctttcctgttcacatcctttctcaaagcaagctgtagaacacgtacaaagtcatttatccaagaaacaagtgacatcaactctttttcagccatacatagaagaaatttgtgaaagccttcgaggtgacatttttcaaaaatttatggaaagtgacaagttcactagattttgtcagtggaaaaacgttgaattaaatatccatttgaccatgaatgagttcagtgtgcataggattattggacgaggaggattcggggaagtttatggttgcaggaaagcagacactggaaaaatgtatgcaatgaaatgcttagataagaagaggatcaaaatgaaacaaggagaaacattagccttaaatgaaagaatcatgttgtctcttgtcagcacaggagactgtcctttcattgtatgtatgacctatgccttccataccccagataaactctgcttcatcctggatctgatgaacgggggcgatttgcactaccacctttcacaacacggtgtgttctctgagaaggagatgcggttttatgccactgaaatcattctgggtctggaacacatgcacaatcggtttgttgtctacagagatttgaagccagcaaatattctcttggatgaacatggacacgcaagaatatcagatcttggtcttgcctgcgatttttccaaaaagaagcctcatgcgagtgttggcacccatgggtacatggctcccgaggtgctgcagaaggggacggcctatgacagcagtgccgactggttctccctgggctgcatgcttttcaaacttctgagaggatgaagaattgatactgaaggtttctatgtggctgacagtcactaaaccaacaagtcacaacttgaacccagcttttctgactctggagtcgggttctgcacagggaaaacaggaagcgctcagagctgtggagaatctgctggtgcacgtcacagccctttcagacaacataaaaccaaagacaagcatgaaattgaccgaatgacactcaccgtgaatgtggaacttccagacaccttctctcctgaactgaagtcccttttggagggcttgcttcagcgagacgttagcaagcggctgggctgtcacggaggcggctcacaggaagtaaaagagcacagctttttcaaaggtgttgactggcagcatgtctacttacaaaagtacccaccacccttgattcctccccggggagaagtcaatgctgctgatgcctttgatattggctcatttgatgaagaggataccaaagggattaagctacttgattgcgaccaagaactctacaagaacttccctttggtcatctctgaacgctggcagcaagaagtaacggaaacagtttatgaagcagtaaatgcagacacagataaaatcgaggccaggaagagagctaaaaataagcaacttggccacgaagaagattacgctctggggaaggactgtattatgcacgggtacatgctgaaactgggaaacccatttctgactcagtggcagcgtcgctatttttacctctttccaaatagacttgaatggagaggagagggagagtcccggcaaaatttactgacaatggaacagattctctctgtggaagaaactcaaattaaagacaaaaaatgcattttgttcagaataaaaggagggaaacaatttgtcttgcaatgtgagagtgatccagagtttgtgcagtggaagaaagagttgaacgaaaccttcaaggaggcccagcggctattgcgtcgtgccccgaagttcctcaacaaacctcggtcaggtactgtggagctcccaaagccatccctctgtcacagaaacagcaacggcctctagcacccagaaacagggagggtcctcgaggaggacacaccagggtctcagccttttggggtgaacgaggatgaggcatctgatctattcgctaccgggactcctccaggctcccgagaggagtcgggacccttcggcttggggtcagctcagctccctgccttgtcacatttgtctgcattagaaactactgaagaaataaaagttctttttctttgctacacactttggtacctatgaacctagaacttgaagtgactcctacttatcacgtaaatttttatgtctgatatcaaacacatcttagactccccagaatggaatttaaagatgttcagtgttgggtaacagattgccctaagcattgccacatattctgtctagtcactgctgattttctatgtctttgctccatactgctgggggatgggagagccacagtgtgtttcttttgtgcacttcgcaactgacttcttgtcctggggttaaaagttgaagatattttctgatgatattaaaagttgaagatatttctgcacttgggccctcctctgggagccgcacccacatg

SEQ ID NO: 29237 - protein, 387 aa, Homo sapiens
MADLEAVLADVSYLMAMEKSKATPAARASKRIVLPEPSIRSVMQKYLAERNEITFDKIFNQKIGFLLFKDFCLNEINEAVPQVKFYEEIKEYEKLDNEEDRLCRSRQIYDAYIMKELLSCSHPFSKQAVEHVQSHLSKKQVTSTLFQPYIEEICESLRGDIFQKFMESDKFTRFCQWKNVELNIHLTMNEFSVHRIIGRGGFGEVYGCRKADTGKMYAMKCLDKKRIKMKQGETLALNERIMLSLVSTGDCPFIVCMTYAFHTPDKLCFILDLMNGGDLHYHLSQHGVFSEKEMRFYATEIILGLEHMHNRFVVYRDLKPANILLDEHGHARISDLGLACDFSKKKPHASVGTHGYMAPEVLQKGTAYDSSADWFSLGCMLFKLLRG

SEQ ID NO: 29238 - DNA, 5757 bp, Homo sapiens
ggccggctacagcctgcggcgcgcgcagagcgctagtggggcgcgcggcgcgcgcgcggggcgggggcgcgcggaggggggggctgccccggggcggcccccccaggtcggggcgcggcgggcggcggcggcgggcgcgcgtcccgtccaggtccggagtaaccgccgccgccgccgccaaagctcgccaacatggcggacctggaggctgtgctggccgatgtcagttacctgatggccatggagaagagcaaggcgaccccggccgcccgcgccagcaagaggatcgtcctgccggagcccagtatccggagtgtgatgcagaagtaccttgcagagagaaatgaaataacctttgacaagattttcaatcagaaaattggtttcttgctatttaaagatttttgtttgaatgaaattaatgaagctgtacctcaggtgaagttttatgaagagataaaggaatatgaaaaacttgataatgaggaagaccgcctttgcagaagtcgacaaatttatgatgcctacatcatgaaggaacttctttcctgttcacatcctttctcaaagcaagctgtagaacacgtacaaagtcatttatccaagaaacaagtgacatcaactctttttcagccatacatagaagaaatttgtgaaagccttcgaggtgacatttttcaaaaatttatggaaagtgacaagttcactagattttgtcagtggaaaaacgttgaattaaatatccatttgaccatgaatgagttcagtgtgcataggattattggacgaggaggattcggggaagtttatggttgcaggaaagcagacactggaaaaatgtatgcaatgaaatgcttagataagaagaggatcaaaatgaaacaaggagaaacattagccttaaatgaaagaatcatgttgtctcttgtcagcacaggagactgtcctttcattgtatgtatgacctatgccttccataccccagataaactctgcttcatcctggatctgatgaacgggggcgatttgcactaccacctttcacaacacggtgtgttctctgagaaggagatgcggttttatgccactgaaatcattctgggtctggaacacatgcacaatcggtttgttgtctacagagatttgaagccagcaaatattctcttggatgaacatggacacgcaagaatatcagatcttggtcttgcctgcgatttttccaaaaagaagcctcatgcgagtgttggcacccatgggtacatggctcccgaggtgctgcagaaggggacggcctatgacagcagtgccgactggttctccctgggctgcatgcttttcaaacttctgagaggtcacagccctttcagacaacataaaaccaaagacaagcatgaaattgaccgaatgacactcaccgtgaatgtggaacttccagacaccttctctcctgaactgaagtcccttttggagggcttgcttcagcgagacgttagcaagcggctgggctgtcacggaggcggctcacaggaagtaaaagagcacagctttttcaaaggtgttgactggcagcatgtctacttacaaaagtacccaccacccttgattcctccccggggagaagtcaatgctgctgatgcctttgatattggctcatttgatgaagaggataccaaagggattaagctacttgattgcgaccaagaactctacaagaacttccctttggtcatctctgaacgctggcagcaagaagtaacggaaacagtttatgaagcagtaaatgcagacacagataaaatcgaggccaggaagagagctaaaaataagcaacttggccacgaagaagattacgctctggggaaggactgtattatgcacgggtacatgctgaaactgggaaacccatttctgactcagtggcagcgtcgctatttttacctctttccaaatagacttgaatggagaggagagggagagtcccggcaaaatttactgacaatggaacagattctctctgtggaagaaactcaaattaaagacaaaaaatgcattttgttcagaataaaaggagggaaacaatttgtcttgcaatgtgagagtgatccagagtttgtgcagtggaagaaagagttgaacgaaaccttcaaggaggcccagcggctattgcgtcgtgccccgaagttcctcaacaaacctcggtcaggtactgtggagctcccaaagccatccctctgtcacagaaacagcaacggcctctagcacccagaaacagggagggtcctcgaggaggacacaccagggtctcagccttttggggtgaacgaggatgaggcatctgatctattcgctaccgggactcctccaggctcccgagaggagtcgggacccttcggcttggggtcagctcagctccctgccttgtcacatttgtctgcattagaaactactgaagaaataaaagttctttttctttgctacacactttggtacctatgaacctagaacttgaagtgactcctacttatcacgtaaatttttatgtctgatatcaaacacatcttagactccccagaatggaatttaaagatgttcagtgttgggtaacagattgccctaagcattgccacatattctgtctagtcactgctgattttctatgtctttgctccatactgctgggggatgggagagccacagtgtgtttcttttgtgcacttcgcaactgacttcttgtcctggggttaaaagttgaagatattttctgatgatattaaaagttgaagatatttctgcacttgggccctcctctgggagccgcacccacatgactgccctgcctctgaccagtctgttccggggccccctcagccaggtgggaatgacggacacgtactatccaagtgtatgggattaactaatcattgaaggcattcatccgtccatcattggaaagatttacagtgattctgaaggacaggccgtggagttttaggtttcaggggcaagagcagttttcaaaagtctttgagtccagtgtgcacgagtcgacaagcagtacctggcatgcaggagcactcatgggtgagtccgtctcaggtctcgacaattagcagttgtgtgacagtcattctggttccttctgcctgaccctgggagacatatcagtaatggatgtacaaaagcaggtctgttttatgtcttagtataatttcagatgaattgtattgaaaaaatgctgaggaatgaatgtgtcaaaatgggttaactgtgtatattgactttcatgtcgtcatgcatctgtcatgaatgaatgatactttgcactgggctgtacgacagtgaggaccttagggcatgaagcctttttcctggtcccagcagcatctgccctgtgaagtttgttttctcccactgcctccaggccccactgatacccccaaatagatgctgggttatgagaaccagcgaaatcccccatgtcatcagtcttaaaaaaaaaattttacaaatccacgtatttgtcccattcttggagtagttttagtgtatgtctttacattaactactaacagtataaataacttgacatcgtaattgtctgcatcctgtccttgatatttttagcagttccaaatctttgtttttgtatttgtttgctgtgttcatgggcaaagtaagtactttttaatgcagttattttgagagtttggaagataattaccaaaagggtccattatttcataagagttactttgcaaaaaaaaaaatgtgggtttttttttttgtctatctcaactactagttggggtttaaattaacatacattttctactatctgttatttccagtgtgggaggagggatgtactacttacatgcattctccttatttaaaaaggaagaatagtattcaaattctgttgaaacacacacacacacacacacacacacacacacacactccagaagcagaaaagccattgttcttaaagagtgaatgtcttcccagccctggttaattatagctgtgactgatgccgttcccgtctgcatctcaagctcataggttctcagcatgtgcagttgaggatgcgctgggcctcatgcctgttctagatctccaggataaagggcctgctgttgactccaccagggtctgggcttagcgtctaatatctcgtacctagggcgtgagctgcacaaacgtgttcagaaagattattcaactttcccatacttgttctaaaattgagctgatccgcatctctttcaaaaactagaatttctgctctaagaatagaacataaggctccactcccttttagaaaagatatatgaattggaaaatgctctgaaagtccttttgcttcaaacaaaagtgtaaacttttacacttccccaactcacatttgatttgtaatgatatggttgagaagtacatctagatgtcatttattaaaagtgctttgtaagactagattgagctgtttctgagggcggtcaccagttgtgttggggtctggtttgagtgccttctgccaaaatgttgtgatggaggtgtttctgcgaccagacacaggataccgctgtgtctgcacccggttgcctgcatggccagaggaaaagtcagttggattaaacatcatggtatacttggctgttgtttttttttaattttttaattttttgggatagggcctcgctctgtcacccaggctggagaacagtgggatgatcatggctcactgcagccttgaattcctaggttcaagcaatcctcccacgtcagcctcctgagtagctaggactacaggtgcatgccacctttcctggctaatttattttttgggtagagatggggtcttgaactcttaggctcaagtgatcctccttccttggcctcccaaaatgctggaattagagatgtaagccaccatgcccagccatagtacttggatgttttagaaggttttccaagtattacataattcctagatgttcacccttattacactccaactattaaaaaggtcaaaattcagcctattttttttcattattttagattcctgtggttgggatattttaacattgatgagaaaaataattgaggttgatatttttacaaaatcatgcggtaataagtcttgatttcatgattcaaaagaatcaataaagcctaaaaataatagattactttaagctgctatgtaagatatatatggaataaattaaaaacctttgtgaattcaggtttattatttttaacctaaaacattctctttggttcattcatcccctcatgtcatgggggctcattggttttccttctttgtcatatttaagtatgatttttcaacaaaacttctagaagtcagcttattatgtcaccattcatgcaaagtgctcatgcctctgattggtccattcactgacgtgacaatttcaggtcctatgtttaaaaagaaggggctggccgggcacgatggctcacgcctataatcccagcactttgggaggccgagaggggcggttcacgaggtcaggagattgagaccatcctggttagcagagtgaaaccccgtctctactaaaaatacaaataaaaattagccgggcgtggtggcgggcgcctgtagtcccagctacttgggaggctgaggcaggagaatggcatgaacccgggaggcagagcttgcagtgagccgagattgcgccactgcactccagcctgggcgacagagcgagactctgtctc

SEQ ID NO: 29239 - protein, 688 aa, Homo sapiens; identical to SEQ ID NO: 29235

SEQ ID NO: 29240 - DNA, 4854 bp, Homo sapiens
ggtccggagtaaccgccgccgccgccgccaaagctcgccaacatggcggacctggaggctgtgctggccgatgtcagttacctgatggccatggagaagagcaaggcgaccccggccgcccgcgccagcaagaggatcgtcctgccggagcccaggtttcttgctatttaaagatttttgtttgaatgaaattaatgaagctgtacctcaggtgaagttttatgaagagataaaggaatatgaaaaacttgataatgaggaagaccgcctttgcagaagtcgacaaatttatgatgcctacatcatgaaggaacttctttcctgttcacatcctttctcaaagcaagctgtagaacacgtacaaagtcatttatccaagaaacaagtgacatcaactctttttcagccatacatagaagaaatttgtgaaagccttcgaggtgacatttttcaaaaatttatggaaagtgacaagttcactagattttgtcagtggaaaaacgttgaattaaatatccatttgaccatgaatgagttcagtgtgcataggattattggacgaggaggattcggggaagtttatggttgcaggaaagcagacactggaaaaatgtatgcaatgaaatgcttagataagaagaggatcaaaatgaaacaaggagaaacattagccttaaatgaaagaatcatgttgtctcttgtcagcacaggagactgtcctttcattgtatgtatgacctatgccttccataccccagataaactctgcttcatcctggatctgatgaacgggggcgatttgcactaccacctttcacaacacggtgtgttctctgagaaggagatgcggttttatgccactgaaatcattctgggtctggaacacatgcacaatcggtttgttgtctacagagatttgaagccagcaaatattctcttggatgaacatggacacgcaagaatatcagatcttggtcttgcctgcgatttttccaaaaagaagcctcatgcgagtgttggcacccatgggtacatggctcccgaggtgctgcagaaggggacggcctatgacagcagtgccgactggttctccctgggctgcatgcttttcaaacttctgagaggtcacagccctttcagacaacataaaaccaaagacaagcatgaaattgaccgaatgacactcaccgtgaatgtggaacttccagacaccttctctcctgaactgaagtcccttttggagggcttgcttcagcgagacgttagcaagcggctgggctgtcacggaggcggctcacaggaagtaaaagagcacagctttttcaaaggtgttgactggcagcatgtctacttacaaaagtacccaccacccttgattcctccccggggagaagtcaatgctgctgatgcctttgatattggctcatttgatgaagaggataccaaagggattaagctacttgattgcgaccaagaactctacaagaacttccctttggtcatctctgaacgctggcagcaagaagtaacggaaacaaaactactgaagaaataaaagttctttttctttgctacacactttggtacctatgaacctagaacttgaagtgactcctacttatcacgtaaatttttatgtctgatatcaaacacatcttagactccccagaatggaatttaaagatgttcagtgttgggtaacagattgccctaagcattgccacatattctgtctagtcactgctgattttctatgtctttgctccatactgctgggggatgggagagccacagtgtgtttcttttgtgcacttcgcaactgacttcttgtcctggggttaaaagttgaagatattttctgatgatattaaaagttgaagatatttctgcacttgggccctcctctgggagccgcacccacatgactgccctgcctctgaccagtctgttccggggccccctcagccaggtgggaatgacggacacgtactatccaagtgtatgggattaactaatcattgaaggcattcatccgtccatcattggaaagatttacagtgattctgaaggacaggccgtggagttttaggtttcaggggcaagagcagttttcaaaagtctttgagtccagtgtgcacgagtcgacaagcagtacctggcatgcaggagcactcatgggtgagtccgtctcaggtctcgacaattagcagttgtgtgacagtcattctggttccttctgcctgaccctgggagacatatcagtaatggatgtacaaaagcaggtctgttttatgtcttagtataatttcagatgaattgtattgaaaaaatgctgaggaatgaatgtgtcaaaatgggttaactgtgtatattgactttcatgtcgtcatgcatctgtcatgaatgaatgatactttgcactgggctgtacgacagtgaggaccttagggcatgaagcctttttcctggtcccagcagcatctgccctgtgaagtttgttttctcccactgcctccaggccccactgatacccccaaatagatgctgggttatgagaaccagcgaaatcccccatgtcatcagtcttaaaaaaaaaattttacaaatccacgtatttgtcccattcttggagtagttttagtgtatgtctttacattaactactaacagtataaataacttgacatcgtaattgtctgcatcctgtccttgatatttttagcagttccaaatctttgtttttgtatttgtttgctgtgttcatgggcaaagtaagtactttttaatgcagttattttgagagtttggaagataattaccaaaagggtccattatttcataagagttactttgcaaaaaaaaaaatgtgggtttttttttttgtctatctcaactactagttggggtttaaattaacatacattttctactatctgttatttccagtgtgggaggagggatgtactacttacatgcattctccttatttaaaaaggaagaatagtattcaaattctgttgaaacacacacacacacacacacacacacacacacacactccagaagcagaaaagccattgttcttaaagagtgaatgtcttcccagccctggttaattatagctgtgactgatgccgttcccgtctgcatctcaagctcataggttctcagcatgtgcagttgaggatgcgctgggcctcatgcctgttctagatctccaggataaagggcctgctgttgactccaccagggtctgggcttagcgtctaatatctcgtacctagggcgtgagctgcacaaacgtgttcagaaagattattcaactttcccatacttgttctaaaattgagctgatccgcatctctttcaaaaactagaatttctgctctaagaatagaacataaggctccactcccttttagaaaagatatatgaattggaaaatgctctgaaagtccttttgcttcaaacaaaagtgtaaacttttacacttccccaactcacatttgatttgtaatgatatggttgagaagtacatctagatgtcatttattaaaagtgctttgtaagactagattgagctgtttctgagggcggtcaccagttgtgttggggtctggtttgagtgccttctgccaaaatgttgtgatggaggtgtttctgcgaccagacacaggataccgctgtgtctgcacccggttgcctgcatggccagaggaaaagtcagttggattaaacatcatggtatacttggctgttgtttttttttaattttttaattttttgggatagggcctcgctctgtcacccaggctggagaacagtgggatgatcatggctcactgcagccttgaattcctaggttcaagcaatcctcccacgtcagcctcctgagtagctaggactacaggtgcatgccacctttcctggctaatttattttttgggtagagatggggtcttgaactcttaggctcaagtgatcctccttccttggcctcccaaaatgctggaattagagatgtaagccaccatgcccagccatagtacttggatgttttagaaggttttccaagtattacataattcctagatgttcacccttattacactccaactattaaaaaggtcaaaattcagcctattttttttcattattttagattcctgtggttgggatattttaacattgatgagaaaaataattgaggttgatatttttacaaaatcatgcggtaataagtcttgatttcatgattcaaaagaatcaataaagcctaaaaataatagattactttaagctgctatgtaagatatatatggaataaattaaaaacctttgtgaattcaggtttattatttttaacctaaaacattctctttggttcattcatcccctcatgtcatgggggctcattggttttccttctttgtcatatttaagtatgatttttcaacaaaacttctagaagtcagcttattatgtcaccattcatgcaaagtgctcatgcctctgattggtccattcactgacgtgacaatttcaggtcctatgtttaaaaagaaggggctggccgggcacgatggctcacgcctataatcccagcactttgggaggccgagaggggcggttcacgaggtcaggagattgagaccatcctggttagcagagtgaaaccccgtctctactaaaaatacaaataaaaattagccgggcgtggtggcgggcgcctgtagtcccagctacttgggaggctgaggcaggagaatggcatgaacccgggaggcagagcttgcagtgagccgagattgcgccactgcactccagcctgggcgacagagcgagactctgtctc

SEQ ID NO: 29241 - protein, 416 aa, Homo sapiens [sequence omitted]

SEQ ID NO: 29242 - DNA, 1407 bp, Homo sapiens
ggggaatttcagatggagagatcagactatcaccaactgaattttctaagtaaaatttgcatcactaggatgaaataactgtgtaccccctaatgtgaggcaatataagtaccaaaaccatctcaaaagtattcctgcccccaaatggtggacttgaatatgatcaagccttttgaggtaactttcagtttataggaaatatggagagagaggaacagtgaaagaccttatagggaagcaacagacagaaagggcatcccccatgatggcttcctcggcttcctcagggggtcactgcagataaaggtcaggggtggggacagtcaggtactctccctgtctgccttaaatcccagaagagatttaagagatggcgctatcagatgaatgtgtggatcttggttagatccagattgaaacccaccagctatacaaaagacacttgagtcatggaaatgtggttagagactgggcattggatcttcaggaattatcaatttgaagggggagttgggaagtgataatagactgtgtttatatgagaaaattatccataatttttagaaatgcaaactgaaataggctaaaacgacatgtggtctgagatttgttattgattgattgattgattgggatggagttttgctcttgttgcccaggctggaattgcactcctgcactctaatttgagcaacagagtgagactctgtctcaaaaaaagagaaaagtaaaagaaaaaaaatggagggtggggtagggaaaagtagcagattacaatcttggtaacttccaatgaggtgctgagtgatgggtctaggtgttcactatattatatccttttgcatgtttgaaaacttttgcaataatttttcaaaacagtagagaagatggctaggtgtgaatatcacaactgtgtccctgcagggctaatggaagcctcagttttcccaatgtcatgtgtaatagcactggtgacttaagatgtactatataatttctatgacagcatcatacacagatgcaagatgcaagtgtactgcatctcaaacaacttagattgacgggaggatgatgtgttttttggaaactgcattagatgactcaaaaagaggctctgtgacactgattacaaagatgcgggtagagttttaagaggctcgtttgcaacctaagagtcccgactaatccaaccagagtggacagatttacaacttcttgacctgaaggcttgctatagaaggatgagaaaaaaaaaatgtaagaaggctattgaaaggagaaagcacagtaagagatcatactttagaaaacgatgatctgtttacttcctgagtgcaaaagacttcactgacttattcagatcatgggtatctattaaatcacggctctgatgtttaaatttagcag

SEQ ID NO: 29243 - protein, 30 aa, Homo sapiens
MARCEYHNCVPAGLMEASVFPMSCVIALVT

SEQ ID NO: 29244 - DNA, 941 bp, Homo sapiens
gtggaatagccggttcagtaatttgctttatctcatgtgcaagtggtttctgcctgggccagtaatatattttaataaggcaagtttccaggaagatacaacctaacaatgataactttaaaaaacctagataaaggaatatgaaaaacttgataatgaggaagaccgcctttgcagaagtcgacaaatttatgatgcctacatcatgaaggaacttctttcctgttcacatcctttctcaaagcaagctgtagaacacgtacaaagtcatttatccaagaaacaagtgacatcaactctttttcaggaagcaaggctcccagaaggactgcagctgcctcccagcccatgtttggttcctgtggcttctgcagacttcctattctcatcacttgccatacatagaagaaatttgtgaaagccttcgaggtgacatttttcaaaaatttatggaaaggtatgaaactttatgcatatatatacacaattttttatcatgtacgtgtacctcatcttatgccgtaaatgctgaccttaaaatgtgtgttaatcatttagcaagtattcactgaccatgtacgatgtgccaggctttgtgttaaactgtttcctcagtactttacattataattttagggtttgtctatcttaacatctctttgaccttcaatttctcagcttcaatagagtctaaaatatacactgaggaacctcaattttaaaaagtatcttattgagagacctttgctaataatgcaaacttgactataatttatctgattcatttgcttggattttggaaacatgtctcccaaagcaggacaagcctgtacttgattcttcatgtaggagtagaatttaaggacataggtcaatgtctgtttatgatcgtgtacatcattaaatacctaataaatatgtcccttggttactcaaactat

SEQ ID NO: 29245 - protein, 70 aa, Homo sapiens
MKELLSCSHPFSKQAVEHVQSHLSKKQVTSTLFQEARLPEGLQLPPSPCLVPVASADFLFSSLAIHRRNL

SEQ ID NO: 29246 - DNA, 992 bp, Homo sapiens
gcacttctgggcttcagcacacatcagtgtggttcacgtgtttcctgctgttatgaaagagattggagaggactaagcttggaattgcctgtcccacagcaagaggctatggagctgggccacggagcagggcccatctgaatgacaaggagggccaacaggacttggacccctggaaagcggcctacagttccttggacacctccaagttcaagaaccagggtctgtcatccccacagcccctgcccctgggagccagcgctcaaggcagctccctagggcagtgccacttgaaggagattccccctccacccccgactgctgccagcagggattctctgggcatggacccacagtccaggtccctgaagaatgcgggctctcgatcctcctcgagagagaacagggccacctcgggagagggggctcagccatgccaggggacggatgacggtcccagcttgggggctcaggaccagaggagcacgcccacgaaccagaagggcagcatcattcctaacaacattcgccacaagtttgggagcaatgtggtggaccagctggtctccgaggagcaggctcaaaaggctattgatgaagtcttcgagggccagaaaagggcaagctcatggcccagcaggacccagaatcctgtggaaatctcctccgtcttctcagactactatgacctcggctacaacatgcggtcaaacttgtttcgaggggctgctgaggagacaaagagcctcatgaaggcttcttacacaccagaggtcattgagaaatcagtgagggacttagaacactggcatggcaggaagacggatgatctggggcggtggcaccagaaaaatgctatgaacctgaacttgcagaaagcactggaagagaaatatggagaaaacagcaaatccaagagctccaagtactagttttgacacagtagaggtgtcttctactcaaataaagtgctaacaataaggaaaggctca

SEQ ID NO: 29247 - protein, 195 aa, Homo sapiens; identical to SEQ ID NO: 4013

SEQ ID NO: 29248 - DNA, 1757 bp, Homo sapiens
gcgagcgccagcgcggcgtccggggcgagtgagtgcggggcgggggcagcggccgggcgcctgggccgccggtcgggccacctgctgcccggggaaggatagcgttgcgagagtgggacggggtgccccgggaacccctgatccacctagggcagagggcagcgagctacgggccggactcgggcactctggaggcgggcgagctcgggctgcctggggaggccgcaggcgatggcgtgtgcgcggctcgcggagcttcctagccgtgcgcccaccccctctgccttggaaggaaaggggattctaagcccaagatgccatcgccccccatcccgggcatgctttcattgctctttcctggcgggatcgagtactgtaacttctaggagccagatccccgccccaggaagcgcccctacttggagtcctcggaaactcttgccccacccgcttctgcgctgggcccccgggccggctgggaggggcggggccggctttccagagggaatctgcaaacttatcccgctgcacgccccagcctcgctggcttgctgtaaacaaggaacccgggggagtgcggagggagaaagagcttctcccaggcctcaccctactgcacacaccgacttccttcctcacgcctgtctctctttcctggttcccacccgtgccaggtgacacgcagagctgaagccatggttcatcaggtgctctaccgggcgctggtctccaccaagtggctggcggagtccatcaggactggcaagctggggcccggcctgcgggtgctggacgcgtcctggtactcaccaggcacccgagaggcccgcaaggagtacctcgagcgccacgtacccggcgcctctttctttgacatagaagagtgccgggacacggcgtcgccctacgagatgatgctgcccagcgaggctggcttcgccgagtatgtgggccgcctgggcatcagcaaccacacgcacgtggtggtgtatgatggtgaacacctgggcagcttctatgctccccgggtctggtggatgttccgtgtgtttggccaccgcaccgtatcagtgctcaatggtggcttccggaactggctgaaggagggccacccggtgacatccgagccctcacgcccagaaccggccgtcttcaaagccacactggaccgctccctgctcaagacctacgagcaggtgctggagaaccttgaatctaagaggttccagctggtggattcaaggtctcaagggcggttcctgggcaccgagccggagccggatgcagtaggactggactcgggccatatccgtggtgccgtcaacatgcctttcatggacttcctgactgaggatggcttcgagaagggcccagaagagctccgtgctctgttccagaccaagaaggtggatctctcgcagcctctcattgccacgtgccgcaagggagtcaccgcctgccacgtggccttggctgcctacctctgcggcaagcctgatgtggccgtgtacgatggctcctggtccgagtggtttcgccgggcccccccagagagccgtgtgtcccagggaaagtctgagaaggcctgagccgtgacctcttctgcttactgtaactgcggccggtttagtgaccccatgacttacagccggttcttacctcttaggtgaaggagatgacatgtttttagaattgctgtgcaaggctcaccctctctctgtcaacactggaataaactttgccttttctgagtagtg

SEQ ID NO: 29249 - protein, 297 aa, Homo sapiens; identical to SEQ ID NO: 4015

SEQ ID NO: 29250 - DNA, 1211 bp, Homo sapiens
ggcggcgcagggtccccctctggcggtggcgcgatggtgcgcgccgcctggggagctgcggccgggggtttgaaccggccaacttctccagccggccggggcgagcgccagcgcggcgtccggggcgagtgacacgcagagctgaagccatggttcatcaggtgctctaccgggcgctggtctccaccaagtggctggcggagtccatcaggactggcaagctggggcccggcctgcgggtgctggacgcgtcctggtactcaccaggcacccgagaggcccgcaaggagtacctcgagcgccacgtacccggcgcctctttctttgacatagaagagtgccgggacacggcgtcgccctacgagatgatgctgcccagcgaggctggcttcgccgagtatgtgggccgcctgggcatcagcaaccacacgcacgtggtggtgtatgatggtgaacacctgggcagcttctatgctccccgggtctggtggatgttccgtgtgtttggccaccgcaccgtatcagtgctcaatggtggcttccggaactggctgaaggagggccacccggtgacatccgagccctcacgcccagaaccggccgtcttcaaagccacactggaccgctccctgctcaagacctacgagcaggtgctggagaaccttgaatctaagaggttccagctggtggattcaaggtctcaagggcggttcctgggcaccgagccggagccggatgcagtaggactggactcgggccatatccgtggtgccgtcaacatgcctttcatggacttcctgactgaggatggcttcgagaagggcccagaagagctccgtgctctgttccagaccaagaaggtggatctctcgcagcctctcattgccacgtgccgcaagggagtcaccgcctgccacgtggccttggctgcctacctctgcggcaagcctgatgtggccgtgtacgatggctcctggtccgagtggtttcgccgggcccccccagagagccgtgtgtcccagggaaagtctgagaaggcctgagccgtgacctcttctgcttactgtaactgcggccggtttagtgaccccatgacttacagccggttcttacctcttaggtgaaggagatgacatgtttttagaattgctgtgcaaggctcaccctctctctgtcaacactggaataaactttgccttttctgagtagtg

SEQ ID NO: 29251 - protein, 297 aa, Homo sapiens; identical to SEQ ID NO: 4015

SEQ ID NO: 29252 - DNA, 1359 bp, Homo sapiens
ggccgcgcgggcctgggctgggcggagcgggcgtacccccacggcccggccagtggaaggcgcgggcagcagcggctccgagtggccgcggcggtgggctgtgccggagtctcctccctttggtccgctgcaggcccgcagcccgagtgtcgccgccatggcttcgccgcagctctgccgcgcgctggtgtcggcgcaatgggtggcggaggcgctgcgggccccgcgcgctgggcagcctctgcagctgctggacgcctcctggtacctgccgaagctggggcgcgacgcgcgacgcgagttcgaggagcgccacatcccgggcgccgctttcttcgacatcgaccagtgcagcgaccgcacctcgccctacgaccacatgctgcccggggccgagcatttcgcggagtacgcaggccgcctgggcgtgggcgcggccacccacgtcgtgatctacgacgccagcgaccagggcctctactccgccccgcgcgtctggtggatgttccgcgccttcggccaccacgccgtgtcactgcttgatggcggcctccgccactggctgcgccagaacctcccgctcagctccggcaagagccaacctgctcccgccgagttccgcgctcagctcgaccccgccttcatcaagacctacgaggacatcaaggagaacctggaatcccggcgcttccaggtggtggactcccgagccactggcaggttccgcggcaccgagcccgagccccgagacggcattgaacctggccacatcccaggtaccgtgaacatccccttcacagacttcctgagccaggaggggctggagaagagccctgaggagatccgccatctgttccaggagaagaaagtggacctgtctaagccactggtggccacgtgtggctctggcgtcacagcctgccacgtggcactaggggcctacctctgcggcaagccagacgtgcccatctacgatggctcctgggtggagtggtacatgcgcgcccggcccgaggatgtcatctcagagggccgggggaagacccactgaagctgggcaggacacaggcgagctcaggtgatgccggccaccagcaatgcctggcctggtagctccgcttctgctttcaccaagagagtgtttcttcactcaactcaggtggcatttggggtgacatctcaaaggccaggaattccgttgacttgttggctgccagtaggggcgggaggaaaggcggaggcgagccctggaggagggaggccacaactccgagctgcccacctggtgctgagctggggccccgcctcctttctgttttatttttgaggaaataaaataaccaagtgctaaatcttgta

SEQ ID NO: 29253 - protein, 297 aa, Homo sapiens; identical to SEQ ID NO: 4017

SEQ ID NO: 29254 - DNA, 1477 bp, Homo sapiens
ggcgcgggcagcagcggctccgagtggccgcggcggtgggctgtgccggagtctcctccctttggtccgctgcaggtcgccaatataaatgcttgatgagtgaatgaatgacttccgtctgggacttggttgcaaataaagccgagctgcatcttagggaggggtggagactttgcccctgtttgtgccttgaagccagcagggccttgccctaggatacctccacccaccctcctgcccagcaagtggaggcccgcagcccgagtgtcgccgccatggcttcgccgcagctctgccgcgcgctggtgtcggcgcaatgggtggcggaggcgctgcgggccccgcgcgctgggcagcctctgcagctgctggacgcctcctggtacctgccgaagctggggcgcgacgcgcgacgcgagttcgaggagcgccacatcccgggcgccgctttcttcgacatcgaccagtgcagcgaccgcacctcgccctacgaccacatgctgcccggggccgagcatttcgcggagtacgcaggccgcctgggcgtgggcgcggccacccacgtcgtgatctacgacgccagcgaccagggcctctactccgccccgcgcgtctggtggatgttccgcgccttcggccaccacgccgtgtcactgcttgatggcggcctccgccactggctgcgccagaacctcccgctcagctccggcaagagccaacctgctcccgccgagttccgcgctcagctcgaccccgccttcatcaagacctacgaggacatcaaggagaacctggaatcccggcgcttccaggtggtggactcccgagccactggcaggttccgcggcaccgagcccgagccccgagacggcattgaacctggccacatcccaggtaccgtgaacatccccttcacagacttcctgagccaggaggggctggagaagagccctgaggagatccgccatctgttccaggagaagaaagtggacctgtctaagccactggtggccacgtgtggctctggcgtcacagcctgccacgtggcactaggggcctacctctgcggcaagccagacgtgcccatctacgatggctcctgggtggagtggtacatgcgcgcccggcccgaggatgtcatctcagagggccgggggaagacccactgaagctgggcaggacacaggcgagctcaggtgatgccggccaccagcaatgcctggcctggtagctccgcttctgctttcaccaagagagtgtttcttcactcaactcaggtggcatttggggtgacatctcaaaggccaggaattccgttgacttgttggctgccagtaggggcgggaggaaaggcggaggcgagccctggaggagggaggccacaactccgagctgcccacctggtgctgagctggggccccgcctcctttctgttttatttttgaggaaataaaataaccaagtgctaaatcttgta

SEQ ID NO: 29255 - protein, 297 aa, Homo sapiens; identical to SEQ ID NO: 4017

SEQ ID NO: 29256 - DNA, 1356 bp, Homo sapiens
tgccggagtctcctccctttggtccgctgcaggttggtggcgggaggaggggacagctgcgggcgcggggagggggcgccgcgccgcgggggccatggcggagccaggaagccgggagtccgagacccgggcccgcagcccgagtgtcgccgccatggcttcgccgcagctctgccgcgcgctggtgtcggcgcaatgggtggcggaggcgctgcgggccccgcgcgctgggcagcctctgcagctgctggacgcctcctggtacctgccgaagctggggcgcgacgcgcgacgcgagttcgaggagcgccacatcccgggcgccgctttcttcgacatcgaccagtgcagcgaccgcacctcgccctacgaccacatgctgcccggggccgagcatttcgcggagtacgcaggccgcctgggcgtgggcgcggccacccacgtcgtgatctacgacgccagcgaccagggcctctactccgccccgcgcgtctggtggatgttccgcgccttcggccaccacgccgtgtcactgcttgatggcggcctccgccactggctgcgccagaacctcccgctcagctccggcaagagccaacctgctcccgccgagttccgcgctcagctcgaccccgccttcatcaagacctacgaggacatcaaggagaacctggaatcccggcgcttccaggtggtggactcccgagccactggcaggttccgcggcaccgagcccgagccccgagacggcattgaacctggccacatcccaggtaccgtgaacatccccttcacagacttcctgagccaggaggggctggagaagagccctgaggagatccgccatctgttccaggagaagaaagtggacctgtctaagccactggtggccacgtgtggctctggcgtcacagcctgccacgtggcactaggggcctacctctgcggcaagccagacgtgcccatctacgatggctcctgggtggagtggtacatgcgcgcccggcccgaggatgtcatctcagagggccgggggaagacccactgaagctgggcaggacacaggcgagctcaggtgatgccggccaccagcaatgcctggcctggtagctccgcttctgctttcaccaagagagtgtttcttcactcaactcaggtggcatttggggtgacatctcaaaggccaggaattccgttgacttgttggctgccagtaggggcgggaggaaaggcggaggcgagccctggaggagggaggccacaactccgagctgcccacctggtgctgagctggggccccgcctcctttctgttttatttttgaggaaataaaataaccaagtgctaaatcttgta

SEQ ID NO: 29257 - protein, 317 aa, Homo sapiens
MAEPGSRESETRARSPSVAAMASPQLCRALVSAQWVAEALRAPRAGQPLQLLDASWYLPKLGRDARREFEERHIPGAAFFDIDQCSDRTSPYDHMLPGAEHFAEYAGRLGVGAATHVVIYDASDQGLYSAPRVWWMFRAFGHHAVSLLDGGLRHWLRQNLPLSSGKSQPAPAEFRAQLDPAFIKTYEDIKENLESRRFQVVDSRATGRFRGTEPEPRDGIEPGHIPGTVNIPFTDFLSQEGLEKSPEEIRHLFQEKKVDLSKPLVATCGSGVTACHVALGAYLCGKPDVPIYDGSWVEWYMRARPEDVISEGRGKTH

SEQ ID NO: 29258 - DNA, 709 bp, Homo sapiens
gcaggttggtggcgggaggaggggacagctgcgggcgcggggagggggcgccgcgccgcgggggccatggcggagccaggaagccgggagtccgagacccgggcattgaacctggccacatcccaggtaccgtgaacatccccttcacagacttcctgagccaggaggggctggagaagagccctgaggagatccgccatctgttccaggagaagaaagtggacctgtctaagccactggtggccacgtgtggctctggcgtcacagcctgccacgtggcactaggggcctacctctgcggcaagccagacgtgcccatctacgatggctcctgggtggagtggtacatgcgcgcccggcccgaggatgtcatctcagagggccgggggaagacccactgaagctgggcaggacacaggcgagctcaggtgatgccggccaccagcaatgcctggcctggtagctccgcttctgctttcaccaagagagtgtttcttcactcaactcaggtggcatttggggtgacatctcaaaggccaggaattccgttgacttgttggctgccagtaggggcgggaggaaaggcggaggcgagccctggaggagggaggccacaactccgagctgcccacctggtgctgagctggggccccgcctcctttctgttttatttttgaggaaataaaataaccaagtgctaaatcttgta

SEQ ID NO: 29259 - protein, 81 aa, Homo sapiens
MPATSNAWPGSSASAFTKRVFLHSTQVAFGVTSQRPGIPLTCWLPVGAGGKAEASPGGGRPQLRAAHLVLSWGPASFLFYF

SEQ ID NO: 29260 - DNA, 1493 bp, Homo sapiens
gcgggaggaggggacagctgcgggcgcggggagggggcgccgcgccgcgggggccatggcggagccaggaagccgggagtccgagacccgggtcgccaatataaatgcttgatgagtgaatgaatgacttccgtctgggacttggttgcaaataaagccgagctgcatcttagggaggggtggagactttgcccctgtttgtgccttgaagccagcagggccttgccctaggatacctccacccaccctcctgcccagcaagtggaggcccgcagcccgagtgtcgccgccatggcttcgccgcagctctgccgcgcgctggtgtcggcgcaatgggtggcggaggcgctgcgggccccgcgcgctgggcagcctctgcagctgctggacgcctcctggtacctgccgaagctggggcgcgacgcgcgacgcgagttcgaggagcgccacatcccgggcgccgctttcttcgacatcgaccagtgcagcgaccgcacctcgccctacgaccacatgctgcccggggccgagcatttcgcggagtacgcaggccgcctgggcgtgggcgcggccacccacgtcgtgatctacgacgccagcgaccagggcctctactccgccccgcgcgtctggtggatgttccgcgccttcggccaccacgccgtgtcactgcttgatggcggcctccgccactggctgcgccagaacctcccgctcagctccggcaagagccaacctgctcccgccgagttccgcgctcagctcgaccccgccttcatcaagacctacgaggacatcaaggagaacctggaatcccggcgcttccaggtggtggactcccgagccactggcaggttccgcggcaccgagcccgagccccgagacggcattgaacctggccacatcccaggtaccgtgaacatccccttcacagacttcctgagccaggaggggctggagaagagccctgaggagatccgccatctgttccaggagaagaaagtggacctgtctaagccactggtggccacgtgtggctctggcgtcacagcctgccacgtggcactaggggcctacctctgcggcaagccagacgtgcccatctacgatggctcctgggtggagtggtacatgcgcgcccggcccgaggatgtcatctcagagggccgggggaagacccactgaagctgggcaggacacaggcgagctcaggtgatgccggccaccagcaatgcctggcctggtagctccgcttctgctttcaccaagagagtgtttcttcactcaactcaggtggcatttggggtgacatctcaaaggccaggaattccgttgacttgttggctgccagtaggggcgggaggaaaggcggaggcgagccctggaggagggaggccacaactccgagctgcccacctggtgctgagctggggccccgcctcctttctgttttatttttgaggaaataaaataaccaagtgctaaatcttgta

SEQ ID NO: 29261 - protein, 297 aa, Homo sapiens; identical to SEQ ID NO: 4017

SEQ ID NO: 29262 - DNA, 859 bp, Homo sapiens
cgcggggagggggcgccgcgccgcgggggccatggcggagccaggaagccgggagtccgagacccgggcccgcagcccgagtgtcgccgccatggcttcgccgcagctctgccgcgcgctggtgtcggcgcaatgggtggcggaggcgctgcgggccccgcgcgctgggcagcctctgcagctgctggacgcctcctggtacctgccgaagctggggcgcgacgcgcgacgcgagttcgaggagcgccacatcccgggcgccgctttcttcgacatcgaccagtgcagcgaccgcacctcgccctacgaccacatgctgcccggggccgagcatttcgcggagtacgcaggccgcctgggcgtgggcgcggccacccacgtcgtgatctacgacgccagcgaccagggcctctactccgccccgcgcgtctggtggatgttccgcgccttcggccaccacgccgtgtcactgcttgatggcggcctccgccactggctgcgccagaacctcccgctcagctccggcaagagccaacctgctcccgccgagttccgcgctcagctcgaccccgccttcatcaagacctacgaggacatcaaggagaacctggaatcccggcgcttccaggtggtggactcccgagccactggcaggttccgcggcaccgagcccgagccccgagacggtaacgcgggggaagggggcaggaggtcgtcgggggcgcggcctctacgccctgagcagtgccctggacttgacctttcttttatttttttaatttatcttgctttcatttcctttccttttttctttcctttccttccctttcccttccctcctttcccccttttccctacc

SEQ ID NO: 29263 - protein, 275 aa, Homo sapiens
MAEPGSRESETRARSPSVAAMASPQLCRALVSAQWVAEALRAPRAGQPLQLLDASWYLPKLGRDARREFEERHIPGAAFFDIDQCSDRTSPYDHMLPGAEHFAEYAGRLGVGAATHVVIYDASDQGLYSAPRVWWMFRAFGHHAVSLLDGGLRHWLRQNLPLSSGKSQPAPAEFRAQLDPAFIKTYEDIKENLESRRFQVVDSRATGRFRGTEPEPRDGNAGEGGRRSSGARPLRPEQCPGLDLSFIFLIYLAFISFPFFFPFLPFPFPPFPLFP

SEQ ID NO: 29264 - DNA, 2117 bp, Homo sapiens
ctctggtatgcaggaaagatagagaggagagggagggaggtgcgaagtcactgttgctgctgctagaagggccagagagagcccaggctggacaggcaaaacctggcctcgccagactcctggagcctgcacagagtgtgtgtctgagaagtccggattctggtgccagactgactgcctagtgagaagcctggcaccgccgggtcaggctagtgcactttttcttgtttgttttttgtttttgagacagagttttgctcttgttccccaggctggattgcaatggcacgatctcggctcactgcaacctccgcctcctgggttcaagcagttctcctgcctcagcctcccgagtagctgggattacaggtgccctccactaagcccggctaattttttgtatttttggtagagacggggtttcaccatgttggccagactggtttcaaacttctgacctcaggtgatccacctgcctgggcctcccaaagtgctgggattacaagcgtgagccaccgcaccaggccaggttagtgcacttctgtgagcctgagtgtcctccttgaaacggtgacaataatataccaggcctcttaagatcactcattcaacacatactggagagtctactgtgtcaggcattgttctaggatattgttaggattcagtggtacccagcaaggactcagtaaattccagctactgttcctattaggtcgccaatataaatgcttgatgagtgaatgaatgacttccgtctgggacttggttgcaaataaagccgagctgcatcttagggaggggtggagactttgcccctgtttgtgccttgaagccagcagggccttgccctaggatacctccacccaccctcctgcccagcaagtggaggcccgcagcccgagtgtcgccgccatggcttcgccgcagctctgccgcgcgctggtgtcggcgcaatgggtggcggaggcgctgcgggccccgcgcgctgggcagcctctgcagctgctggacgcctcctggtacctgccgaagctggggcgcgacgcgcgacgcgagttcgaggagcgccacatcccgggcgccgctttcttcgacatcgaccagtgcagcgaccgcacctcgccctacgaccacatgctgcccggggccgagcatttcgcggagtacgcaggccgcctgggcgtgggcgcggccacccacgtcgtgatctacgacgccagcgaccagggcctctactccgccccgcgcgtctggtggatgttccgcgccttcggccaccacgccgtgtcactgcttgatggcggcctccgccactggctgcgccagaacctcccgctcagctccggcaagagccaacctgctcccgccgagttccgcgctcagctcgaccccgccttcatcaagacctacgaggacatcaaggagaacctggaatcccggcgcttccaggtggtggactcccgagccactggcaggttccgcggcaccgagcccgagccccgagacggcattgaacctggccacatcccaggtaccgtgaacatccccttcacagacttcctgagccaggaggggctggagaagagccctgaggagatccgccatctgttccaggagaagaaagtggacctgtctaagccactggtggccacgtgtggctctggcgtcacagcctgccacgtggcactaggggcctacctctgcggcaagccagacgtgcccatctacgatggctcctgggtggagtggtacatgcgcgcccggcccgaggatgtcatctcagagggccgggggaagacccactgaagctgggcaggacacaggcgagctcaggtgatgccggccaccagcaatgcctggcctggtagctccgcttctgctttcaccaagagagtgtttcttcactcaactcaggtggcatttggggtgacatctcaaaggccaggaattccgttgacttgttggctgccagtaggggcgggaggaaaggcggaggcgagccctggaggagggaggccacaactccgagctgcccacctggtgctgagctggggccccgcctcctttctgttttatttttgaggaaataaaataaccaagtgctaaatcttgta

SEQ ID NO: 29265 - protein, 297 aa, Homo sapiens; identical to SEQ ID NO: 4017

SEQ ID NO: 29266 - DNA, 759 bp, Homo sapiens
ccgggttcaccaccactggtttctgcgttccctggactctgccctgcacgggccgcacctcccccgccggccctcgcccatgctccagccccagccctagccccaacagcggcctctccctgcttcccttctgacatcctccctgtcgcccaggcccgcagcccgagtgtcgccgccatggcttcgccgcagctctgccgcgcgctggtgtcggcgcaatgggtggcggaggcgctgcgggccccgcgcgctgggcagcctctgcagctgctggacgcctcctggtacctgccgaagctggggcgcgacgcgcgacgcgagttcgaggagcgccacatcccgggcgccgctttcttcgacatcgaccagtgcagcgaccgcacctcgccctacgaccacatgctgcccggggccgagcatttcgcggagtacgcaggccgcctgggcgtgggcgcggccacccacgtcgtgatctacgacgccagcgaccagggcctctactccgccccgcgcgtctggtggatgttccgcgccttcggccaccacgccgtgtcactgcttgatggcggcctccgccactggctgcgccagaacctcccgctcagttgttggctgccagtaggggcgggaggaaaggcggaggcgagccctggaggagggaggccacaactccgagctgcccacctggtgctgagctggggccccgcctcctttctgttttatttttgaggaaataaaataaccaagtgctaaatcttg

SEQ ID NO: 29267 - protein, 183 aa, Homo sapiens
MASPQLCRALVSAQWVAEALRAPRAGQPLQLLDASWYLPKLGRDARREFEERHIPGAAFFDIDQCSDRTSPYDHMLPGAEHFAEYAGRLGVGAATHVVIYDASDQGLYSAPRVWWMFRAFGHHAVSLLDGGLRHWLRQNLPLSCWLPVGAGGKAEASPGGGRPQLRAAHLVLSWGPASFLFYF

SEQ ID NO: 29268 - DNA, 2073 bp, Homo sapiens
ccgggttcaccaccactggtttctgcgttccctggactctgccctgcacgggccgcacctcccccgccggccctcgcccatgctccagccccagccctagccccaacagcggcctctccctgcttcccttctgacatcctccctgtcgcccaggcccgcagcccgagtgtcgccgccatggcttcgccgcagctctgccgcgcgctggtgtcggcgcaatgggtggcggaggcgctgcgggccccgcgcgctgggcagcctctgcagctgctggacgcctcctggtacctgccgaagctggggcgcgacgcgcgacgcgagttcgaggagcgccacatcccgggcgccgctttcttcgacatcgaccagtgcagcgaccgcacctcgccctacgaccacatgctgcccggggccgagcatttcgcggagtacgcaggccgcctgggcgtgggcgcggccacccacgtcgtgatctacgacgccagcgaccagggcctctactccgccccgcgcgtctggtggatgttccgcgccttcggccaccacgccgtgtcactgcttgatggcggcctccgccactggctgcgccagaacctcccgctcagctccggcaagagccaacctgctcccgccgagttccgcgctcagctcgaccccgccttcatcaagacctacgaggacatcaaggagaactcacttgaacccaggaggtggaggttgcagtaagccaagatcatgccactgcactccagcctgggcaacaagagcaaaactccatctcaaaaaaaaaaaaaagaacaaaaaaaggaaattagctgagcatggtggcatgtgcctgtagtagtcccagcccctcggggggaagctgaggcaggaggattgcttgagcccaggaggttgaggctgcagtgagccttgatcatgccactgcacttcagcctgggcaacagaatgagaccctgtctcagtaataataatatcagctattgctgttactggcgttattttttttttacatgccccaggccacccagtagggcacttttggaacacccattatgcttgtaattattcagttgcctgtctgccctgccagattaaagctccttgcctgcaggtactgcacgttctagctaggcaggggtcttgtttattgctttgctgtccctagggtgcatagtcaggaaaccttggggcccagttcttaggttcaaagttcagtcagcaatttgctagatgtgttagcctcaggtggtacttaacctcagcatcaccgtgtataaaatgggggctcctctaaacagtgctcaggttttatggttgtgagaattaaatgagatggtggatataaaggatttagcaccatgcttgcatgggatgctctcaatatctcgagcaccacaaatacgaggtaccattcatagcatccttctatttgtcccctcctccctgctcccctgctgtaggcattgaacctggccacatcccaggtaccgtgaacatccccttcacagacttcctgagccaggaggggctggagaagagccctgaggagatccgccatctgttccaggagaagaaagtggacctgtctaagccactggtggccacgtgtggctctggcgtcacagcctgccacgtggcactaggggcctacctctgcggcaagccagacgtgcccatctacgatggctcctgggtggagtggtacatgcgcgcccggcccgaggatgtcatctcagagggccgggggaagacccactgaagctgggcaggacacaggcgagctcaggtgatgccggccaccagcaatgcctggcctggtagctccgcttctgctttcaccaagagagtgtttcttcactcaactcaggtggcatttggggtgacatctcaaaggccaggaattccgttgacttgttggctgccagtaggggcgggaggaaaggcggaggcgagccctggaggagggaggccacaactccgagctgcccacctggtgctgagctggggccccgcctcctttctgttttatttttgaggaaataaaataaccaagtgctaaatcttgta

SEQ ID NO: 29269 - protein, 182 aa, Homo sapiens
MASPQLCRALVSAQWVAEALRAPRAGQPLQLLDASWYLPKLGRDARREFEERHIPGAAFFDIDQCSDRTSPYDHMLPGAEHFAEYAGRLGVGAATHVVIYDASDQGLYSAPRVWWMFRAFGHHAVSLLDGGLRHWLRQNLPLSSGKSQPAPAEFRAQLDPAFIKTYEDIKENSLEPRRWRLQ

SEQ ID NO: 29270 - DNA, 498 bp, Homo sapiens
gggctcggtgccgcggaacctgccagtggctcgggagtccaccacctggaagcgccgggattccaggttctccttgatgtcctcgtaggtcttgatgaaggcggggtggccgaaggcgcggaacatccaccagacgcgcggggcggagtagaggccctggtcgctggcgtcgtagatcacgacgtgggtggccgcgcccacgcccaggcggcctgcgtactccgcgaaatgctcggccccgggcagcatgtggtcgtagggcgaggtgcggtcgctgcactggtcgatgtcgaagaaagcggcgcccgggatgtggcgctcctcgaactcgcgtcgcgcgtcgcgccccagcttcggcaggtaccaggaggcgtccagcagctgcagaggctgcccagcgcgcggggcccgcagcgcctccgccacccattgcgccgacaccagcgcgcggcagagctgcggcgaagccatggcggcgacactcgggctgcgggcctg

SEQ ID NO: 29271 - protein, 89 aa, Homo sapiens
MLGPGQHVVVGRGAVAALVDVEESGARDVALLELASRVAPQLRQVPGGVQQLQRLPSARGPQRLRHPLRRHQRAAELRRSHGGDTRAAG

SEQ ID NO: 29272 - DNA, 556 bp, Homo sapiens
tttagcacttggttattttatttcctcaaaaataaaacagaaaggaggcggggtcgagctgagcgcggaactcggcgggagcaggttggctcttgccggagctgagcgggaggttctggcgcagccagtggcggaggccgccatcaagcagtgacacggcgtggtggccgaaggcgcggaacatccaccagacgcgcggggcggagtagaggccctggtcgctggcgtcgtagatcacgacgtgggtggccgcgcccacgcccaggcggcctgcgtactccgcgaaatgctcggccccgggcagcatgtggtcgtagggcgaggtgcggtcgctgcactggtcgatgtcgaagaaagcggcgcccgggatgtggcgctcctcgaactcgcgtcgcgcgtcgcgccccagcttcggcaggtaccaggaggcgtccagcagctgcagaggctgcccagcgcgcggggcccgcagcgcctccgccacccattgcgccgacaccagcgcgcggcagagctgcggcgaagccatggcggcgacactcgggctgcgggcctg

SEQ ID NO: 29273 - protein, 89 aa, Homo sapiens; identical to SEQ ID NO: 29271

SEQ ID NO: 29274 - DNA, 461 bp, Homo sapiens
ggaacagttggaaatgcgtttcccaaccttgcctaaccagctgccctggaatgttttccacttcctgggtcattgcctccagagatcaaagcccccatccacacagtgggctgaatatggatccatgcagcgatctggtcctggtgctgtggaatcagctttgcacaaggccccagaaggtctgcgttccagagccttcctgttggggcctcagtcttctcatctgaaaaatgggagcaaactcagttctgccatgcccagtgtgggtgtgatgtcacatcagatggagtctcgctctgtcacccaggctgaagtgcaatggcaagatctcagctcactgcaacctccacctcccagtttcaagcgattcttgtgcctcagcctctggagtagctgggattacaggtgcccaccaccacacctggctgatttttgtatttttagtagagacggggtttcac

SEQ ID NO: 29275 - protein, 148 aa, Homo sapiens
MRFPTLPNQLPWNVFHFLGHCLQRSKPPSTQWAEYGSMQRSGPGAVESALHKAPEGLRSRAFLLGPQSSHLKNGSKLSSAMPSVGVMSHQMESRSVTQAEVQWQDLSSLQPPPPSFKRFLCLSLWSSWDYRCPPPHLADFCIFSRDGV

SEQ ID NO: 29276 - DNA, 1854 bp, Homo sapiens; identical to SEQ ID NO: 4022

SEQ ID NO: 29277 - protein, 297 aa, Homo sapiens
MQTPRPAMRMEAGEAAPPAGAGGRAAGGWGKWVRLNVGGTVFLTTRQTLCREQKSFLSRLCQGEELQSDRDETGAYLIDRDPTYFGPILNFLRHGKLVLDKDMAEEGVLEEAEFYNIGPLIRIIKDRMEEKDYTVTQVPPKHVYRVLQCQEEELTQMVSTMSDGWRFEQLVNIGSSYNYGSEDQAEFLCVVSKELHSTPNGLSSESSRKTKSTEEQLEEQQQQEEEVEEVEVEQVQVEADAQEKGSRPHPLRPEAELAVRASPRPLARPQSCHPCCYKPEAPGCEAPDHLQGLGVPI

SEQ ID NO: 29278 - DNA, 1840 bp, Homo sapiens
gacgccgcggccggcgatgaggatggaggccggggaggcagcgccgccggcgggggcgggcggccgcgccgcaggcggctggggcaagtgggtgcggctcaacgtggggggcacggtgttcctgaccacccggcagacgctgtgccgcgagcagaagtccttcctcagccgcctgtgccagggggaagagctgcagtcggaccgggatgagaccggggcctacctcattgaccgtgaccccacctacttcgggcccatcctgaacttcctccggcatggcaagctggtgctggacaaggacatggctgaggagggggtcctggaggaagccgagttctacaacatcggcccgctgatccgcatcatcaaagaccggatggaagagaaggactacacggtcacccaggtcccacccaagcacgtgtaccgcgtgctgcagtgccaggaggaggagctcacgcaaatggtctccaccatgtctgatggctggcgcttcgagcagctggtgaacatcggctcctcctacaactacggcagcgaggaccaggcagagttcctgtgtgtggtgtccaaggagctccacagcaccccaaacgggctgagctcagagtccagccgcaaaaccaagagcacggaggagcagctggaggagcagcagcagcaggaggaggaggtggaggaggtggaggtggaacaggtgcaggtggaggcagatgcacaggagaaaggtgcagccaacccccaggaggatgattgctaagcaaagccggagcctcccgcccactccttgctggagccagctgcagaaccgggggccccggggctgctgggggggcaccagggttagctcagccacttgcctggcgcctcacccgcataaccatcccttctctcactttctctttgcagcccagtcatctcaggatcccgctaaccttttctccctcccaccactgcctcctcctccgcttcccgctggaggtcctgcctcatcttcatccacctcttcttcctcctggatctcatctgcaccctgcctcttccctctctgcccctgtccgggttttctctctgcctgctcacgcctccatcccgggtctgccctggtcccagcctcccgtgccctccacccaggccccctggccctgcatcccagagcgtcctgcctgccgcctcctgcgccccttctggtacctcctgcctcccagcctggggaggaggggcgcagctgcacctcctctgtgcccactaaccctgccgggcacctctgagactgggccctggctgcaggccctgccccccctcctctcctcccggcctcctcctcacgtttcctccttgcaggttcccgtccgcaccctctcagacctgaggctgagcttgcagtgagggcttctcctcggcccctcgcccgcccccagagctgccatccctggtttgtagcttggcggtgctggagggaggggtggagcgaggagggtgctcatctcttgatccttggacttgagccgagctttcggctgattatctccacccaccaaagtttctcatccgaccttggccctgcatcaccccctccttaccggccccacctccgcccctcccatcctcctgcccttcccctcttttttttctagctgttacaagccagaggcacccggatgtgaggccccagatcacctccagggacttggggttcccatctgaaatcctttatttttgtaccatgggtgggtatggcggctgagccaggggccctcctgtgtttgacttcccgggatgggtccttgcttctcagctgtgtccgaccccaccatgtaataaaacccaaaggaacagc

SEQ ID NO: 29279 - protein, 247 aa, Homo sapiens
MRMEAGEAAPPAGAGGRAAGGWGKWVRLNVGGTVFLTTRQTLCREQKSFLSRLCQGEELQSDRDETGAYLIDRDPTYFGPILNFLRHGKLVLDKDMAEEGVLEEAEFYNIGPLIRIIKDRMEEKDYTVTQVPPKHVYRVLQCQEEELTQMVSTMSDGWRFEQLVNIGSSYNYGSEDQAEFLCVVSKELHSTPNGLSSESSRKTKSTEEQLEEQQQQEEEVEEVEVEQVQVEADAQEKGAANPQEDDC

SEQ ID NO: 29280 - DNA, 1494 bp, Homo sapiens
gacgccgcggccggcgatgaggatggaggccggggaggcagcgccgccggcgggggcgggcggccgcgccgcaggcggctggggcaagtgggtgcggctcaacgtggggggcacggtgttcctgaccacccggcagacgctgtgccgcgagcagaagtccttcctcagccgcctgtgccagggggaagagctgcagtcggaccgggatgagaccggggcctacctcattgaccgtgaccccacctacttcgggcccatcctgaacttcctccggcatggcaagctggtgctggacaaggacatggctgaggagggggtcctggaggaagccgagttctacaacatcggcccgctgatccgcatcatcaaagaccggatggaagagaaggactacacggtcacccaggtcccacccaagcacgtgtaccgcgtgctgcagtgccaggaggaggagctcacgcaaatggtctccaccatgtctgatggctggcgcttcgagcagctggtgaacatcggctcctcctacaactacggcagcgaggaccaggcagagttcctgtgtgtggtgtccaaggagctccacagcaccccaaacgggctgagctcagagtccagccgcaaaaccaagctgttacaagccagaggcacccggatgtgaggccccagatcacctccagggacttggggttcccatctgaaatcctttatttttgtaccatggggtgggccccgggcctgagaaggaagaagcaccctctccccggcctcctctgtctgcacccgtggggctgtgacttactcctgcctccaggggcggggcggggcccccctgggacctcttaaggcccaaggtgggccccaggacctctgggcagagtggactgctcatggcagatgtgtggcaatgtctggctgtgtctctccggcacctgcgtcccctctcccgggctcccctgctgcatggtggatgtgctccttcctggcccggtcacattgcctccttgagccttagtccagggggtcactcctcccaccccacctacctcacagggttgttgtgagggtgcacagaggagcaaagtccctgaaggccctcaggcagtatataggggccgcccaccttcagctgccctgggatgggaaggacccagcccgacccctgggcataacactgtgtttgcaaatggagattcaggtattggggatgcaggttgtggggagctggcctggcagagtaggggtagttggcttggccttctctttggtgatcccacccccagccatttgcattgctggcccagcgcctggcctggggggcggggagaggcagcagaaggggctgggcaggggcggtggaggactcaggaactgcccggggagagtgggtatggcggctgagccaggggccctcctgtgtttgacttcccgggatgggtccttgcttctcagctgtgtccgaccccaccatgtaataaaacccaaaggaacagccca

SEQ ID NO: 29281 - protein, 213 aa, Homo sapiens
MRMEAGEAAPPAGAGGRAAGGWGKWVRLNVGGTVFLTTRQTLCREQKSFLSRLCQGEELQSDRDETGAYLIDRDPTYFGPILNFLRHGKLVLDKDMAEEGVLEEAEFYNIGPLIRIIKDRMEEKDYTVTQVPPKHVYRVLQCQEEELTQMVSTMSDGWRFEQLVNIGSSYNYGSEDQAEFLCVVSKELHSTPNGLSSESSRKTKLLQARGTRM

SEQ ID NO: 29282 - DNA, 1585 bp, Homo sapiens
gacgccgcggccggcgatgaggatggaggccggggaggcagcgccgccggcgggggcgggcggccgcgccgcaggcggctggggcaagtgggtgcggctcaacgtggggggcacggtgttcctgaccacccggcagacgctgtgccgcgagcagaagtccttcctcagccgcctgtgccagggggaagagctgcagtcggaccgggatgagaccggggcctacctcattgaccgtgaccccacctacttcgggcccatcctgaacttcctccggcatggcaagctggtgctggacaaggacatggctgaggagggggtcctggaggaagccgagttctacaacatcggcccgctgatccgcatcatcaaagaccggatggaagagaaggactacacggtcacccaggtcccacccaagcacgtgtaccgcgtgctgcagtgccaggaggaggagctcacgcaaatggtctccaccatgtctgatggctggcgcttcgagcagctggtgaacatcggctcctcctacaactacggcagcgaggaccaggcagagttcctgtgtgtggtgtccaaggagctccacagcaccccaaacgggctgagctcagagtccagccgcaaaaccaaggttcccgtccgcaccctctcagacctgaggctgagcttgcagtgagggcttctcctcggcccctcgcccgcccccagagctgccatccctgctgttacaagccagaggcacccggatgtgaggccccagatcacctccagggacttggggttcccatctgaaatcctttatttttgtaccatggggtgggccccgggcctgagaaggaagaagcaccctctccccggcctcctctgtctgcacccgtggggctgtgacttactcctgcctccaggggcggggcggggcccccctgggacctcttaaggcccaaggtgggccccaggacctctgggcagagtggactgctcatggcagatgtgtggcaatgtctggctgtgtctctccggcacctgcgtcccctctcccgggctcccctgctgcatggtggatgtgctccttcctggcccggtcacattgcctccttgagccttagtccagggggtcactcctcccaccccacctacctcacagggttgttgtgagggtgcacagaggagcaaagtccctgaaggccctcaggcagtatataggggccgcccaccttcagctgccctgggatgggaaggacccagcccgacccctgggcataacactgtgtttgcaaatggagattcaggtattggggatgcaggttgtggggagctggcctggcagagtaggggtagttggcttggccttctctttggtgatcccacccccagccatttgcattgctggcccagcgcctggcctggggggcggggagaggcagcagaaggggctgggcaggggcggtggaggactcaggaactgcccggggagagtgggtatggcggctgagccaggggccctcctgtgtttgacttcccgggatgggtccttgcttctcagctgtgtccgaccccaccatgtaataaaacccaaaggaacagccca

SEQ ID NO: 29283 - protein, 218 aa, Homo sapiens
MRMEAGEAAPPAGAGGRAAGGWGKWVRLNVGGTVFLTTRQTLCREQKSFLSRLCQGEELQSDRDETGAYLIDRDPTYFGPILNFLRHGKLVLDKDMAEEGVLEEAEFYNIGPLIRIIKDRMEEKDYTVTQVPPKHVYRVLQCQEEELTQMVSTMSDGWRFEQLVNIGSSYNYGSEDQAEFLCVVSKELHSTPNGLSSESSRKTKVPVRTLSDLRLSLQ

SEQ ID NO: 29284 - DNA, 1757 bp, Homo sapiens
gacgccgcggccggcgatgaggatggaggccggggaggcagcgccgccggcgggggcgggcggccgcgccgcaggcggctggggcaagtgggtgcggctcaacgtggggggcacggtgttcctgaccacccggcagacgctgtgccgcgagcagaagtccttcctcagccgcctgtgccagggggaagagctgcagtcggaccgggatgagaccggggcctacctcattgaccgtgaccccacctacttcgggcccatcctgaacttcctccggcatggcaagctggtgctggacaaggacatggctgaggagggggtcctggaggaagccgagttctacaacatcggcccgctgatccgcatcatcaaagaccggatggaagagaaggactacacggtcacccaggtcccacccaagcacgtgtaccgcgtgctgcagtgccaggaggaggagctcacgcaaatggtctccaccatgtctgatggctggcgcttcgagcagctggtgaacatcggctcctcctacaactacggcagcgaggaccaggcagagttcctgtgtgtggtgtccaaggagctccacagcaccccaaacgggctgagctcagagtccagccgcaaaaccaagagcacggaggagcagctggaggagcagcagcagcaggaggaggaggtggaggaggtggaggtggaacaggtgcaggtggaggcagatgcacaggagaaagcccagtcatctcaggatcccgctaaccttttctccctcccaccactgcctcctcctccgcttcccgctggaggttcccgtccgcaccctctcagacctgaggctgagcttgcagtgagggcttctcctcggcccctcgcccgcccccagagctgccatccctgctgttacaagccagaggcacccggatgtgaggccccagatcacctccagggacttggggttcccatctgaaatcctttatttttgtaccatggggtgggccccgggcctgagaaggaagaagcaccctctccccggcctcctctgtctgcacccgtggggctgtgacttactcctgcctccaggggcggggcggggcccccctgggacctcttaaggcccaaggtgggccccaggacctctgggcagagtggactgctcatggcagatgtgtggcaatgtctggctgtgtctctccggcacctgcgtcccctctcccgggctcccctgctgcatggtggatgtgctccttcctggcccggtcacattgcctccttgagccttagtccagggggtcactcctcccaccccacctacctcacagggttgttgtgagggtgcacagaggagcaaagtccctgaaggccctcaggcagtatataggggccgcccaccttcagctgccctgggatgggaaggacccagcccgacccctgggcataacactgtgtttgcaaatggagattcaggtattggggatgcaggttgtggggagctggcctggcagagtaggggtagttggcttggccttctctttggtgatcccacccccagccatttgcattgctggcccagcgcctggcctggggggcggggagaggcagcagaaggggctgggcaggggcggtggaggactcaggaactgcccggggagagtgggtatggcggctgagccaggggccctcctgtgtttgacttcccgggatgggtccttgcttctcagctgtgtccgaccccaccatgtaataaaacccaaaggaacagccca

SEQ ID NO: 29285 - protein, 314 aa, Homo sapiens
MRMEAGEAAPPAGAGGRAAGGWGKWVRLNVGGTVFLTTRQTLCREQKSFLSRLCQGEELQSDRDETGAYLIDRDPTYFGPILNFLRHGKLVLDKDMAEEGVLEEAEFYNIGPLIRIIKDRMEEKDYTVTQVPPKHVYRVLQCQEEELTQMVSTMSDGWRFEQLVNIGSSYNYGSEDQAEFLCVVSKELHSTPNGLSSESSRKTKSTEEQLEEQQQQEEEVEEVEVEQVQVEADAQEKAQSSQDPANLFSLPPLPPPPLPAGGSRPHPLRPEAELAVRASPRPLARPQSCHPCCYKPEAPGCEAPDHLQGLGVPI

SEQ ID NO: 29286 - DNA, 520 bp, Homo sapiens
cagggatggcagctctgggggcgggcgaggggccgaggagaagccctcactgcaagctcagcctcaggtctgagagggtgcggacgggaacctgcaaggaggaaacgtgaggaggaggccgggaggagaggagggggggcagggcctgcagccagggcccagtctcagaggtgcccggcagggttagtgggcacagaggaggtgcagctgcgcccctcctccccaggctgggaggcaggaggtaccagaaggggcgcaggaggcggcaggcaggacgctctgggatgcagggccagggggcctgggtggagggcacgggaggctgggaccagggcagacccgggatggaggcgtgagcaggcagagagaaaacccggacaggggtgcagctcttccccctggcacaggcggctgaggaaggacttctgctcgcggcacagcgtctgccgggtggtcaggaacaccgtgccccccacgttgagccgcacccacttgccccagccgcctgcggcgcggccgc

SEQ ID NO: 29287 - protein, 34 aa, Homo sapiens
MAALGAGEGPRRSPHCKLSLRSERVRTGTCKEET

SEQ ID NO: 29288 - DNA, 901 bp, Homo sapiens
gcgccgcaggcggctggggcaagtgggtgcggctcaacgtggggggcacggtgttcctgaccacccggcagacgctgtgccgcgagcagaagtccttcctcagccgcctgtgccagggggaagagctgcagtcggaccgggcctgagaaggaagaagcaccctctccccggcctcctctgtctgcacccgtggggctgtgacttactcctgcctccaggggcggggcggggcccccctgggacctcttaaggcccaaggtgggccccaggacctctgggcagagtggactgctcatggcagatgtgtggcaatgtctggctgtgtctctccggcacctgcgtcccctctcccgggctcccctgctgcatggtggatgtgctccttcctggcccggtcacattgcctccttgagccttagtccagggggtcactcctcccaccccacctacctcacagggttgttgtgagggtgcacagaggagcaaagtccctgaaggccctcaggcagtatataggggccgcccaccttcagctgccctgggatgggaaggacccagcccgacccctgggcataacactgtgtttgcaaatggagattcaggtattggggatgcaggttgtggggagctggcctggcagagtaggggtagttggcttggccttctctttggtgatcccacccccagccatttgcattgctggcccagcgcctggcctggggggcggggagaggcagcagaaggggctgggcaggggcggtggaggactcaggaactgcccggggagagtgggtatggcggctgagccaggggccctcctgtgtttgacttcccgggatgggtccttgcttctcagctgtgtccgaccccaccatgtaataaaacccaaaggaacagccca

SEQ ID NO: 29289 - protein, 102 aa, Homo sapiens
MEIQVLGMQVVGSWPGRVGVVGLAFSLVIPPPAICIAGPAPGLGGGERQQKGLGRGGGGLRNCPGRVGMAAEPGALLCLTSRDGSLLLSCVRPHHVIKPKGT

SEQ ID NO: 29290 - DNA, 1164 bp, Homo sapiens
cctgcctcatcttcatccacctcttcttcctcctggatctcatctgcaccctgcctcttccctctctgcccctgtccgggttttctctctgcctgctcacgcctccatcccgggtctgccctggtcccagcctcccgtgccctccacccaggccccctggccctgcatcccagagcgtcctgcctgccgcctcctgcgccccttctggttcccgtccgcaccctctcagacctgaggctgagcttgcagtgagggcttctcctcggcccctcgcccgcccccagagctgccatccctgctgttacaagccagaggcacccggatgtgaggccccagatcacctccagggacttggggttcccatctgaaatcctttatttttgtaccatggggtgggccccgggcctgagaaggaagaagcaccctctccccggcctcctctgtctgcacccgtggggctgtgacttactcctgcctccaggggcggggcggggcccccctgggacctcttaaggcccaaggtgggccccaggacctctgggcagagtggactgctcatggcagatgtgtggcaatgtctggctgtgtctctccggcacctgcgtcccctctcccgggctcccctgctgcatggtggatgtgctccttcctggcccggtcacattgcctccttgagccttagtccagggggtcactcctcccaccccacctacctcacagggttgttgtgagggtgcacagaggagcaaagtccctgaaggccctcaggcagtatataggggccgcccaccttcagctgccctgggatgggaaggacccagcccgacccctgggcataacactgtgtttgcaaatggagattcaggtattggggatgcaggttgtggggagctggcctggcagagtaggggtagttggcttggccttctctttggtgatcccacccccagccatttgcattgctggcccagcgcctggcctggggggcggggagaggcagcagaaggggctgggcaggggcggtggaggactcaggaactgcccggggagagtgggtatggcggctgagccaggggccctcctgtgtttgacttcccgggatgggtccttgcttctcagctgtgtccgaccccaccatgtaataaaacccaaaggaacagccca

SEQ ID NO: 29291 - protein, 102 aa, Homo sapiens; identical to SEQ ID NO: 29289

SEQ ID NO: 29292 - DNA, 368 bp, Homo sapiens
gtgtcactgccttgtggcatcccctatttctgtggggatggggaggacaggccacttttggatacccttggcccatgaagtgtcagccagagtggcttaaggattgcagagtggcagaaaaagccctggccatgtgcccacaagccccctatcccactcttttctgcctgctctgtgaccttgggcaagtcactgtccctctctgggccacaattgcctctaaaattgggacagactcaggaactgcccggggagagtgggtatggcggctgagccaggggccctcctgtgtttgacttcccgggatgggtccttgcttctcagctgtgtccgaccccaccatgtaataaaacccaaaggaacagccc

SEQ ID NO: 29293 - protein, 73 aa, Homo sapiens
MKCQPEWLKDCRVAEKALAMCPQAPYPTLFCLLCDLGQVTVPLWATIASKIGTDSGTARGEWVWRLSQGPSCV

SEQ ID NO: 29294 - DNA, 178 bp, Homo sapiens
agcaccctctccccggcctcctctgtctgcacccgtggggctgtgacttactcctgcccggggagagtgggtatggcggctgagccaggggccctcctgtgtttgacttcccgggatgggtccttgcttctcagctgtgtccgaccccaccatgtaataaaacccaaaggaacagccc

SEQ ID NO: 29295 - protein, 34 aa, Homo sapiens
MAAEPGALLCLTSRDGSLLLSCVRPHHVIKPKGT

SEQ ID NO: 29296 - DNA, 3195 bp, Homo sapiens
tcttgagccagacccagtccagctctggtgcctgccctctggtgcgagctgacctgagatgcacttccctcctctgtgagctgtctcggcacccacttgcagtcactgccgcctgatgttgttactcttccactccaaaaggatgcccgtggccgaggccccccaggtggctggcgggcagggggacggaggtgatggcgaggaagcggagccggaggggatgttcaaggcctgtgaggactccaagagaaaagcccggggctacctccgcctggtgcccctgtttgtgctgctggccctgctcgtgctggcttcggcgggggtgctactctggtatttcctagggtacaaggcggaggtgatggtcagccaggtgtactcaggcagtctgcgtgtactcaatcgccacttctcccaggatcttacccgccgggaatctagtgccttccgcagtgaaaccgccaaagcccagaagatgctcaaggagctcatcaccagcacccgcctgggaacttactacaactccagctccgtctattcctttggggagggacccctcacctgcttcttctggttcattctccaaatccccgagcaccgccggctgatgctgagccccgaggtggtgcaggcactgctggtggaggagctgctgtccacagtcaacagctcggctgccgtcccctacagggccgagtacgaagtggaccccgagggcctagtgatcctggaagccagtgtgaaagacatagctgcattgaattccacgctgggttgttaccgctacagctacgtgggccagggccaggtcctccggctgaaggggcctgaccacctggcctccagctgcctgtggcacctgcagggccccaaggacctcatgctcaaactccggctggagtggacgctggcagagtgccgggaccgactggccatgtatgacgtggccgggcccctggagaagaggctcatcacctcggtgtacggctgcagccgccaggagcccgtggtggaggttctggcgtcgggggccatcatggcggtcgtctggaagaagggcctgcacagctactacgaccccttcgtgctctccgtgcagccggtggtcttccaggcctgtgaagtgaacctgacgctggacaacaggctcgactcccagggcgtcctcagcaccccgtacttccccagctactactcgccccaaacccactgctcctggcacctcacggtgccctctctggactacggcttggccctctggtttgatgcctatgcactgaggaggcagaagtatgatttgccgtgcacccagggccagtggacgatccagaacaggaggctgtgtggcttgcgcatcctgcagccctacgccgagaggatccccgtggtggccacggccgggatcaccatcaacttcacctcccagatctccctcaccgggcccggtgtgcgggtgcactatggcttgtacaaccagtcggacccctgccctggagagttcctctgttctgtgaatggactctgtgtccctgcctgtgatggggtcaaggactgccccaacggcctggatgagagaaactgcgtttgcagagccacattccagtgcaaagaggacagcacatgcatctcactgcccaaggtctgtgatgggcagcctgattgtctcaacggcagcgacgaagagcagtgccaggaaggggtgccatgtgggacattcaccttccagtgtgaggaccggagctgcgtgaagaagcccaacccgcagtgtgatgggcggcccgactgcagggacggctcggatgaggagcactgtgactgtggcctccagggcccctccagccgcattgttggtggagctgtgtcctccgagggtgagtggccatggcaggccagcctccaggttcggggtcgacacatctgtgggggggccctcatcgctgaccgctgggtgataacagctgcccactgcttccaggaggacagcatggcctccacggtgctgtggaccgtgttcctgggcaaggtgtggcagaactcgcgctggcctggagaggtgtccttcaaggtgagccgcctgctcctgcacccgtaccacgaagaggacagccatgactacgacgtggcgctgctgcagctcgaccacccggtggtgcgctcggccgccgtgcgccccgtctgcctgcccgcgcgctcccacttcttcgagcccggcctgcactgctggattacgggctggggcgccttgcgcgagggcggccccatcagcaacgctctgcagaaagtggatgtgcagttgatcccacaggacctgtgcagcgaggtctatcgctaccaggtgacgccacgcatgctgtgtgccggctaccgcaagggcaagaaggatgcctgtcagggtgactcaggtggtccgctggtgtgcaaggcactcagtggccgctggttcctggcggggctggtcagctggggcctgggctgtggccggcctaactacttcggcgtctacacccgcatcacaggtgtgatcagctggatccagcaagtggtgacctgaggaactgcccccctgcaaagcagggcccacctcctggactcagagagcccagggcaactgccaagcagggggacaagtattctggcggggggtgggggagagagcaggccctgtggtggcaggaggtggcatcttgtctcgtccctgatgtctgctccagtgatggcaggaggatggagaagtgccagcagctgggggtcaagacgtcccctgaggacccaggcccacacccagcccttctgcctcccaattctctctcctccgtccccttcctccactgctgcctaatgcaaggcagtggctcagcagcaagaatgctggttctacatcccgaggagtgtctgaggtgcgccccactctgtacagaggctgtttgggcagccttgcctccagagagcagattccagcttcggaagcccctggtctaacttgggatctgggaatggaaggtgctcccatcggaggggaccctcagagccctggagactgccaggtgggcctgctgccactgtaagccaaaaggtggggaagtcctgactccagggtccttgccccacccctgcctgccacctgggccctcacagcccagaccctcactgggaggtgagctcagctgccctttggaataaagctgcctgatccaa

SEQ ID NO: 29297 - protein, 811 aa, Homo sapiens; identical to SEQ ID NO: 4025

SEQ ID NO: 29298 - DNA, 3123 bp, Homo sapiens
gagccacctaccctgctccgaggccaggcctgcagggcctcatcggccagagggtgatcagtgagcagaaggatgcccgtggccgaggccccccaggtggctggcgggcagggggacggaggtgatggcgaggaagcggagccggaggggatgttcaaggcctgtgaggactccaagagaaaagcccggggctacctccgcctggtgcccctgtttgtgctgctggccctgctcgtgctggcttcggcgggggtgctactctggtatttcctagggtacaaggcggaggtgatggtcagccaggtgtactcaggcagtctgcgtgtactcaatcgccacttctcccaggatcttacccgccgggaatctagtgccttccgcagtgaaaccgccaaagcccagaagatgctcaaggagctcatcaccagcacccgcctgggaacttactacaactccagctccgtctattcctttggggagggacccctcacctgcttcttctggttcattctccaaatccccgagcaccgccggctgatgctgagccccgaggtggtgcaggcactgctggtggaggagctgctgtccacagtcaacagctcggctgccgtcccctacagggccgagtacgaagtggaccccgagggcctagtgatcctggaagccagtgtgaaagacatagctgcattgaattccacgctgggttgttaccgctacagctacgtgggccagggccaggtcctccggctgaaggggcctgaccacctggcctccagctgcctgtggcacctgcagggccccaaggacctcatgctcaaactccggctggagtggacgctggcagagtgccgggaccgactggccatgtatgacgtggccgggcccctggagaagaggctcatcacctcggtgtacggctgcagccgccaggagcccgtggtggaggttctggcgtcgggggccatcatggcggtcgtctggaagaagggcctgcacagctactacgaccccttcgtgctctccgtgcagccggtggtcttccaggcctgtgaagtgaacctgacgctggacaacaggctcgactcccagggcgtcctcagcaccccgtacttccccagctactactcgccccaaacccactgctcctggcacctcacggtgccctctctggactacggcttggccctctggtttgatgcctatgcactgaggaggcagaagtatgatttgccgtgcacccagggccagtggacgatccagaacaggaggctgtgtggcttgcgcatcctgcagccctacgccgagaggatccccgtggtggccacggccgggatcaccatcaacttcacctcccagatctccctcaccgggcccggtgtgcgggtgcactatggcttgtacaaccagtcggacccctgccctggagagttcctctgttctgtgaatggactctgtgtccctgcctgtgatggggtcaaggactgccccaacggcctggatgagagaaactgcgtttgcagagccacattccagtgcaaagaggacagcacatgcatctcactgcccaaggtctgtgatgggcagcctgattgtctcaacggcagcgacgaagagcagtgccaggaaggggtgccatgtgggacattcaccttccagtgtgaggaccggagctgcgtgaagaagcccaacccgcagtgtgatgggcggcccgactgcagggacggctcggatgaggagcactgtgactgtggcctccagggcccctccagccgcattgttggtggagctgtgtcctccgagggtgagtggccatggcaggccagcctccaggttcggggtcgacacatctgtgggggggccctcatcgctgaccgctgggtgataacagctgcccactgcttccaggaggacagcatggcctccacggtgctgtggaccgtgttcctgggcaaggtgtggcagaactcgcgctggcctggagaggtgtccttcaaggtgagccgcctgctcctgcacccgtaccacgaagaggacagccatgactacgacgtggcgctgctgcagctcgaccacccggtggtgcgctcggccgccgtgcgccccgtctgcctgcccgcgcgctcccacttcttcgagcccggcctgcactgctggattacgggctggggcgccttgcgcgagggcggccccatcagcaacgctctgcagaaagtggatgtgcagttgatcccacaggacctgtgcagcgaggtctatcgctaccaggtgacgccacgcatgctgtgtgccggctaccgcaagggcaagaaggatgcctgtcagggtgactcaggtggtccgctggtgtgcaaggcactcagtggccgctggttcctggcggggctggtcagctggggcctgggctgtggccggcctaactacttcggcgtctacacccgcatcacaggtgtgatcagctggatccagcaagtggtgacctgaggaactgcccccctgcaaagcagggcccacctcctggactcagagagcccagggcaactgccaagcagggggacaagtattctggcggggggtgggggagagagcaggccctgtggtggcaggaggtggcatcttgtctcgtccctgatgtctgctccagtgatggcaggaggatggagaagtgccagcagctgggggtcaagacgtcccctgaggacccaggcccacacccagcccttctgcctcccaattctctctcctccgtccccttcctccactgctgcctaatgcaaggcagtggctcagcagcaagaatgctggttctacatcccgaggagtgtctgaggtgcgccccactctgtacagaggctgtttgggcagccttgcctccagagagcagattccagcttcggaagcccctggtctaacttgggatctgggaatggaaggtgctcccatcggaggggaccctcagagccctggagactgccaggtgggcctgctgccactgtaagccaaaaggtggggaagtcctgactccagggtccttgccccacccctgcctgccacctgggccctcacagcccagaccctcactgggaggtgagctcagctgccctttggaataaagctgcctgatcc

SEQ ID NO: 29299 - protein, 802 aa, Homo sapiens
MPVAEAPQVAGGQGDGGDGEEAEPEGMFKACEDSKRKARGYLRLVPLFVLLALLVLASAGVLLWYFLGYKAEVMVSQVYSGSLRVLNRHFSQDLTRRESSAFRSETAKAQKMLKELITSTRLGTYYNSSSVYSFGEGPLTCFFWFILQIPEHRRLMLSPEVVQALLVEELLSTVNSSAAVPYRAEYEVDPEGLVILEASVKDIAALNSTLGCYRYSYVGQGQVLRLKGPDHLASSCLWHLQGPKDLMLKLRLEWTLAECRDRLAMYDVAGPLEKRLITSVYGCSRQEPVVEVLASGAIMAVVWKKGLHSYYDPFVLSVQPVVFQACEVNLTLDNRLDSQGVLSTPYFPSYYSPQTHCSWHLTVPSLDYGLALWFDAYALRRQKYDLPCTQGQWTIQNRRLCGLRILQPYAERIPVVATAGITINFTSQISLTGPGVRVHYGLYNQSDPCPGEFLCSVNGLCVPACDGVKDCPNGLDERNCVCRATFQCKEDSTCISLPKVCDGQPDCLNGSDEEQCQEGVPCGTFTFQCEDRSCVKKPNPQCDGRPDCRDGSDEEHCDCGLQGPSSRIVGGAVSSEGEWPWQASLQVRGRHICGGALIADRWVITAAHCFQEDSMASTVLWTVFLGKVWQNSRWPGEVSFKVSRLLLHPYHEEDSHDYDVALLQLDHPVVRSAAVRPVCLPARSHFFEPGLHCWITGWGALREGGPISNALQKVDVQLIPQDLCSEVYRYQVTPRMLCAGYRKGKKDACQGDSGGPLVCKALSGRWFLAGLVSWGLGCGRPNYFGVYTRITGVISWIQQVVT

SEQ ID NO: 29300 - DNA, 445 bp, Homo sapiens
ctgacgctggacaacaggctcgactcccagggcgtcctcagcaccccgtacttccccagctactactcgccccaaacccactgctcctggcacctcacggtgccctctctggactacggcttggccctctggtttgatgcctatgcactgaggaggcagaagtatgatttgccgtgcacccagggccagtggacgatccagaacaggagagtttgaatatctaagatgccagtcttggaagatgccaaaattggaaggctctggggctctagaattcttggatttctggggtgtgtgttcccaatcaccaacacttgtaatttgcttgttggctgatcctattcaaaaggatcatccagacaaaaggtgacgaagaatgacaaggtttgcttgactcctttttgcaatttatctgggactaggattaaaagaaaggagaagaaat

SEQ ID NO: 29301 - protein, 68 aa, Homo sapiens
MICRAPRASGRSRTGEFEYLRCQSWKMPKLEGSGALEFLDFWGVCSQSPTLVICLLADPIQKDHPDKR

SEQ ID NO: 29302 - DNA, 1694 bp, Homo sapiens
gttcttgagccagacccagtccagctctggtgcctgccctctggtgcgagctgacctgagatgcacttccctcctctgtgagctgtctcggcacccacttgcagtcactgccgcctgatgttgttactcttccactccaaaaggatgcccgtggccgaggccccccaggtggctggcgggcagggggacggaggtgatggcgaggaagcggagccggaggggatgttcaaggcctgtgaggactccaagagaaaagcccggggctacctccgcctggtgcccctgtttgtgctgctggccctgctcgtgctggcttcggcgggggtgctactctggtatttcctagggtacaaggcggaggtgatggtcagccaggtgtactcaggcagtctgcgtgtactcaatcgccacttctcccaggatcttacccgccgggaatctagtgccttccgcagtgaaaccgccaaagcccagaagatgctcaaggagctcatcaccagcacccgcctgggaacttactacaactccagctccgtctattcctttggggagggacccctcacctgcttcttctggttcattctccaaatccccgagcaccgccggctgatgctgagccccgaggtggtgcaggcactgctggtggaggagctgctgtccacagtcaacagctcggctgccgtcccctacagggccgagtacgaagtggaccccgagggcctagtgatcctggaagccagtgtgaaagacatagctgcattgaattccacgctgggttgttaccgctacagctacgtgggccagggccaggtcctccggctgaaggggcctgaccacctggcctccagctgcctgtggcacctgcagggccccaaggacctcatgctcaaactccggctggagtggacgctggcagagtgccgggaccgactggccatgtatgacgtggccgggcccctggagaagaggctcatcacctcggtgtacggctgcagccgccaggagcccgtggtggaggttctggcgtcgggggccatcatggcggtcgtctggaagaagggcctgcacagctactacgaccccttcgtgctctccgtgcagccggtggtcttccaggcctgtgaagtgaacctgacgctggacaacaggctcgactcccagggcgtcctcagcaccccgtacttccccagctactactcgccccaaacccactgctcctggcacctcacggtgccctctctggactacggcttggccctctggtttgatgcctatgcactgaggaggcagaagtatgatttgccgtgcacccagggccagtggacgatccagaacaggaggtaccacttcctctcctccctctggcttcctttcctccctccccctccctctcttccctcctcaatagtgaccccctcattggaagcccaagtccccaatctcagaggggcagcaaggggagcgagcagaggctggggctggtgtcaggcctgttgcccttgaccttgtcctcgtcccagcctccgccctggccccggcttcccctctggctaccccagaggtctcagacacgtttggtcatcagacaccttggatgtttattctaattacagcaaaattgtctcatcttcttgggtgctgtaaccccctctggcaccctcaatccttcaataaaatgtttccagagccaaagg

SEQ ID NO: 29303 - protein, 461 aa, Homo sapiens
MLLLFHSKRMPVAEAPQVAGGQGDGGDGEEAEPEGMFKACEDSKRKARGYLRLVPLFVLLALLVLASAGVLLWYFLGYKAEVMVSQVYSGSLRVLNRHFSQDLTRRESSAFRSETAKAQKMLKELITSTRLGTYYNSSSVYSFGEGPLTCFFWFILQIPEHRRLMLSPEVVQALLVEELLSTVNSSAAVPYRAEYEVDPEGLVILEASVKDIAALNSTLGCYRYSYVGQGQVLRLKGPDHLASSCLWHLQGPKDLMLKLRLEWTLAECRDRLAMYDVAGPLEKRLITSVYGCSRQEPVVEVLASGAIMAVVWKKGLHSYYDPFVLSVQPVVFQACEVNLTLDNRLDSQGVLSTPYFPSYYSPQTHCSWHLTVPSLDYGLALWFDAYALRRQKYDLPCTQGQWTIQNRRYHFLSSLWLPFLPPPPSLPSSIVTPSLEAQVPNLRGAARGASRGWGWCQACCP

SEQ ID NO: 29304 - DNA, 4044 bp, Homo sapiens
gcagccagagctcagcagggccctggagagatggccacggtcccagcaccggggaggactggagagcgcgcgctgccaccgccccatgtctcagccagggcttccttcctcggctccaccctgtggatgtaatggcggcccctgctctgtcctggcgtctgcccctcctcatcctcctcctgcccctggctacctcttgggcatctgcagcggtgaatggcacttcccagttcacatgcttctacaactcgagagccaacatctcctgtgtctggagccaagatggggctctgcaggacacttcctgccaagtccatgcctggccggacagacggcggtggaaccaaacctgtgagctgctccccgtgagtcaagcatcctgggcctgcaacctgatcctcggagccccagattctcagaaactgaccacagttgacatcgtcaccctgagggtgctgtgccgtgagggggtgcgatggagggtgatggccatccaggacttcaagccctttgagaaccttcgcctgatggcccccatctccctccaagttgtccacgtggagacccacagatgcaacataagctgggaaatctcccaagcctcccactactttgaaagacacctggagttcgaggcccggacgctgtccccaggccacacctgggaggaggcccccctgctgactctcaagcagaagcaggaatggatctgcctggagacgctcaccccagacacccagtatgagtttcaggtgcgggtcaagcctctgcaaggcgagttcacgacctggagcccctggagccagcccctggccttcaggacaaagcctgcagcccttgggaaggacaccattccgtggctcggccacctcctcgtgggcctcagcggggcttttggcttcatcatcttagtgtacttgctgatcaactgcaggaacaccgggccatggctgaagaaggtcctgaagtgtaacaccccagacccctcgaagttcttttcccagctgagctcagagcatggaggagacgtccagaagtggctctcttcgcccttcccctcatcgtccttcagccctggcggcctggcacctgagatctcgccactagaagtgctggagagggacaaggtgacgcagctgctcctgcagcaggacaaggtgcctgagcccgcatccttaagcagcaaccactcgctgaccagctgcttcaccaaccagggttacttcttcttccacctcccggatgccttggagatagaggcctgccaggtgtactttacttacgacccctactcagaggaagaccctgatgagggtgtggccggggcacccacagggtcttccccccaacccctgcagcctctgtcaggggaggacgacgcctactgcaccttcccctccagggatgacctgctgctcttctcccccagtctcctcggtggccccagccccccaagcactgcccctgggggcagtggggccggtgaagagaggatgcccccttctttgcaagaaagagtccccagagactgggacccccagcccctggggcctcccaccccaggagtcccagacctggtggattttcagccaccccctgagctggtgctgcgagaggctggggaggaggtccctgacgctggccccagggagggagtcagtttcccctggtccaggcctcctgggcagggggagttcagggcccttaatgctcgcctgcccctgaacactgatgcctacttgtccctccaagaactccagggtcaggacccaactcacttggtgtagacagatggccagggtgggaggcaggcagctgcctgctctgcgccgagcctcagaaggaccctgttgagggtcctcagtccactgctgaggacactcagtgtccagttgcagctggacttctccacccggatggcccccacccagtcctgcacacttggtccatccatttccaaacctccactgctgctcccgggtcctgctgcccgagccaggaactgtgtgtgttgcaggggggcagtaactccccaactccctcgttaatcacaggatcccacgaatttaggctcagaagcatcgctcctctccagccctgcagctattcaccaatatcagtcctcgcggctctccagggctccctgccctgacctcttccctgggttttctgccccagcctcctccttccctcccctccccgtccacagggcagcctgagcgtgctttccaaaacccaaatatggccacgctccccctcggttcaaaaccttgcacaggtcccactgccctcagccccacttctcagcctggtacttgtacctccggtgtcgtgtggggacatccccttctgcaatcctccctaccgtcctcctgagccactcagagctccctcacaccccctctgttgcacatgctattccctggggctgctgtgcgctccccctcatctaggtgacaaacttccctgactcttcaagtgccggttttgcttctcctggagggaagcactgcctcccttaatctgccagaaacttctagcgtcagtgctggagggagaagctgtcagggacccagggcgcctggagaaagaggccctgttactattcctttgggatctctgaggcctcagagtgcttggctgctgtatctttaatgctggggcccaagtaagggcacagatccccccacaaagtggatgcctgctgcatcttcccacagtggcttcacagacccacaagagaagctgatggggagtaaaccctggagtccgaggcccaggcagcagccccgcctagtggtgggccctgatgctgccaggcctgggacctcccactgccccctccactggaggggtctcctctgcagctcagggactggcacactggcctccagaagggcagctccacagggcagggcctcattatttttcactgccccagacacagtgcccaacaccccgtcgtataccctggatgaacgaattaattacctggcaccacctcgtctgggctccctgcgcctgacattcacacagagaggcagagtcccgtgcccattaggtctggcatgccccctcctgcaaggggctcaaccccctaccccgacccctccacgtatctttcctaggcagatcacgttgcaatggctcaaacaacattccaccccagcaggacagtgaccccagtcccagctaactctgacctgggagccctcaggcacctgcacttacaggccttgctcacagctgattgggcacctgaccacacgcccccacaggctctgaccagcagcctatgagggggtttggcaccaagctctgtccaatcaggtaggctgggcctgaactagccaatcagatcaactctgtcttgggcgtttgaactcagggagggaggcccttgggagcaggtgcttgtggacaaggctccacaagcgttgagccttggaaaggtagacaagcgttgagccactaagcagaggaccttgggttcccaatacaaaaatacctactgctgagagggctgctgaccatttggtcaggattcctgttgcctttatatccaaaataaactcccctttcttgaggttgtctgagtcttgggtctatgccttgaaaaaagctgaattattggacagtctcacctcctgccatagggtcctgaatgtttcagaccacaaggggctccacacctttgctgtgtgttctggggcaacctactaatcctctctgcaagtcggtctccttatccccccaaatggaaattgtatttgccttctccactttgggaggctcccacttcttgggagggttacattttttaagtcttaatcatttgtgacatatgtatctatacatccgtatcttttaatgatccgtgtgtaccatctttgtgattatttccttaatattttttctttaagtcagttcattttcgttgaaatacatttatttaaagaaaaatctttgttactctgtaaatgaaaaaacccattttcgctataaataaaaggtaactgtacaaaataagtacaatgcaacaaa

SEQ ID NO: 29305 - protein, 551 aa, Homo sapiens; identical to SEQ ID NO: 4027

SEQ ID NO: 29306 - DNA, 2538 bp, Homo sapiens
gtctgggccagcaacaagttagtattgcagacatgggccaaggagccagaggccatgcagtggctcagggtccgtgagtcgcctggggaggccacaggacacagggtcaccatggggacagccgccctgggtcccgtctgggcagcgctcctgctctttctcctgatgtgtgagatccctatggtggagctcacctttgacagagctgtggccagcggctgccaacggtgctgtgactctgaggaccccctggatcctgcccatgtatcctcagcctcttcctccggccgcccccacgccctgcctgagatcagaccctacattaatatcaccatcctgaaggcccagcgagcgcagcatcatgcagagccagagtgtgatgctggacctggcctacggggaccgcgtctgggtgcggctcttcaagcgccagcgcgagaacgccatctacagcaacgacttcgacacctacatcaccttcagcggccacctcatcaaggccgaggacgactgagggcctctgggccaccctcccggctggagagctcaggtgctggtcccgtcccctgcagggctcagtttgcactgctgtgaagcaggaaggccagggaggtccccggggacctggcattctggggagaccctgcttctatcttggctgccatcatccctcccagcctatttctgctcctctcttctctcttggacctattttaagaagcttgctaacctaaatattctagaactttcccagcctcgtagcccagcacttctcaaacttggaaatgcatgcgaatcacccggggttcgtgttaaatgcagattctgactcagcaggtctgagtgggtccaggattctgtgtttctcatatgttcctgggtgatgctgatggggtcagtctatgaaccacactggagcaaccaggttctaggactttctcaatattctagtactttctgaacattctggaatcctccccacattctagaattctcccaacatttttttttcttgagacagagtcttgctctgttgcccaggctagagtgcagtggtgcaatctcagttcactgcaacctctgcctcccgggttcaagcgattcttctgcctcagcctccctagtggctgggattacaggcgcctgctaccatgcctggctaatttttgtatttttagtagagatggggtttcaccatattggccaggctggtcttgaactcctgacttcaggtgacccacccgcctcggcctctcaaaatgctgggattacaggtgtgagccaccgtgcctggccaattccaacattcttaaattctctcatccctccagggctccccgtgctatgttctctttaccccttccccctcttctcttgctcaggcctgcaccactgcagccaccgttcatttattcattcattaaacactgagcactcactctgtgctgggtcccgggaagggtgagggggtcagacacaggccctgcccctgccctcagtgactggccagtccagcccaggcggggagagatgtgtacataggttttaaagcagacccagagctcatgggggcctgtgttctgggtgttcaggtgctgctggtcctccattacccactgctccccaaggctggtgggacggggtcccggtggcaggggcaggtatctccttcccgttcctcatccacctgcccagtgctcatcgttacagcaaaccccagggggccttggccaggtcaagggttctgtgaggagaggacccaggagtgtgggggcatttggggggtgaagtggcccccgaagaatggaacccacacccatagctctccccacagctgatacggcatcctgcgagaagacctgccctcctcactgggatccccttcctgcctcctcccagggctctgccagggccttgctcagtcccttccaccaaagtcatctgaacttccgtttccccagggcctccagctgccctcagacactgatgtctgtccccaggtgctctctgcccctcatgcccctctcaccggcccagtgccccgactctccaggctttatcaaggtgctaaggcccgggtgggcagctcctcgtctcagagccctcctccggcctggtgctgcctttacaaacacctgcaggagaagggccacggaagccccaggctttagagccctcagcaggtctggggagctagagcaaaggagggacctcaggccttccgtttcttcttccagggtggggtggcctggtgttcccctagccttccaaacccaggtggcctgcccttctccccagagggaggcggcctccgcccattggtgctcatgcagactctggggctgaggtgccccggggggtgatctctggtgctcacagccgaggagccgtggctccatggccagatgacggaaacagggtctgaccaagtgccaggaagacctgtgctataaaccaccctgcctgatcctgcccctgcctgaccccgccacgccctgccgtccagcatgattaaagaatgctgtctcctcttggcga

SEQ ID NO: 29307 - protein, 179 aa, Homo sapiens
MQWLRVRESPGEATGHRVTMGTAALGPVWAALLLFLLMCEIPMVELTFDRAVASGCQRCCDSEDPLDPAHVSSASSSGRPHALPEIRPYINITILKAQRAQHHAEPECDAGPGLRGPRLGAALQAPARERHLQQRLRHLHHLQRPPHQGRGRLRASGPPSRLESSGAGPVPCRAQFALL

SEQ ID NO: 29308 - DNA, 3016 bp, Homo sapiens
gtctgggccagcaacaagttagtattgcagacatgggccaaggagccagaggccatgcagtggctcagggtccgtgagtcgcctggggaggccacaggacacagggtcaccatggggacagccgccctgggtcccgtctgggcagcgctcctgctctttctcctgatgtgtgagatccctatggtggagctcacctttgacagagctgtggccagcggctgccaacggtgctgtgactctgaggaccccctggatcctgcccatgtatcctcagcctcttcctccggccgcccccacgccctgcctgagatcagaccctacattaatatcaccatcctgaagggacgtggaaggactcgcttcccttccaggctgtggtggctgacggctgtgaccaggccttgacatccttagcgtccgtctctgcccacaacagcccgtgaggtgacaaaggggacccaggcccaatgggcctgccagggtacatgggcagggagggtccccaaggggagcctggccctcagggcagcaagggtgacaagggggagatgggcagccccggcgccccgtgccagaagcgcttcttcgccttctcagtgggccgcaagacggccctgcacagcggcgaggacttccagacgctgctcttcgaaagggtctttgtgaaccttgatgggtgctttgacatggcgaccggccagtttgctgctcccctgcgtggcatctacttcttcagcctcaatgtgcacagctggaattacaaggagacgtacgtgcacattatgcataaccagaaagaggctgtcatcctgtacgcgcagcccagcgagcgcagcatcatgcagagccagagtgtgatgctggacctggcctacggggaccgcgtctgggtgcggctcttcaagcgccagcgcgagaacgccatctacagcaacgacttcgacacctacatcaccttcagcggccacctcatcaaggccgaggacgactgagggcctctgggccaccctcccggctggagagctcaggtgctggtcccgtcccctgcagggctcagtttgcactgctgtgaagcaggaaggccagggaggtccccggggacctggcattctggggagaccctgcttctatcttggctgccatcatccctcccagcctatttctgctcctctcttctctcttggacctattttaagaagcttgctaacctaaatattctagaactttcccagcctcgtagcccagcacttctcaaacttggaaatgcatgcgaatcacccggggttcgtgttaaatgcagattctgactcagcaggtctgagtgggtccaggattctgtgtttctcatatgttcctgggtgatgctgatggggtcagtctatgaaccacactggagcaaccaggttctaggactttctcaatattctagtactttctgaacattctggaatcctccccacattctagaattctcccaacatttttttttcttgagacagagtcttgctctgttgcccaggctagagtgcagtggtgcaatctcagttcactgcaacctctgcctcccgggttcaagcgattcttctgcctcagcctccctagtggctgggattacaggcgcctgctaccatgcctggctaatttttgtatttttagtagagatggggtttcaccatattggccaggctggtcttgaactcctgacttcaggtgacccacccgcctcggcctctcaaaatgctgggattacaggtgtgagccaccgtgcctggccaattccaacattcttaaattctctcatccctccagggctccccgtgctatgttctctttaccccttccccctcttctcttgctcaggcctgcaccactgcagccaccgttcatttattcattcattaaacactgagcactcactctgtgctgggtcccgggaagggtgagggggtcagacacaggccctgcccctgccctcagtgactggccagtccagcccaggcggggagagatgtgtacataggttttaaagcagacccagagctcatgggggcctgtgttctgggtgttcaggtgctgctggtcctccattacccactgctccccaaggctggtgggacggggtcccggtggcaggggcaggtatctccttcccgttcctcatccacctgcccagtgctcatcgttacagcaaaccccagggggccttggccaggtcaagggttctgtgaggagaggacccaggagtgtgggggcatttggggggtgaagtggcccccgaagaatggaacccacacccatagctctccccacagctgatacggcatcctgcgagaagacctgccctcctcactgggatccccttcctgcctcctcccagggctctgccagggccttgctcagtcccttccaccaaagtcatctgaacttccgtttccccagggcctccagctgccctcagacactgatgtctgtccccaggtgctctctgcccctcatgcccctctcaccggcccagtgccccgactctccaggctttatcaaggtgctaaggcccgggtgggcagctcctcgtctcagagccctcctccggcctggtgctgcctttacaaacacctgcaggagaagggccacggaagccccaggctttagagccctcagcaggtctggggagctagagcaaaggagggacctcaggccttccgtttcttcttccagggtggggtggcctggtgttcccctagccttccaaacccaggtggcctgcccttctccccagagggaggcggcctccgcccattggtgctcatgcagactctggggctgaggtgccccggggggtgatctctggtgctcacagccgaggagccgtggctccatggccagatgacggaaacagggtctgaccaagtgccaggaagacctgtgctataaaccaccctgcctgatcctgcccctgcctgaccccgccacgccctgccgtccagcatgattaaagaatgctgtctcctcttggcga

SEQ ID NO: 29309 - protein, 116 aa, Homo sapiens
MQWLRVRESPGEATGHRVTMGTAALGPVWAALLLFLLMCEIPMVELTFDRAVASGCQRCCDSEDPLDPAHVSSASSSGRPHALPEIRPYINITILKGRGRTRFPSRLWWLTAVTRP

SEQ ID NO: 29310 - DNA, 2938 bp, Homo sapiens
tccctcctctgctgggcctgggggtctgggccagcaacaagttagtattgcagacatgggccaaggagccagaggccatgcagtggctcagggtccgtgagtcgcctggggaggccacaggacacagggtcaccatggggacagccgccctgggtcccgtctgggcagcgctcctgctctttctcctgatgtgtgagatccctatggtggagctcacctttgacagagctgtggccagcggctgccaacggtgctgtgactctgaggaccccctggatcctgcccatgtatcctcagcctcttcctccggccgcccccacgccctgcctgagatcagaccctacattaatatcaccatcctgaagggtgacaaaggggacccaggcccaatgggcctgccagggtacatgggcagggagggtccccaaggggagcctggccctcagggcagcaagggtgacaagggggagatgggcagccccggcgccccgtgccagaagcgcttcttcgccttctcagtgggccgcaagacggccctgcacagcggcgaggacttccagacgctgctcttcgaaagggtctttgtgaaccttgatgggtgctttgacatggcgaccggccagtttgctgctcccctgcgtggcatctacttcttcagcctcaatgtgcacagctggaattacaaggagacgtacgtgcacattatgcataaccagaaagaggctgtcatcctgtacgcgcagcccagcgagcgcagcatcatgcagagccagagtgtgatgctggacctggcctacggggaccgcgtctgggtgcggctcttcaagcgccagcgcgagaacgccatctacagcaacgacttcgacacctacatcaccttcagcggccacctcatcaaggccgaggacgactgagggcctctgggccaccctcccggctggagagctcaggtgctggtcccgtcccctgcagggctcagtttgcactgctgtgaagcaggaaggccagggaggtccccggggacctggcattctggggagaccctgcttctatcttggctgccatcatccctcccagcctatttctgctcctctcttctctcttggacctattttaagaagcttgctaacctaaatattctagaactttcccagcctcgtagcccagcacttctcaaacttggaaatgcatgcgaatcacccggggttcgtgttaaatgcagattctgactcagcaggtctgagtgggtccaggattctgtgtttctcatatgttcctgggtgatgctgatggggtcagtctatgaaccacactggagcaaccaggttctaggactttctcaatattctagtactttctgaacattctggaatcctccccacattctagaattctcccaacatttttttttcttgagacagagtcttgctctgttgcccaggctagagtgcagtggtgcaatctcagttcactgcaacctctgcctcccgggttcaagcgattcttctgcctcagcctccctagtggctgggattacaggcgcctgctaccatgcctggctaatttttgtatttttagtagagatggggtttcaccatattggccaggctggtcttgaactcctgacttcaggtgacccacccgcctcggcctctcaaaatgctgggattacaggtgtgagccaccgtgcctggccaattccaacattcttaaattctctcatccctccagggctccccgtgctatgttctctttaccccttccccctcttctcttgctcaggcctgcaccactgcagccaccgttcatttattcattcattaaacactgagcactcactctgtgctgggtcccgggaagggtgagggggtcagacacaggccctgcccctgccctcagtgactggccagtccagcccaggcggggagagatgtgtacataggttttaaagcagacccagagctcatgggggcctgtgttctgggtgttcaggtgctgctggtcctccattacccactgctccccaaggctggtgggacggggtcccggtggcaggggcaggtatctccttcccgttcctcatccacctgcccagtgctcatcgttacagcaaaccccagggggccttggccaggtcaagggttctgtgaggagaggacccaggagtgtgggggcatttggggggtgaagtggcccccgaagaatggaacccacacccatagctctccccacagctgatacggcatcctgcgagaagacctgccctcctcactgggatccccttcctgcctcctcccagggctctgccagggccttgctcagtcccttccaccaaagtcatctgaacttccgtttccccagggcctccagctgccctcagacactgatgtctgtccccaggtgctctctgcccctcatgcccctctcaccggcccagtgccccgactctccaggctttatcaaggtgctaaggcccgggtgggcagctcctcgtctcagagccctcctccggcctggtgctgcctttacaaacacctgcaggagaagggccacggaagccccaggctttagagccctcagcaggtctggggagctagagcaaaggagggacctcaggccttccgtttcttcttccagggtggggtggcctggtgttcccctagccttccaaacccaggtggcctgcccttctccccagagggaggcggcctccgcccattggtgctcatgcagactctggggctgaggtgccccggggggtgatctctggtgctcacagccgaggagccgtggctccatggccagatgacggaaacagggtctgaccaagtgccaggaagacctgtgctataaaccaccctgcctgatcctgcccctgcctgaccccgccacgccctgccgtccagcatgattaaagaatgctgtctcctcttggcga

SEQ ID NO: 29311 - protein, 278 aa, Homo sapiens; identical to SEQ ID NO: 4029

SEQ ID NO: 29312 - DNA, 1656 bp, Homo sapiens
tctccctcctctgctgggcctgggggtctgggccagcaacaagttagtattgcagacatgggccaaggagccagaggccatgcagtggctcagggtccgtgagtcgcctggggaggccacaggacacagggtcaccatggggacagccgccctgggtcccgtctgggcagcgctcctgctctttctcctgatgtgtgagatccctatggtggagctcacctttgacagagctgtggccagcggctgccaacggtgctgtgactctgaggaccccctggatcctgcccatgtatcctcagcctcttcctccggccgcccccacgccctgcctgagatcagaccctacattaatatcaccatcctgaagggtgacaaaggggacccaggcccaatgggcctgccagggtacatgggcagggagggtccccaaggggagcctggccctcagggcagcaagggtgacaagggggagatgggcagccccggcgccccgtgccagaagcgcttcttcgccttctcagtgggccgcaagacggccctgcacagcggcgaggacttccagacgctgctcttcgaaagggtctttgtgaaccttgatgggtgctttgacatggcgaccggccagtttgctgctcccctgcgtggcatctacttcttcagcctcaatgtgcacagctggaattacaaggagacgtacgtgcacattatgcataaccagaaagaggctgtcatcctgtacgcgcagcccagcgagcgcagcatcatgcagagccagagtgtgatgctggacctggcctacggggaccgcgtctgggtgcggctcttcaagcgccagcgcgagaacgccatctacagcaacgacttcgacacctacatcaccttcagcggccacctcatcaaggccgaggacgactgagggcctctgggccaccctcccggctggagagctcagctgatacggcatcctgcgagaagacctgccctcctcactgggatccccttcctgcctcctcccagggctctgccagggccttgctcagtcccttccaccaaagtcatctgaacttccgtttccccagggcctccagctgccctcagacactgatgtctgtccccaggtgctctctgcccctcatgcccctctcaccggcccagtgccccgactctccaggctttatcaaggtgctaaggcccgggtgggcagctcctcgtctcagagccctcctccggcctggtgctgcctttacaaacacctgcaggagaagggccacggaagccccaggctttagagccctcagcaggtctggggagctagagcaaaggagggacctcaggccttccgtttcttcttccagggtggggtggcctggtgttcccctagccttccaaacccaggtggcctgcccttctccccagagggaggcggcctccgcccattggtgctcatgcagactctggggctgaggtgccccggggggtgatctctggtgctcacagccgaggagccgtggctccatggccagatgacggaaacagggtctgaccaagtgccaggaagacctgtgctataaaccaccctgcctgatcctgcccctgcctgaccccgccacgccctgccgtccagcatgattaaagaatgctgtctcctcttggcga

SEQ ID NO: 29313 - protein, 278 aa, Homo sapiens; identical to SEQ ID NO: 4029

SEQ ID NO: 29314 - DNA, 3075 bp, Homo sapiens
caggaaccctctctttgggtctggattgggacccctttccagtaccattttttctagtgaaccacgaagggacgataccagaaaacaccctcaacccaaaggaaatagactacagccccaattggctgactttggctatagaaaaaagaaaggaacgaaaagagacagttttttttggaaagctaagtcttccctttatcgagtcaagaaacccccccttcttgagctatttacagcttttaacaattgagtaaagtacgctccggtcaccatggggacagccgccctgggtcccgtctgggcagcgctcctgctctttctcctgatgtgtgagatccctatggtggagctcacctttgacagagctgtggccagcggctgccaacggtgctgtgactctgaggaccccctggatcctgcccatgtatcctcagcctcttcctccggccgcccccacgccctgcctgagatcagaccctacattaatatcaccatcctgaagggtgacaaaggggacccaggcccaatgggcctgccagggtacatgggcagggagggtccccaaggggagcctggccctcagggcagcaagggtgacaagggggagatgggcagccccggcgccccgtgccagaagcgcttcttcgccttctcagtgggccgcaagacggccctgcacagcggcgaggacttccagacgctgctcttcgaaagggtctttgtgaaccttgatgggtgctttgacatggcgaccggccagtttgctgctcccctgcgtggcatctacttcttcagcctcaatgtgcacagctggaattacaaggagacgtacgtgcacattatgcataaccagaaagaggctgtcatcctgtacgcgcagcccagcgagcgcagcatcatgcagagccagagtgtgatgctggacctggcctacggggaccgcgtctgggtgcggctcttcaagcgccagcgcgagaacgccatctacagcaacgacttcgacacctacatcaccttcagcggccacctcatcaaggccgaggacgactgagggcctctgggccaccctcccggctggagagctcaggtgctggtcccgtcccctgcagggctcagtttgcactgctgtgaagcaggaaggccagggaggtccccggggacctggcattctggggagaccctgcttctatcttggctgccatcatccctcccagcctatttctgctcctctcttctctcttggacctattttaagaagcttgctaacctaaatattctagaactttcccagcctcgtagcccagcacttctcaaacttggaaatgcatgcgaatcacccggggttcgtgttaaatgcagattctgactcagcaggtctgagtgggtccaggattctgtgtttctcatatgttcctgggtgatgctgatggggtcagtctatgaaccacactggagcaaccaggttctaggactttctcaatattctagtactttctgaacattctggaatcctccccacattctagaattctcccaacatttttttttcttgagacagagtcttgctctgttgcccaggctagagtgcagtggtgcaatctcagttcactgcaacctctgcctcccgggttcaagcgattcttctgcctcagcctccctagtggctgggattacaggcgcctgctaccatgcctggctaatttttgtatttttagtagagatggggtttcaccatattggccaggctggtcttgaactcctgacttcaggtgacccacccgcctcggcctctcaaaatgctgggattacaggtgtgagccaccgtgcctggccaattccaacattcttaaattctctcatccctccagggctccccgtgctatgttctctttaccccttccccctcttctcttgctcaggcctgcaccactgcagccaccgttcatttattcattcattaaacactgagcactcactctgtgctgggtcccgggaagggtgagggggtcagacacaggccctgcccctgccctcagtgactggccagtccagcccaggcggggagagatgtgtacataggttttaaagcagacccagagctcatgggggcctgtgttctgggtgttcaggtgctgctggtcctccattacccactgctccccaaggctggtgggacggggtcccggtggcaggggcaggtatctccttcccgttcctcatccacctgcccagtgctcatcgttacagcaaaccccagggggccttggccaggtcaagggttctgtgaggagaggacccaggagtgtgggggcatttggggggtgaagtggcccccgaagaatggaacccacacccatagctctccccacagctgatacggcatcctgcgagaagacctgccctcctcactgggatccccttcctgcctcctcccagggctctgccagggccttgctcagtcccttccaccaaagtcatctgaacttccgtttccccagggcctccagctgccctcagacactgatgtctgtccccaggtgctctctgcccctcatgcccctctcaccggcccagtgccccgactctccaggctttatcaaggtgctaaggcccgggtgggcagctcctcgtctcagagccctcctccggcctggtgctgcctttacaaacacctgcaggagaagggccacggaagccccaggctttagagccctcagcaggtctggggagctagagcaaaggagggacctcaggccttccgtttcttcttccagggtggggtggcctggtgttcccctagccttccaaacccaggtggcctgcccttctccccagagggaggcggcctccgcccattggtgctcatgcagactctggggctgaggtgccccggggggtgatctctggtgctcacagccgaggagccgtggctccatggccagatgacggaaacagggtctgaccaagtgccaggaagacctgtgctataaaccaccctgcctgatcctgcccctgcctgaccccgccacgccctgccgtccagcatgattaaagaatgctgtctcctcttggcga

SEQ ID NO: 29315 - protein, 259 aa, Homo sapiens
MGTAALGPVWAALLLFLLMCEIPMVELTFDRAVASGCQRCCDSEDPLDPAHVSSASSSGRPHALPEIRPYINITILKGDKGDPGPMGLPGYMGREGPQGEPGPQGSKGDKGEMGSPGAPCQKRFFAFSVGRKTALHSGEDFQTLLFERVFVNLDGCFDMATGQFAAPLRGIYFFSLNVHSWNYKETYVHIMHNQKEAVILYAQPSERSIMQSQSVMLDLAYGDRVWVRLFKRQRENAIYSNDFDTYITFSGHLIKAEDD

SEQ ID NO: 29316 - DNA, 5006 bp, Homo sapiens
agagcattgttggaaggattagaggagtcaagatatggaaggcccacagaatggttggggagaaaagccagcttctggaggcaggggaaagggtggggagtggctggggaagcagggcctgtaccctgggtttctgcattggggttactcctttgctgctgggagtgatagcagggtgatgagagccaccctgggcctgcgctcctcctggtcatgctgttgtcctgggtcccagggtgcctgggaaagggcacacagctttactgatgggtggccagtggggagtgcccccatcgggcattccaccagtcggccccgatggtcctggcctcctcatgtttatctggcccagggacaccaaggctcagagaggtaaacttgcccgaggtcacacagctaggagggggagctgagtcatcacccaggtttgtctgccccagggctggagctctgttttcaggccacctgaccagctgaggagatcgtcagaaaggctgggacaccaacggatgacgcacaaatggaggaattttcaggcacggtcaaagctaatgggagggaaaatactgaagtgtaatattccagagttctctcttgtctgctctgactcctgccagctgccctgcacctagagggacaggaggctcttctccggggcattgcatggccgggagccaaatgagctggcaccagaacctggtgagttgcctggcttttcagacctcagcctcctcacctgtgaagtgggttgaacagctcttctctgcagaggagctgttgagggcggtatggaacactgccaggcacacagttggcccttgacaaaaccattgctgtgtccccagcctgtttctccccaagtcccattgatggttctctctatccctgtttcctcagaaggtcaggttttctaagcccgaaggcttggagccaggcaggagctgtctccctctccagtgctgccgactcaacccttttcccttagaagcagggagggaggctccccttggctccctccctctgcagccctggctctgcgccctgggaatgctgcctggggcagggccacgtagagagcagggccagtgcaggcctttgggtgttcccagtggccaaagtcctttagtctgctttcctttgggcccccttgcacccctgaatggatgacctgggggattccaagtcggtttgggaggggtgacagcacaaggctggaggttgggagagtctggctgtcatcccagcttggattgtagtctgccatgtgacctttgggccaaagataaatcctccctgggccacagtgtccctgctggtcagatgaaagaatcagatgagatcatttctgaggatctttccaggcttcatattcttctgtttgattatccccccaaataaattggaaattggaggcccaaggatgagccctggttgaggacgcagagcccaggggccgtcccatcctccacacttggcccagctgtgagtgggggaatgggatttagcacctgaagccccagatttaaatatatccccactccccgccggggtccccgcactcctgcacctccctcctcccaggacggccctgacctgcaggcattgttccccgcccatgcccaagccccgagggaattccatcgggttggagagtcttcccttctgtagggggctttgctcctctctaccagttatgtgaccttgggcaagtcacttcagctgcctgaccccagctccctaggactagttgaagtaatggatataaacaccctttggggaccaaaagcccctagagagatgagacctggcccaggcagtaagtcttcaacaaatgtagaataggaggatgctgtaaacaagccagccaaaacccaccaaatcccttggtggaggataagggacatttgagacagtctttatacaggagtctcgggccccaggaagccagggcagagagtctttgccaaacttccccctgcctaacaagaaggaaactgaggcaggaccctgccagacccagaggcaaacaggctgccctcctgtgaacttgttgggggtcatttccacaagggaatagttctagaagaccagggtgagtcagtaacaatggcagaattccagtcagaggaagaagactttggtgtagctggggctggagcatagaggagcgacttggctgccgccctggccctgtgtcagaggtgttagaaccagagccactccatcttgagtaggagctgggtaaaatagggctgagacctgctgggctgcattcccaggaggttaggcatttttagtcacaggatgagatgggagtcggcaggactggtatcataagatacaggtcataaataccctgctgataaacaggatgcgctaaacaagccggccaaaacacaccaaatccaagatggtgatgaaagtgatctctggtcatcctcactgctcattatacactaattataatgcattagcatgctaaaagacactcccaccagcaccatgacaatttacaaatgccatggcaatgtccagaaattaccttatacggtctaaaagcgggaggaactctcagttctggggaaatctcccctttcttggaaaactgattaataatccaccctttgtttagcatataatcaagaaataaccataaaaacagccaaccagcagcgctcaggggtggtctgtctatggagtagccattcttttgtttctttacttctctgtaaacttgctttgacttcactctgtggactcacctcaaattctttcttgtgcgagtccaggaaccctctctttgggtctggattgggacccctttccagtaccattttttctagtgaaccacgaagggacgataccagaaaacaccctcaacccaaaggaaatagactacagccccaattggctgactttggctatagaaaaaagaaaggaacgaaaagagacagttttttttggaaagctaagtcttccctttatcgagtcaagaaacccccccttcttgagctatttacagcttttaacaattgagtaaagtacgctccggcctttgaatcaagcaagaccccactggatcaccaaagagttaagcaaaggaaatccctgcctccctttatctccgcagaacccagaggctgaaagggagggagcagggaggaggggaagtgggaagcggctctgccctctccctccgccctccctccgccctctctccctccatcccctcctctctccctcctctgctgggcctgggggtctgggccagcaacaagttagtattgcagacatgggccaaggagccagaggccatgcagtggctcagggtccgtgagtcgcctggggaggccacaggacacaggaactatggtgttctcacaccaaagcatgggctcggccacccatcccctctcctgagaacaagcctccagaaccctccacgtttgtccccagtgttcactaacctcagtcctcctgcccggagggcatgtgtttgctggagatagtggagtcggtggcaagaaagtgccagagggaggtcaccatggggacagccgccctgggtcccgtctgggcagcgctcctgctctttctcctgatgtgtgagatccctatggtggagctcacctttgacagagctgtggccagcggctgccaacggtgctgtgactctgaggaccccctggatcctgcccatgtatcctcagcctcttcctccggccgcccccacgccctgcctgagatcagaccctacattaatatcaccatcctgaagggacaggggcagagccgtcacagatgagtgtgggcacctccttggagcaggctcagatgtccaccctgacttgtcccctttttatccccacagtgggccgcaagacggccctgcacagcggcgaggacttccagacgctgctcttcgaaagggtctttgtgaaccttgatgggtgctttgacatggcgaccggccagtttgctgctcccctgcgtggcatctacttcttcagcctcaatgtgcacagctggaattacaaggagacgtacgtgcacattatgcataaccagaaagaggctgtcatcctgtacgcgcagcccagcgagcgcagcatcatgcagagccagagtgtgatgctggacctggcctacggggaccgcgtctgggtgcggctcttcaagcgccagcgcgagaacgccatctacagcaacgacttcgacacctacatcaccttcagcggccacctcatcaaggccgaggacgactgagggcctctgggccaccctcccggctggagagctcagctgatacggcatcctgcgagaagacctgccctcctcactgggatccccttcctgcctcctcccagggctctgccagggccttgctcagtcccttccaccaaagtcatctgaacttccgtttccccagggcctccagctgccctcagacactgatgtctgtccccaggtgctctctgcccctcatgcccctctcaccggcccagtgccccgactctccaggctttatcaaggtgctaaggcccgggtgggcagctcctcgtctcagagccctcctccggcctggtgctgcctttacaaacacctgcaggagaagggccacggaagccccaggctttagagccctcagcaggtctggggagctagagcaaaggagggacctcaggccttccgtttcttcttccagggtggggtggcctggtgttcccctagccttccaaacccaggtggcctgcccttctccccagagggaggcggcctccgcccattggtgctcatgcagactctggggctgaggtgccccggggggtgatctctggtgctcacagccgaggagccgtggctccatggccagatgacggaaacagggtctgaccaagtgccaggaagacctgtgctataaaccaccctgcctgatcctgcccctgcctgaccccgccacgccctgccgtccagcatgattaaagaatgctgtctcctcttggcga

SEQ ID NO: 29317 - protein, 154 aa, Homo sapiens
MSVGTSLEQAQMSTLTCPLFIPTVGRKTALHSGEDFQTLLFERVFVNLDGCFDMATGQFAAPLRGIYFFSLNVHSWNYKETYVHIMHNQKEAVILYAQPSERSIMQSQSVMLDLAYGDRVWVRLFKRQRENAIYSNDFDTYITFSGHLIKAEDD

SEQ ID NO: 29318 - DNA, 666 bp, Homo sapiens
aaggggagcctggccctcagggcagcaagggtgacaagggggagatgggcagccccggcgccccgtgccagaagcgcttcttcgccttctcagtgggccgcaagacggccctgcacagcggcgaggacttccagacgctgctcttcgaaagggtctttgtgaaccttgatgggtgctttgacatggcgaccggccagtttgctgctcccctgcgtggcatctacttcttcagcctcaatgtgcacagctggaattacaaggagacgtacgtgcacattatgcataaccagaaagaggctgtcatcctgtacgcgcagcccagcgagcgcagcatcatgcagagccagagtgtgatgctggacctggcctacggggaccgcgtctgggtgcggctcttcaagcgccagcgcgagaacgccatctacagcaacgacttcgacacctacatcaccttcagcggccacctcatcaaggccgaggacgactgagggcctctgggccaccctcccggctggagagctcaggtgctggtcccgtcccctgcagggctcagtttgcactgctgtgaagcaggaagacctgtgctataaaccaccctgcctgatcctgcccctgcctgaccccgccacgccctgccgtccagcatgattaaagaatgctgtctcc

SEQ ID NO: 29319 - protein, 147 aa, Homo sapiens
MGSPGAPCQKRFFAFSVGRKTALHSGEDFQTLLFERVFVNLDGCFDMATGQFAAPLRGIYFFSLNVHSWNYKETYVHIMHNQKEAVILYAQPSERSIMQSQSVMLDLAYGDRVWVRLFKRQRENAIYSNDFDTYITFSGHLIKAEDD

SEQ ID NO: 29320 - DNA, 679 bp, Homo sapiens
gtgggccagagaggcaggtcctcgtccctcgggcccgtggcgctgtcgtggatgccacctgaccagctgaggagatcgtcagaaaggctgggacaccaacggatgacgcacaaatggaggaattttcaggcacggtcaaagctaatgggagggaaaatactgaagtgtaatattccagagttctctcttgtctgctctgactcctgccagctgccctgcacctagagggacaggaggctcttctccggggcattgcatggccgggagccaaatgagctggcaccagaacctggaaccctctctttgggtctggattgggacccctttccagtaccattttttctagtgaaccacgaagggacgataccagaaaacaccctcaacccaaaggaaatagactacagccccaattggctgactttggctatagaaaaaagaaaggaacgaaaagagacagttttttttggaaagctaagtcttccctttatcgagtcaagaaacccccccttcttgagctatttacagcttttaacaattgagtaaagtacgctccggacacaattggagaaactggttatttaacaagggtttgactcgagtggcatgctttcaaatataaacagacttctttaaggaattaaagttgactaatagagccaataaaagcctcttggaaaaa

SEQ ID NO: 29321 - protein, 57 aa, Homo sapiens
MPPDQLRRSSERLGHQRMTHKWRNFQARSKLMGGKILKCNIPEFSLVCSDSCQLPCT

SEQ ID NO: 29322 - DNA, 2305 bp, Homo sapiens
ctcagcccctccctgcttactccctccttcacgggctccatgtcaccatctgtggcacagtccctctctgtcactctccctgccaccccctcattctccttcctccctcctgcctctctctgcatctctccctctcacccgtgtctcctctcctctctttccttctcgtcttctccctgtcacgcatctctcatcactccccctcattctgcctttcctcctactcacggtctcctctccctctccctctctctctctccccctccctctttctctctctctctctttctccacctcctcccgaccccctttcccctctatttctattggcttctgtgtcccttgctcccctcttctcttcctcaccctgggaagcttctcccccctatccttgcccctgcccccccaggatgtgtcctggagatggggggtgacgtaccaggctctggttgggaagtcagggccggagaccagatgggagaggctctgtggacagccgtggccgagggcctgggagggaacctgagcccgcaagcggtctagaagtgggtgccttgtggggaccctagttaggagtgccctgggggcacctggggactgggcagggagaggggacagcagaatgataaccagcctggcggcaaggagggaagccctcaccccatgggcaggcaaatagctgactgctgaccaccctcccctcagccatggacatgcttcatccatcatcggtgtccacgacctcagaacctgagaatgcctcctcggcctggcccccagatgccaccctgggcaacgtgtcggcgggcccaagcccggcagggctggccgtcagtggcgttctgatccccctggtctacctggtggtgtgcgtggtgggcctgctgggtaactcgctggtcatctatgtggtcctgcggcacacggccagcccttcagtcaccaacgtctacatcctcaacctggcgctggccgacgagctcttcatgctggggctgcccttcctggccgcccagaacgccctgtcctactggcccttcggctccctcatgtgccgcctggtcatggcggtggatggcatcaaccagttcaccagcatattctgcctgactgtcatgagcgtggaccgctacctggccgtggtacatcccacccgctcggcccgctggcgcacagctccggtggcccgcacggtcagcgcggctgtgtgggtggcctcagccgtggtggtgctgcccgtggtggtcttctcgggagtgccccgcggcatgagcacctgccacatgcagtggcccgagccggcggcggcctggcgagccggcttcatcatctacacggccgcactgggcttcttcgggccgctgctggtcatctgcctctgctacctgctcatcgtggtgaaggtgcgctcagctgggcgccgggtgtgggcaccctcgtgccagcggcggcggcgctccgaacgcagggtcacgcgcatggtggtggccgtggtggcgctcttcgtgctctgctggatgcccttctacgtgctcaacatcgtcaacgtggtgtgcccactgcccgaggagcctgccttctttgggctctacttcctggtggtggcgctgccctatgccaacagctgtgccaaccccatcctttatggcttcctctcctaccgcttcaagcagggcttccgcagggtcctgctgcggccctcccgccgtgtgcgcagccaggagcccactgtggggcccccggagaagactgaggaggaggatgaggaggaggaggatggggaggagagcagggaggggggcaaggggaaggagatgaacggccgggtcagccagatcacgcagcctggcaccagcgggcaggagcggccgcccagcagagtggccagcaaggagcagcagctcctaccccaagaggcttccactggggagaagtccagcacgatgcgcatcagctacctgtagggcctggggaaagccaggatggcccgaggaagaggcagaagccgtgggtgtgcctagggcctacttcccaaggtgccacaggcccatgatgggatgttgaggggcctggactttgatgctattgctgccaggtcttgctgtgtgaccttgggtaggttgcttctactctctgggccttgttttctcctctgtgactcagggataggagtcatcagcctggatgagctatgtcagatgagaggtttggagggcactgttgctgggctgacctggctgagcaggcaaaaggtgggtgcagactggcctccccccagggatggagtgtcttggggcatcaacta

SEQ ID NO: 29323 - protein, 418 aa, Homo sapiens; identical to SEQ ID NO: 4033

SEQ ID NO: 29324 - DNA, 1621 bp, Homo sapiens
tgagtctgaggcttccatccggggacaatgtcccaccttggagctctccttgttgaacggcttggctgttcacatttatggctgttctgggtgatgtcctaggttctggggttaagaaataaatcattcagggcccctgccttcaagagccagtgttctagcgggtgggagatgggcaaatggagaatgattggggtgcctggcctccctgaactgttagggctgtgcggctcaggacagccactcaccctctctgtgctgtctcctcctgaacagtcctccaaggagtccgcccccagctttcaggcaagcttgtgccaaagataaaccagacagggaggaaaagtccctccttctcaaggatgaactagatcatgcacaggattccagctctaaagaaaagacggcacctcaattgcaggcaaatagctgactgctgaccaccctcccctcagccatggacatgcttcatccatcatcggtgtccacgacctcagaacctgagaatgcctcctcggcctggcccccagatgccaccctgggcaacgtgtcggcgggcccaagcccggcagggctggccgtcagtggcgttctgatccccctggtctacctggtggtgtgcgtggtgggcctgctgggtaactcgctggtcatctatgtggtcctgcggcacacggccagcccttcagtcaccaacgtctacatcctcaacctggcgctggccgacgagctcttcatgctggggctgcccttcctggccgcccagaacgccctgtcctactggcccttcggctccctcatgtgccgcctggtcatggcggtggatggcatcaaccagttcaccagcatattctgcctgactgtcatgagcgtggaccgctacctggccgtggtacatcccacccgctcggcccgctggcgcacagctccggtggcccgcacggtcagcgcggctgtgtgggtggcctcagccgtggtggtgctgcccgtggtggtcttctcgggagtgccccgcggcatgagcacctgccacatgcagtggcccgagccggcggcggcctggcgagccggcttcatcatctacacggccgcactgggcttcttcgggccgctgctggtcatctgcctctgctacctgctcatcgtggtgaaggtgcgctcagctgggcgccgggtgtgggcaccctcgtgccagcggcggcggcgctccgaacgcagggtcacgcgcatggtggtggccgtggtggcgctcttcgtgctctgctggatgcccttctacgtgctcaacatcgtcaacgtggtgtgcccactgcccgaggagcctgccttctttgggctctacttcctggtggtggcgctgccctatgccaacagctgtgccaaccccatcctttatggcttcctctcctaccgcttcaagcagggcttccgcagggtcctgctgcggccctcccgccgtgtgcgcagccaggagcccactgtggggcccccggagaagactgaggaggaggatgaggaggaggaggatggggaggagagcagggaggggggcaaggggaaggagatgaacggccgggtcagccagatcacgcagcctggcaccagcgggcaggagcggccg

SEQ ID NO: 29325 - protein, 387 aa, Homo sapiens
MDMLHPSSVSTTSEPENASSAWPPDATLGNVSAGPSPAGLAVSGVLIPLVYLVVCVVGLLGNSLVIYVVLRHTASPSVTNVYILNLALADELFMLGLPFLAAQNALSYWPFGSLMCRLVMAVDGINQFTSIFCLTVMSVDRYLAVVHPTRSARWRTAPVARTVSAAVWVASAVVVLPVVVFSGVPRGMSTCHMQWPEPAAAWRAGFIIYTAALGFFGPLLVICLCYLLIVVKVRSAGRRVWAPSCQRRRRSERRVTRMVVAVVALFVLCWMPFYVLNIVNVVCPLPEEPAFFGLYFLVVALPYANSCANPILYGFLSYRFKQGFRRVLLRPSRRVRSQEPTVGPPEKTEEEDEEEEDGEESREGGKGKEMNGRVSQITQPGTSGQER

SEQ ID NO: 29326 - DNA, 564 bp, Homo sapiens
actggaggcctcctgaggccaggaacgtgcaaatttgcaggtgctgcatcccaagcccctcatgctcctgccttcctgagggccagaggggagccccaggacccattaagccacccccgtgttcctgccgtcagtgccaatgcaggccagatggttgctgccacaacttgtgtaccttcagggatggggctcttactccctcctgaggccagctgctctaatatcgatggtcctgcttgccagagagttcctctacccagcaaaaatgagtgtctcagaagtgtgctcctctggcctcagttctcctcttttggaacaacataaaacaaatttaattttctacgcctctggggatatctgctcagccaatggaaaatctgggttcaaccagcccctgccatttcttaagactttctgctgcactcacaggatcctgagctgcacttacctgtgagagtcttcaaacttttaaaccttgccagtcaggacttttgctattgcaaatagaaaacccaactcaacctgcttaagcagaaaataaatttattgattcaagtttggaga

SEQ ID NO: 29327 - protein, 104 aa, Homo sapiens
MQARWLLPQLVYLQGWGSYSLLRPAALISMVLLAREFLYPAKMSVSEVCSSGLSSPLLEQHKTNLIFYASGDICSANGKSGFNQPLPFLKTFCCTHRILSCTYL

SEQ ID NO: 29328 - DNA, 642 bp, Homo sapiens
gatccccacccaaagcctgatggcaccccggctggccatgctgtcccctccctgtggcgtttcttagcagatggctgcagagcttcgttgatggtcttttctgtactggaggcctcctgaggccaggaacgtgcaaatttgcagtgccaactgccgcatgtggaagcatctacccgttcactccagtcccaccccacgcctgactcccctctggaaactgcaggccagatggttgctgccacaacttgtgtaccttcagggatggggctcttactccctcctgaggccagctgctctaatatcgatggtcctgcttgccagagagttcctctacccagcaaaaatgagtgtctcagaagtgtgctcctctggcctcagttctcctcttttggaacaacataaaacaaatttaattttctacgcctctggggatatctgctcagccaatggaaaatctgggttcaaccagcccctgccatttcttaagactttctgctgcactcacaggatcctgagctgcacttacctgtgagagtcttcaaacttttaaaccttgccagtcaggacttttgctattgcaaatagaaaacccaactcaacctgcttaagcagaaaataaatttattgattcaagtttggaga

SEQ ID NO: 29329 - protein, 124 aa, Homo sapiens
MWKHLPVHSSPTPRLTPLWKLQARWLLPQLVYLQGWGSYSLLRPAALISMVLLAREFLYPAKMSVSEVCSSGLSSPLLEQHKTNLIFYASGDICSANGKSGFNQPLPFLKTFCCTHRILSCTYL

SEQ ID NO: 29330 - DNA, 1644 bp, Homo sapiens
caggtctcctgctggagcctccacgcagggggcctgtggggatggccagggctcagcccagcacctgagcgcccctcccaccagctgctctgccagaccgcatgctccgccccctgcaaacgaccgtggggagagcagcttgagtaagttccccttccgtttcctcctgccccaccaccgctgctcctcagcaggcgcctcaccagcctccacaccccttgcgcccgcagaaacgcgcctggccctgagctgtcaccaccgacactctccaggctccggacacgatgcaggccatcaagtgtgtggtggtgggagatggggccgtgggcaagacctgccttctcatcagctacaccaccaacgcctttcccggagagtacatccccaccgtgtttgacaactattcagccaatgtgatggtggacagcaagccagtgaacctggggctgtgggacactgctgggcaggaggactacgaccgtctccggccgctctcctatccacagacggacgtcttcctcatctgcttctccctcgtcagcccagcctcttatgagaacgtccgcgccaagtggttcccagaagtgcggcaccactgccccagcacacccatcatcctggtgggcaccaagctggacctgcgggacgacaaggacaccatcgagaaactgaaggagaagaagctggctcccatcacctacccgcagggcctggcactggccaaggagattgactcggtgaaatacctggagtgctcagctctcacccagagaggcctgaaaaccgtgttcgacgaggccatccgggccgtgctgtgccctcagcccacgcggcagcagaagcgcgcctgcagcctcctctaggggttgcaccccagcgctcccacctagatgggtctgatcctccaggatccccacccaaagcctgatggcaccccggctggccatgctgtcccctccctgtggcgtttcttagcagatggctgcagagcttcgttgatggtcttttctgtactggaggcctcctgaggccaggaacgtgcaaatttgcaggtgctgcatcccaagcccctcatgctcctgccttcctgagggccagaggggagccccaggacccattaagccacccccgtgttcctgccgtcagtgccaactgccgcatgtggaagcatctacccgttcactccagtcccaccccacgcctgactcccctctggaaactgcaggccagatggttgctgccacaacttgtgtaccttcagggatggggctcttactccctcctgaggccagctgctctaatatcgatggtcctgcttgccagagagttcctctacccagcaaaaatgagtgtctcagaagtgtgctcctctggcctcagttctcctcttttggaacaacataaaacaaatttaattttctacgcctctggggatatctgctcagccaatggaaaatctgggttcaaccagcccctgccatttcttaagactttctgctgcactcacaggatcctgagctgcacttacctgtgagagtcttcaaacttttaaaccttgccagtcaggacttttgctattgcaaatagaaaacccaactcaacctgcttaagcagaaaataaatttattgattcaagtttggaga

SEQ ID NO: 29331 - protein, 192 aa, Homo sapiens; identical to SEQ ID NO: 4035

SEQ ID NO: 29332 - DNA, 706 bp, Homo sapiens
caccagcctccacaccccttgcgcccgcagaaacgcgcctggccctgagctgtcaccaccgacactctccaggctccggacacgatgcaggccatcaagtgtgtggtggtgggagatggggccgtgggcaagacctgccttctcatcagctacaccaccaacgcctttcccggagagtacatccccaccgtgtttgacaactattcagccaatgtgatggtggacagcaagccagtgaacctggggctgtgggacactgctgggcaggaggactacgaccgtctccggccgctctcctatccacagacggtgtgctgctcccacctgccttgcagtcctgacctttgctgtctctgttccctctgcttgggatgcccttccagccagctcagcctgggaaaccctacctctccccttaaggcccagctcagggagtctgcctgccttgcatgtcccaggcagagaagggcttcctcttgcactccctcagccctgcattggttcccggtcctcaatgtgcccatcttcccaccccattgcctcctgggctctggcaccccctgtttccagtggtggggcaggtggattctgcacagggccccaggaggcagcccagcatggtgagccctgggagtgctgggggaggggagaggtggaggatgcctgcaggtggctgctgggtcctcgcccttcctccagggtatgc

SEQ ID NO: 29333 - protein, 179 aa, Homo sapiens [sequence omitted]

SEQ ID NO: 29334 - DNA, 2904 bp, Homo sapiens
accaccgctgctcctcagcaggcgcctcaccagcctccacaccccttgcgcccgcagaaacgcgcctggccctgagctgtcaccaccgacactctccaggctccggacacgatgcaggccatcaagtgtgtggtggtgggagatggggccgtgggcaagacctgccttctcatcagctacaccaccaacgcctttcccggagagtacatccccaccgtgcctgggaggccctgcgctctattgcaggatgcggaggcagggctgtcatcggacgtggagggagcgtgttggtgtcagactcaggagggaaggatgactggggaggcaccagcccctccctggccagccctcaggggtccccatcactcctaggacatttccccgactccctagcatggcactcaaggctcctgatggccttcactcaacctcccacctggccttattacccattactttgcttcacactctgcctcctccggaccctactgttcgccacaagctccctgcacatttctaccccagggcctttgctcaagctgttctctctccccatagtgctttttctccccacatccacctgtctaaagcctccaggcgcagctccagtgccccctcctccgggaagcctttctgatctaccacgaaggggtctccactccccagagtgactttatctgatctctcccatgactatgagcctgtggagggcagggagccatggccagctctttgtgggtctcccattatctcagcacagtgtcttctacatggtatgacacatgcattaccttacacacaacacatgtgttttgagttgacctgacttggacatcgtgggaaggaccacaggaagatcgatcatagccaccatctagcaaaggcctgccacatgctggcccctgcgcaagatgtcacacatgtgtgatctcatttgatccccctgggagatggctattagcatgcacaggacacccatggggaagctgagcctcacagccactaagaggcttgcctcccaggcttacacggtcctgtccagcttcagagccaaggtccatgcagaacctcgcgggggccctcatttcttgatcttaatgaacccccctttcaggggcagggatcaggctctcctaggaagaggagggcaggcagaagggagaagagagcctggagccgagatgcttccaacccaccccagaggattcctcactacccaacccccaaccccagacttgggtgggctgggctctctctgctgctgtctctccccgggacactctgctcagctgccttagatgccctggcccaggctagaggaaggcaggcagccaggagagggcagggaaaccctagcagagagcctagaaagccgcttttgccccagctcggtcctgatgctggtgagtgcccctctctggtcctgtccttatatacaaaatgggaacaaggattcctgcccactcaccatcaactatcaaacgtttatcaggtgcctctaagtgccaagggagggctggctgcaaacctgagcagggagggagaattaggtgaggcagctcctgctcaaggccatggtcaccagcagtgtgttgtcactgcctctgtccctgggtctctggatgctggcttgagaccttgtcccgcctttgtgcatcttggctgagttgaaggacccacttgctgaaggaccttggaccaatcacttcccctctctgagcctcaatctccttttctataagaggtagaggcttggaagtcccaagctccttccccaggcacctcccttgtacgttgagatggatggctgaggctgctgaggccaggttatggccaggtgctctcagcagcctggaggtccctgatccctggtggcccctagtggactttgttgtcctggacaacatcacagaagctggagaaataggcccgaccagatctaccttcccaagtctctccgaaggattgggtgaaggtatcccagtagggccagctctatgcgtgtggccacctatccaattgcacagggccccatgctcagaagggtcctgcaccttgtttaatactctgatgtctacatcttgaaattcttaatcatttttgagcatgggccctgtacttccattttgcactgggtcttgcaagttctgtggtgaatcctgcctcacaccctcatatggcttcaggcacaaagtttctcagccccagacgagaccccagagcgggatcctgctactgccaatgcctgtgcccctgtgaagggagggtaaaatagtcacactgggcccttgacattggagggggaagagggagagaaggtgggttgggaaaaacaggcagccccaaatctctggcacctgagattaaggtggagagagcttctgggctgaggatggtaggtttgctgggggttggggaggcccctgctgcagatacaagatcagataagcctgagatctgctctgtggatggccccgtgctaggtgttggggatacagaaacatggcaggaagacagtgccctcgtgtgcctgtggcatagaggggcgcccccttacacctcacctcgttagaaccaagctcgacggaagccctggtgagcttttaaaactgaaagttaggctgggcgccgtggctcatgcctgtaatcccagcactttgggaggctgaggcaggcagatcgcttgagcccatgagttcgagaccagcctgggcaacatggagcagaaaccccatctctacaaaaaatacaaaaattagccgggcatggtggtgcatgcctgtagtcccagcgactcgggagactgaggtgggaggatcgcttgagcctaggagggtgcggctgcattgagctgtgattgtgctactgcactccagcctgggcaacaaagtgagaccctgtctc

SEQ ID NO: 29335 - protein, 86 aa, Homo sapiens
MQAIKCVVVGDGAVGKTCLLISYTTNAFPGEYIPTVPGRPCALLQDAEAGLSSDVEGACWCQTQEGRMTGEAPAPPWPALRGPHHS

SEQ ID NO: 29336 - DNA, 8192 bp, Homo sapiens
cttgtttgtgtgctaggctgggggggagagagggcgagagagagcgggcgagagtgggcaagcaggacgccgggctgagtgctaactgcgggagccagagagtgcggaggggagtcgggtcggagagaggcggcaggggccgagacagtggcagggggcccggggcgcacgggctgaggcgacccccagccccctcccgtccgcacacacccccaccgcggtccagcagccgggccggcgtcgacgcctaggggggaccattacataaccccgcgccccgcggcgtcttctcccgccgccgcgggcggccccgaacggagccccggggggcgggcgctcccagcacctggccgccggcggtgggggccgtagcagcggccgtatttatttattttccgcgggaaaggaaggcgaaggaggggagcgcggcgcgaggaggggccgcctgcgccgccgccggagcggggcctcctcggtgggctccgcgtcggcgcgggcgtgcgggcggcgctgctcggcccggccccctcggccctctggtccggccagctccgctcccggcgtccttgccgcgcctccgccggccgccgcgcgatgtgaggcggcggcgccagcctggctctcggctcgggcgagttctctgcggccattaggggccggtgcggcggcggcggcgcggagcgcggcggcaggaggagggttcggagggtgggggcgcaggcccgggagggggcaccgggaggaggtgagtgtctcttgtcgcctcctcctctccccccttttcgcccccgcctccttgtggcgatgagaaggaggaggacagcgccgaggaggaagaggttgatggcggcggcggagctccgagagacctcggctgggcaggggccggccgtggcgggccggggactgcgcctctagagccgcgagttctcgggaattcgccgcagcggacgcgctcggcgaatttgtgctcttgtgccctcctccgggcttgggcccaggcccggcccctcgcacttgcccttaccttttctatcgagtccgcatccctctccagccactgcgacccggcgaagagaaaaaggaacttcccccaccccctcgggtgccgtcggagccccccagcccacccctgggtgcggcgcggggaccccgggccgaagaagagatttcctgaggattctggttttcctcgcttgtatctccgaaagaattaaaaatggccgagaatgtggtggaaccggggccgccttcagccaagcggcctaaactctcatctccggccctctcggcgtccgccagcgatggcacagattttggctctctatttgacttggagcacgacttaccagatgaattaatcaactctacagaattgggactaaccaatggtggtgatattaatcagcttcagacaagtcttggcatggtacaagatgcagcttctaaacataaacagctgtcagaattgctgcgatctggtagttcccctaacctcaatatgggagttggtggcccaggtcaagtcatggccagccaggcccaacagagcagtcctggattaggtttgataaatagcatggtcaaaagcccaatgacacaggcaggcttgacttctcccaacatggggatgggcactagtggaccaaatcagggtcctacgcagtcaacaggtatgatgaacagtccagtaaatcagcctgccatgggaatgaacacagggatgaatgcgggcatgaatcctggaatgttggctgcaggcaatggacaagggataatgcctaatcaagtcatgaacggttcaattggagcaggccgagggcgacagaatatgcagtacccaaacccaggcatgggaagtgctggcaacttactgactgagcctcttcagcagggctctccccagatgggaggacaaacaggattgagaggcccccagcctcttaagatgggaatgatgaacaaccccaatccttatggttcaccatatactcagaatcctggacagcagattggagccagtggccttggtctccagattcagacaaaaactgtactatcaaataacttatctccatttgctatggacaaaaaggcagttcctggtggaggaatgcccaacatgggtcaacagccagccccgcaggtccagcagccaggcctggtgactccagttgcccaagggatgggttctggagcacatacagctgatccagagaagcgcaagctcatccagcagcagcttgttctccttttgcatgctcacaagtgccagcgccgggaacaggccaatggggaagtgaggcagtgcaaccttccccactgtcgcacaatgaagaatgtcctaaaccacatgacacactgccagtcaggcaagtcttgccaagtggcacactgtgcatcttctcgacaaatcatttcacactggaagaattgtacaagacatgattgtcctgtgtgtctccccctcaaaaatgctggtgataagagaaatcaacagccaattttgactggagcacccgttggacttggaaatcctagctctctaggggtgggtcaacagtctgcccccaacctaagcactgttagtcagattgatcccagctccatagaaagagcctatgcagctcttggactaccctatcaagtaaatcagatgccgacacaaccccaggtgcaagcaaagaaccagcagaatcagcagcctgggcagtctccccaaggcatgcggcccatgagcaacatgagtgctagtcctatgggagtaaatggaggtgtaggagttcaaacgccgagtcttctttctgactcaatgttgcattcagccataaattctcaaaacccaatgatgagtgaaaatgccagtgtgccctccctgggtcctatgccaacagcagctcaaccatccactactggaattcggaaacagtggcacgaagatattactcaggatcttcgaaatcatcttgttcacaaactcgtccaagccatatttcctacgccggatcctgctgctttaaaagacagacggatggaaaacctagttgcatatgctcggaaagttgaaggggacatgtatgaatctgcaaacaatcgagcggaatactaccaccttctagctgagaaaatctataagatccagaaagaactagaagaaaaacgaaggaccagactacagaagcagaacatgctaccaaatgctgcaggcatggttccagtttccatgaatccagggcctaacatgggacagccgcaaccaggaatgacttctaatggccctctacctgacccaagtatgatccgtggcagtgtgccaaaccagatgatgcctcgaataactccacaatctggtttgaatcaatttggccagatgagcatggcccagccccctattgtaccccggcaaacccctcctcttcagcaccatggacagttggctcaacctggagctctcaacccgcctatgggctatgggcctcgtatgcaacagccttccaaccagggccagttccttcctcagactcagttcccatcacagggaatgaatgtaacaaatatccctttggctccgtccagcggtcaagctccagtgtctcaagcacaaatgtctagttcttcctgcccggtgaactctcctataatgcctccagggtctcaggggagccacattcactgtccccagcttcctcaaccagctcttcatcagaattcaccctcgcctgtacctagtcgtacccccacccctcaccatactcccccaagcataggggctcagcagccaccagcaacaacaattccagcccctgttcctacacctcctgccatgccacctgggccacagtcccaggctctacatccccctccaaggcagacacctacaccaccaacaacacaacttccccaacaagtgcagccttcacttcctgctgcaccttctgctgaccagccccagcagcagcctcgctcacagcagagcacagcagcgtctgttcctaccccaacagcaccgctgcttcctccgcagcctgcaactccactttcccagccagctgtaagcattgaaggacaggtatcaaatcctccatctactagtagcacagaagtgaattctcaggccattgctgagaagcagccttcccaggaagtgaagatggaggccaaaatggaagtggatcaaccagaaccagcagatactcagccggaggatatttcagagtctaaagtggaagactgtaaaatggaatctaccgaaacagaagagagaagcactgagttaaaaactgaaataaaagaggaggaagaccagccaagtacttcagctacccagtcatctccggctccaggacagtcaaagaaaaagattttcaaaccagaagaactacgacaggcactgatgccaactttggaggcactttaccgtcaggatccagaatcccttccctttcgtcaacctgtggaccctcagcttttaggaatccctgattactttgatattgtgaagagccccatggatctttctaccattaagaggaagttagacactggacagtatcaggagccctggcagtatgtcgatgatatttggcttatgttcaataatgcctggttatataaccggaaaacatcacgggtatacaaatactgctccaagctctctgaggtctttgaacaagaaattgacccagtgatgcaaagccttggatactgttgtggcagaaagttggagttctctccacagacactgtgttgctacggcaaacagttgtgcacaatacctcgtgatgccacttattacagttaccagaacaggtatcatttctgtgagaagtgtttcaatgagatccaaggggagagcgtttctttgggggatgacccttcccagcctcaaactacaataaataaagaacaattttccaagagaaaaaatgacacactggatcctgaactgtttgttgaatgtacagagtgcggaagaaagatgcatcagatctgtgtccttcaccatgagatcatctggcctgctggattcgtctgtgatggctgtttaaagaaaagtgcacgaactaggaaagaaaataagttttctgctaaaaggttgccatctaccagacttggcacctttctagagaatcgtgtgaatgactttctgaggcgacagaatcaccctgagtcaggagaggtcactgttagagtagttcatgcttctgacaaaaccgtggaagtaaaaccaggcatgaaagcaaggtttgtggacagtggagagatggcagaatcctttccataccgaaccaaagccctctttgcctttgaagaaattgatggtgttgacctgtgcttctttggcatgcatgttcaagagtatggctctgactgccctccacccaaccagaggagagtatacatatcttacctcgatagtgttcatttcttccgtcctaaatgcttgaggactgcagtctatcatgaaatcctaattggatatttagaatatgtcaagaaattaggttacacaacagggcatatttgggcatgtccaccaagtgagggagatgattatatcttccattgccatcctcctgaccagaagatacccaagcccaagcgactgcaggaatggtacaaaaaaatgcttgacaaggctgtatcagagcgtattgtccatgactacaaggatatttttaaacaagctactgaagatagattaacaagtgcaaaggaattgccttatttcgagggtgatttctggcccaatgttctggaagaaagcattaaggaactggaacaggaggaagaagagagaaaacgagaggaaaacaccagcaatgaaagcacagatgtgaccaagggagacagcaaaaatgctaaaaagaagaataataagaaaaccagcaaaaataagagcagcctgagtaggggcaacaagaagaaacccgggatgcccaatgtatctaacgacctctcacagaaactatatgccaccatggagaagcataaagaggtcttctttgtgatccgcctcattgctggccctgctgccaactccctgcctcccattgttgatcctgatcctctcatcccctgcgatctgatggatggtcgggatgcgtttctcacgctggcaagggacaagcacctggagttctcttcactccgaagagcccagtggtccaccatgtgcatgctggtggagctgcacacgcagagccaggaccgctttgtctacacctgcaatgaatgcaagcaccatgtggagacacgctggcactgtactgtctgtgaggattatgacttgtgtatcacctgctataacactaaaaaccatgaccacaaaatggagaaactaggccttggcttagatgatgagagcaacaaccagcaggctgcagccacccagagcccaggcgattctcgccgcctgagtatccagcgctgcatccagtctctggtccatgcttgccagtgtcggaatgccaattgctcactgccatcctgccagaagatgaagcgggttgtgcagcataccaagggttgcaaacggaaaaccaatggcgggtgccccatctgcaagcagctcattgccctctgctgctaccatgccaagcactgccaggagaacaaatgcccggtgccgttctgcctaaacatcaagcagaagctccggcagcaacagctgcagcaccgactacagcaggcccaaatgcttcgcaggaggatggccagcatgcagcggactggtgtggttgggcagcaacagggcctcccttcccccactcctgccactccaacgacaccaactggccaacagccaaccaccccgcagacgccccagcccacttctcagcctcagcctacccctcccaatagcatgccaccctacttgcccaggactcaagctgctggccctgtgtcccagggtaaggcagcaggccaggtgacccctccaacccctcctcagactgctcagccaccccttccagggcccccacctgcagcagtggaaatggcaatgcagattcagagagcagcggagacgcagcgccagatggcccacgtgcaaatttttcaaaggccaatccaacaccagatgcccccgatgactcccatggcccccatgggtatgaacccacctcccatgaccagaggtcccagtgggcatttggagccagggatgggaccgacagggatgcagcaacagccaccctggagccaaggaggattgcctcagccccagcaactacagtctgggatgccaaggccagccatgatgtcagtggcccagcatggtcaacctttgaacatggctccacaaccaggattgggccaggtaggtatcagcccactcaaaccaggcactgtgtctcaacaagccttacaaaaccttttgcggactctcaggtctcccagctctcccctgcagcagcaacaggtgcttagtatccttcacgccaacccccagctgttggctgcattcatcaagcagcgggctgccaagtatgccaactctaatccacaacccatccctgggcagcctggcatgccccaggggcagccagggctacagccacctaccatgccaggtcagcagggggtccactccaatccagccatgcagaacatgaatccaatgcaggcgggcgttcagagggctggcctgccccagcagcaaccacagcagcaactccagccacccatgggagggatgagcccccaggctcagcagatgaacatgaaccacaacaccatgccttcacaattccgagacatcttgagacgacagcaaatgatgcaacagcagcagcaacagggagcagggccaggaataggccctggaatggccaaccataaccagttccagcaaccccaaggagttggctacccaccacagcagcagcagcggatgcagcatcacatgcaacagatgcaacaaggaaatatgggacagataggccagcttccccaggccttgggagcagaggcaggtgccagtctacaggcctatcagcagcgactccttcagcaacagatggggtcccctgttcagcccaaccccatgagcccccagcagcatatgctcccaaatcaggcccagtccccacacctacaaggccagcagatccctaattctctctccaatcaagtgcgctctccccagcctgtcccttctccacggccacagtcccagcccccccact

SEQ ID NO: 29337 - protein, 2414 aa, Homo sapiens; identical to SEQ ID NO: 4037

SEQ ID NO: 29338 - DNA, 5007 bp, Homo sapiens
agctccgagagacctcggctgggcaggggccggccgtggcgggccggggactgcgcctctagagccgcgagttctcgggaattcgccgcagcggacgcgctcggcgaatttgtgctcttgtgccctcctccgggcttgggcccaggcccggcccctcgcacttgcccttaccttttctatcgagtccgcatccctctccagccactgcgacccggcgaagagaaaaaggaacttcccccaccccctcgggtgccgtcggagccccccagcccacccctgggtgcggcgcggggaccccgggccgaagaagagatttcctgaggattctggttttcctcgcttgtatctccgaaagaattaaaaatggccgagaatgtggtggaaccggggccgccttcagccaagcggcctaaactctcatctccggccctctcggcgtccgccagcgatggcacagattttggctctctatttgacttggagcacgacttaccagatgaattaatcaactctacagaattgggactaaccaatggtggtgatattaatcagcttcagacaagtcttggcatggtacaagatgcagcttctaaacataaacagctgtcagaattgctgcgatctggtagttcccctaacctcaatatgggagttggtggcccaggtcaagtcatggccagccaggcccaacagagcagtcctggattaggtttgataaatagcatggtcaaaagcccaatgacacaggcaggcttgacttctcccaacatggggatgggcactagtggaccaaatcagggtcctacgcagtcaacaggtatgatgaacagtccagtaaatcagcctgccatgggaatgaacacagggatgaatgcgggcatgaatcctggaatgttggctgcaggcaatggacaagggataatgcctaatcaagtcatgaacggttcaattggagcaggccgagggcgacagaatatgcagtacccaaacccaggcatgggaagtgctggcaacttactgactgagcctcttcagcagggctctccccagatgggaggacaaacaggattgagaggcccccagcctcttaagatgggaatgatgaacaaccccaatccttatggttcaccatatactcagaatcctggacagcagattggagccagtggccttggtctccagattcagacaaaaactgtactatcaaataacttatctccatttgctatggacaaaaaggcagttcctggtggaggaatgcccaacatgggtcaacagccagccccgcaggtccagcagccaggcctggtgactccagttgcccaagggatgggttctggagcacatacagctgatccagagaagcgcaagctcatccagcagcagcttgttctccttttgcatgctcacaagtgccagcgccgggaacaggccaatggggaagtgaggcagtgcaaccttccccactgtcgcacaatgaagaatgtcctaaaccacatgacacactgccagtcaggcaagtcttgccaagtggcacactgtgcatcttctcgacaaatcatttcacactggaagaattgtacaagacatgattgtcctgtgtgtctccccctcaaaaatgctggtgataagagaaatcaacagccaattttgactggagcacccgttggacttggaaatcctagctctctaggggtgggtcaacagtctgcccccaacctaagcactgttagtcagattgatcccagctccatagaaagagcctatgcagctcttggactaccctatcaagtaaatcagatgccgacacaaccccaggtgcaagcaaagaaccagcagaatcagcagcctgggcagtctccccaaggcatgcggcccatgagcaacatgagtgctagtcctatgggagtaaatggaggtgtaggagttcaaacgccgagtcttctttctgactcaatgttgcattcagccataaattctcaaaacccaatgatgagtgaaaatgccagtgtgccctccctgggtcctatgccaacagcagctcaaccatccactactggaattcggaaacagtggcacgaagatattactcaggatcttcgaaatcatcttgttcacaaactcgtccaagccatatttcctacgccggatcctgctgctttaaaagacagacggatggaaaacctagttgcatatgctcggaaagttgaaggggacatgtatgaatctgcaaacaatcgagcggaatactaccaccttctagctgagaaaatctataagatccagaaagaactagaagaaaaacgaaggaccagactacagaagcagaacatgctaccaaatgctgcaggcatggttccagtttccatgaatccagggcctaacatgggacagccgcaaccaggaatgacttctaatggccctctacctgacccaagtatgatccgtggcagtgtgccaaaccagatgatgcctcgaataactccacaatctggtttgaatcaatttggccagatgagcatggcccagccccctattgtaccccggcaaacccctcctcttcagcaccatggacagttggctcaacctggagctctcaacccgcctatgggctatgggcctcgtatgcaacagccttccaaccagggccagttccttcctcagactcagttcccatcacagggaatgaatgtaacaaatatccctttggctccgtccagcggtcaagctccagtgtctcaagcacaaatgtctagttcttcctgcccggtgaactctcctataatgcctccagggtctcaggggagccacattcactgtccccagcttcctcaaccagctcttcatcagaattcaccctcgcctgtacctagtcgtacccccacccctcaccatactcccccaagcataggggctcagcagccaccagcaacaacaattccagcccctgttcctacacctcctgccatgccacctgggccacagtcccaggctctacatccccctccaaggcagacacctacaccaccaacaacacaacttccccaacaagtgcagccttcacttcctgctgcaccttctgctgaccagccccagcagcagcctcgctcacagcagagcacagcagcgtctgttcctaccccaacagcaccgctgcttcctccgcagcctgcaactccactttcccagccagctgtaagcattgaaggacaggtatcaaatcctccatctactagtagcacagaagtgaattctcaggccattgctgagaagcagccttcccaggaagtgaagatggaggccaaaatggaagtggatcaaccagaaccagcagatactcagccggaggatatttcagagtctaaagtggaagactgtaaaatggaatctaccgaaacagaagagagaagcactgagttaaaaactgaaataaaagaggaggaagaccagccaagtacttcagctacccagtcatctccggctccaggacagtcaaagaaaaagattttcaaaccagaagaactacgacaggcactgatgccaactttggaggcactttaccgtcaggatccagaatcccttccctttcgtcaacctgtggaccctcagcttttaggaatccctgattactttgatattgtgaagagccccatggatctttctaccattaagaggaagttagacactggacagtatcaggagccctggcagtatgtcgatgatatttggcttatgttcaataatgcctggttatataaccggaaaacatcacgggtatacaaatactgctccaagctctctgaggtctttgaacaagaaattgacccagtgatgcaaagccttggatactgttgtggcagaaagttggagttctctccacagacactgtgttgctacggcaaacagttgtgcacaatacctcgtgatgccacttattacagttaccagaacaggtatcatttctgtgagaagtgtttcaatgagatccaaggggagagcgtttctttgggggatgacccttcccagcctcaaactacaataaataaagaacaattttccaagagaaaaaatgacacactggatcctgaactgtttgttgaatgtacagagtgcggaagaaagatgcatcagatctgtgtccttcaccatgagatcatctggcctgctggattcgtctgtgatggctgtttaaagaaaagtgcacgaactaggaaagaaaataagttttctgctaaaaggttgccatctaccagacttggcacctttctagagaatcgtgtgaatgactttctgaggcgacagaatcaccctgagtcaggagaggtcactgttagagtagttcatgcttctgacaaaaccgtggaagtaaaaccaggcatgaaagcaaggtttgtggacagtggagagatggcagaatcctttccataccgaaccaaagccctctttgcctttgaagaaattgatggtgttgacctgtgcttctttggcatgcatgttcaagagtatggctctgactgccctccacccaaccagaggagagtatacatatcttacctcgatagtgttcatttcttccgtcctaaatgcttgaggactgcagtctatcatgaaatcctaattggatatttagaatatgtcaagaaattaggttacacaacagggcatatttgggcatgtccaccaagtgagggagatgattatatcttccattgccatcctcctgaccagaagatacccaagcccaagcgactgcaggaatggtacaaaaaaatgcttgacaaggctgtatcagagcgtattgtccatgactacaaggatatttttaaacaagctactgaagatagattaacaagtgcaaaggaattgccttatttcgagggtgatttctggcccaatgttctggaagaaagcattaaggaactggaacaggaggaagaagagagaaaacgagaggaaaacaccagcaatgaaagcacagatgtgaccaagggagacagcaaaaatgct

SEQ ID NO: 29339 - protein, 1547 aa, Homo sapiens
MAENVVEPGPPSAKRPKLSSPALSASASDGTDFGSLFDLEHDLPDELINSTELGLTNGGDINQLQTSLGMVQDAASKHKQLSELLRSGSSPNLNMGVGGPGQVMASQAQQSSPGLGLINSMVKSPMTQAGLTSPNMGMGTSGPNQGPTQSTGMMNSPVNQPAMGMNTGMNAGMNPGMLAAGNGQGIMPNQVMNGSIGAGRGRQNMQYPNPGMGSAGNLLTEPLQQGSPQMGGQTGLRGPQPLKMGMMNNPNPYGSPYTQNPGQQIGASGLGLQIQTKTVLSNNLSPFAMDKKAVPGGGMPNMGQQPAPQVQQPGLVTPVAQGMGSGAHTADPEKRKLIQQQLVLLLHAHKCQRREQANGEVRQCNLPHCRTMKNVLNHMTHCQSGKSCQVAHCASSRQIISHWKNCTRHDCPVCLPLKNAGDKRNQQPILTGAPVGLGNPSSLGVGQQSAPNLSTVSQIDPSSIERAYAALGLPYQVNQMPTQPQVQAKNQQNQQPGQSPQGMRPMSNMSASPMGVNGGVGVQTPSLLSDSMLHSAINSQNPMMSENASVPSLGPMPTAAQPSTTGIRKQWHEDITQDLRNHLVHKLVQAIFPTPDPAALKDRRMENLVAYARKVEGDMYESANNRAEYYHLLAEKIYKIQKELEEKRRTRLQKQNMLPNAAGMVPVSMNPGPNMGQPQPGMTSNGPLPDPSMIRGSVPNQMMPRITPQSGLNQFGQMSMAQPPIVPRQTPPLQHHGQLAQPGALNPPMGYGPRMQQPSNQGQFLPQTQFPSQGMNVTNIPLAPSSGQAPVSQAQMSSSSCPVNSPIMPPGSQGSHIHCPQLPQPALHQNSPSPVPSRTPTPHHTPPSIGAQQPPATTIPAPVPTPPAMPPGPQSQALHPPPRQTPTPPTTQLPQQVQPSLPAAPSADQPQQQPRSQQSTAASVPTPTAPLLPPQPATPLSQPAVSIEGQVSNPPSTSSTEVNSQAIAEKQPSQEVKMEAKMEVDQPEPADTQPEDISESKVEDCKMESTETEERSTELKTEIKEEEDQPSTSATQSSPAPGQSKKKIFKPEELRQALMPTLEALYRQDPESLPFRQPVDPQLLGIPDYFDIVKSPMDLSTIKRKLDTGQYQEPWQYVDDIWLMFNNAWLYNRKTSRVYKYCSKLSEVFEQEIDPVMQSLGYCCGRKLEFSPQTLCCYGKQLCTIPRDATYYSYQNRYHFCEKCFNEIQGESVSLGDDPSQPQTTINKEQFSKRKNDTLDPELFVECTECGRKMHQICVLHHEIIWPAGFVCDGCLKKSARTRKENKFSAKRLPSTRLGTFLENRVNDFLRRQNHPESGEVTVRVVHASDKTVEVKPGMKARFVDSGEMAESFPYRTKALFAFEEIDGVDLCFFGMHVQEYGSDCPPPNQRRVYISYLDSVHFFRPKCLRTAVYHEILIGYLEYVKKLGYTTGHIWACPPSEGDDYIFHCHPPDQKIPKPKRLQEWYKKMLDKAVSERIVHDYKDIFKQATEDRLTSAKELPYFEGDFWPNVLEESIKELEQEEEERKREENTSNESTDVTKGDSKN

SEQ ID NO: 29340 - DNA, 467 bp, Homo sapiens
tttcatcatcggtagagtatatttgttacttcagataattttcacctctggggggttgccatggagtggggggaaaccagactacgaagatgcttgtcactcatatttagctgtgctaaaaataaggactatttgaataaacttgtgaaattagacattttattttatttatttgtttgagacaattatccagcctgaacaacaaaagtgagaatccgattccaaacaaaaaagaaaagaaaaagaaagaaagaaattattaaatgagacaatgtggatacttagcacacagcaggtgaatgacaaatgctattactattgctattctttcctgcattttagtcaaggctatttacaaacatttctctctcctgaaaaatgagacaatttttagggtgtactaacacagggaaccctgaagaaatgaggggaatgacttaactcattggttgctgcaagtgaatatt

SEQ ID NO: 29341 - protein, 39 aa, Homo sapiens
MEWGETRLRRCLSLIFSCAKNKDYLNKLVKLDILFYLFV

SEQ ID NO: 29342 - DNA, 357 bp, Homo sapiens
ccaccagtggggcttctctgctgtaaaggagataaaggacatggaaaggaatggctttggagtccaacaggccattgtcctggatttcatgatagactgcagtcctcaagcatttaggacggaagaaatgaacactatcgaggctctttgctcacatcgttatttgtgaagctcatcacaggcaggtaggcgactccgccgtgaacccttcagggaagttcagtgagcctgtggtttccttctatttgtagtaactagcagtgcctggcacatacacatcaatcagtatttggtgatccctatacgtttttattattgcctttatactatttttggagaaaagaaattcccacccga

SEQ ID NO: 29343 - protein, 42 aa, Homo sapiens
MERNGFGVQQAIVLDFMIDCSPQAFRTEEMNTIEALCSHRYL

SEQ ID NO: 29344 - DNA, 457 bp, Homo sapiens
cgtcctaccagtgccaggactgccagagcgggaggagcgcggcgcgggccagccgggactgctggacagcggggtccaggctagaggcgagcgagcggtcagtgacggctgtggaggagggaggcgctgggcgtcagcgcgggacccgagcctctggaccactgagctggggggctggctgaggtccacctcctaacaaattattggaaggaatatgagaaaaagactgtttaaccaatttttaggtacggaattacaacctgaaatcaagccttcatttccctctcaacttaattaccacttcctataagaacttgattatatgtctgagaaccgagatagtaaaatgaggagtctgactgaacaatcgagattactaccattggacaaaccctgagaggaattactcttcaattctcctggctttcgttatcaattatatgatattaaagagaga

SEQ ID NO: 29345 - protein, 31 aa, Homo sapiens
MRKRLFNQFLGTELQPEIKPSFPSQLNYHFL

SEQ ID NO: 29346 - DNA, 489 bp, Homo sapiens
aaaatgcagaaattagccaggtgtggtggtgtgggcctgtggtctcagctattcaggaggccatggtgggataattgcttgagcccaggaggcagaggttgtagtgagccaagatcacgccactgcattccagcctggatgacagagcgaggccctgtctcaaaaaaaagagactgtctgtttttcaggtcttctttgtgatccgcctcattgctggccctgctgccaactccctgcctcccattgttgatcctgatcctctcatcccctgcgatctgatggatggtcgggatgcgtttctcacgctggcaagggacaagcacctggagttctcttcactccgaagagcccagtggtccaccatgtgcatgctggtggagctgcacacgcagagccaggaccgctttgtctacacctgcaatgaatgcaagcaccatgtggagacacgctggcactgtactgtctgtgaggattatgacttgtgtatca

SEQ ID NO: 29347 - protein, 69 aa, Homo sapiens
MDGRDAFLTLARDKHLEFSSLRRAQWSTMCMLVELHTQSQDRFVYTCNECKHHVETRWHCTVCEDYDLC

SEQ ID NO: 29348 - DNA, 618 bp, Homo sapiens
gggctgaagcagtcctcttacctcagcctccctagtagctgggactcaaaggtgtgtaccatcatgcctcccaaattgctgggattacaggcatgagccaccttaccagcatcttaatgtgaggtgaactcactcagcattaatcagagccagccccagaaaatgtatctagtatcaagcatccagcatccacctgcttcagctcagtgaccccgcagatatccatggagcagctacatctgtgccaggccaggcagagcacacatgaacagcatgcagccctgccctcaacctaaccagcttaaggtctagaagacagcatgacaaagtacaaagcaccaagtgatctatgcaaggaatgcaagagggaatccatgaaagaaaacctagctgatgggaattggaaatgtttctggaaagggtagcatggaagctggatgttggaggagagataggaagaggaggagaggaggcggcgcccagaagagtgcaccacattctgctagggagcagctccaggtctacttggctgagacccgataaacggaagtagtgaacacctgttccagaaatacggccttccagctccctaagactaggggcccaggattcatgtga

SEQ ID NO: 29349 - protein, 49 aa, Homo sapiens [sequence omitted]

SEQ ID NO: 29350 - DNA, 1375 bp, Homo sapiens
ccagcgcgtgcccgcccggcgccctctagggtggaaggctgcgggcgtcctaccagtgccaggactgccagagcgggaggagcgcggcgcgggccagccgggactgctggacagcggggtccaggctagaggcgagcgagcggtcagtgacggctgtggaggagggaggcgctgggcgtcagcgcgggacccgagcctctggaccactgagctggggggctggctgaggtccacctcctaacaaattattggaaggaatatgagaaaaatggagtttcactcttgtcacccaggctggagtgcaatagagcgatcatggctcactgcaacctctgccccccgggttcaagcgattctcctgcctcagcctctcaagtagctgggattacaagtgcccaccaccacgcccagctaatttttgtatttttagtaaagatggggtttcaccacattggccaggctggtctctaactcctgacctcacgtgattcatccatctcagcctcccaaagtgctgggattacaggcatgagccactgtgcctggcctatacttatattttcttctgtgattttaatattttagtgtttatgttttggtctatgatccattttgagtaaatttttatatttggtataaggtaggggtccaactttatttatttttgagatggaggcttactctattgcccaggcaggcatgcaatggtgcgatccagctcactgcaacctctgtgtcccaggctcaagtgattctcccacctcagccatctgagtagctcggattacaggccccatcactatggtaatttttaaatttttagtagagacggggtttcaccatgttggccaggctggtctcgaactcatgacctcaagtgatctgcccgcctctgccctacaaagtgctgggattacaggcgtgagccaccgtgcctggcctccagctttattctttttttttttttttttttgagacagagtcttgttctgtcacccaggctggagtgctggagtgcagtggcgcgatctcggctcactgcaagctccgcctcctgggttcacgccattctcctgcctcagcctcccgagtagctgggactacaggcgcctgccaccacgcctggctaattttttgtatttttagtagagatggggtttctccatgttagccaggatggtctcgatctcctgacctcgtggtctgcctgcctcggcctcccaaaagtgctgggattacaggcgtgagcgaccatgcccggccaactttattcttttagatgtggatgtctagttgttccagaagtatctgttaaaaatgttactctttctccattggattattttggcaaccttataaacaatcaattgaccat

SEQ ID NO: 29351 - protein, 39 aa, Homo sapiens
MRKMEFHSCHPGWSAIERSWLTATSAPRVQAILLPQPLK

SEQ ID NO: 29352 - DNA, 973 bp, Homo sapiens
atgtaccgcgtgcccctgtgctctgcgcactgtgggtacagcagtgaaatcaaggaccgcacacgcgtgcccgcccggcgccctctagggtggaaggctgcgggcgtcctaccagtgccaggactgccagagcgggaggagcgcggcgcgggccagccgggactgctggacagcggggtccaggctagaggcgagcgagcggtcagtgacggctgtggaggagggaggcgctgggcgtcagcgcgggacccgagcctctggaccactgagctggggggctggctgagtcgcactgaggtgagggggctgcactcggccgagcagcgaggaccgtgcccagctcagagagagccctcagagtgtccgggctggattgcggccgcggtgcgggagaagtcggaggagggagtgacaggtgaccgggctggcagggcaactgccattattaagcactcggccgcccgggtccacctcctaacaaattattggaaggaatatgagaaaaaaatcgtttttatggaaaacattattatgccaaaaggcaccatctctgaaaacacaaactacaatcatcctcctgaggcagattccactgggactgcattcaacttagagcaaactgttaaacaaactgagacaaaatgggaatacaacagcatgggcactgacctgtcccccaagcccaaaagcttcaattacccattgctctcgtccccaggtgatcagtttgaaattcagctaacccagcagctatggtccctcatccccaatgaggatgtgagaaggttcatgtctcatgttatctggaccttgaaaatggaatgttcagaaacacatgtgcaagggacctgtgccaagctcatgtcacgaacaggcctcctgatgaagcttctcagcgagcagcaggaagcaaaggcatccaaggcagaatggtctgtagaccaatggaaaactgatgagactccatcttaaa

SEQ ID NO: 29353 - protein, 323 aa, Homo sapiens
MYRVPLCSAHCGYSSEIKDRTRVPARRPLGWKAAGVLPVPGLPEREERGAGQPGLLDSGVQARGERAVSDGCGGGRRWASARDPSLWTTELGGWLSRTEVRGLHSAEQRGPCPAQREPSECPGWIAAAVREKSEEGVTGDRAGRATAIIKHSAARVHLLTNYWKEYEKKIVFMENIIMPKGTISENTNYNHPPEADSTGTAFNLEQTVKQTETKWEYNSMGTDLSPKPKSFNYPLLSSPGDQFEIQLTQQLWSLIPNEDVRRFMSHVIWTLKMECSETHVQGTCAKLMSRTGLLMKLLSEQQEAKASKAEWSVDQWKTDETPS

SEQ ID NO: 29354 - DNA, 3156 bp, Homo sapiens
gaatggcgggagcaggcacggaaccggcttttcctccttcctgcagcgtgattggcccgcggctcagggaggcgaccaatgagtgctctcgcggagagcgacggggcaggccaatatggcttcctgcacctggtgacgcttggcgaaactgaggtctcatggagaagccccggagtattgaggagaccccatcttcagaaccaatggaggaagaggaagatgacgacttggagctgtttggtggctatgatagtttccggagttataacagcagtgtgggcagtgagagcagctcctatctggaggagtcaagtgaagcagaaaatgaggatcgggaagcaggggaactgccgacctccccgctgcatttgctcagccctgggactcctcgctccttggatggcagtggttctgagccagctgtctgtgagatgtgtggtatcgtgggtacaagggaagccttcttctccaagaccaagaggttctgcagcgtctcctgctccaggagctactcctccaactccaagaaagccagtatcttggctaggttacagggaaaaccaccgaccaaaaaagccaaagtcctgcacaaggctgcctggtctgccaaaattggagccttcctccactctcaagggacaggacagctggcagatgggacaccaacaggacaagacgctctggtcttgggcttcgactgggggaagttcctgaaggatcacagttacaaggctgctcccgtcagctgtttcaagcacgtcccactctatgaccagtgggaggatgtgatgaaagggatgaaggtggaggtgctcaacagtgatgctgtgctccccagccgggtgtactggatcgcctctgtcatccagacagcagggtatcgggtgctgcttcggtatgaaggctttgaaaatgacgccagccatgacttctggtgcaacctgggaacagtggatgtccaccccattggctggtgtgccatcaacagcaagatcctagtgcccccacggaccatccatgccaagttcaccgactggaagggctacctcatgaaacggctggtgggctccaggacgcttcccgtggatttccacatcaagatggtggagagcatgaagtacccctttaggcagggcatgcggctggaagtggtggacaagtcccaggtgtcacgcactcgcatggctgtggtggacacagtaatcgggggtcgcctacggctcctctacgaggatggtgacagtgacgacgacttctggtgccacatgtggagccccctgatccacccagtgggttggtcacgacgtgtgggccacggcatcaagatgtcagagaggcgaagtgacatggcccatcaccccaccttccggaagatctactgtgatgccgttccttacctcttcaagaaggtacgagcagtctacacagaaggcggttggtttgaggaagggatgaagctggaggccattgaccccctgaatctgggcaacatctgcgtggcaactgtctgtaaggttctcctggatggatacctgatgatctgtgtggacggggggccctccacagatggcttggactggttctgctaccatgcctcttcccacgccatcttcccggccaccttctgtcagaagaatgacattgagctcacaccgccaaaaggttatgaggcacagactttcaactgggagaactacttggagaagaccaagtcgaaagccgctccatcgagactctttaacatggattgcccaaaccatggcttcaaggtgggcatgaagctggaggccgtggacctgatggagccccggctcatctgtgtggccacggtgaaacgagtggtgcatcggctcctcagcatccactttgacggctgggacagcgagtacgaccagtgggtggactgcgagtccccagacatctaccccgtcggctggtgtgagctcaccggctaccagctccagcctcctgtggccgcaggtgtgggctctcgtggccctaagaggctctgactttctttcctcttcttttttccttcttcccccgcccctgtgcccatctccgttctttggcatgaggtggagatgtctcatggaccactttaagtagagagtgagccccgtcacccagcccctgctcctgacttctctgtctccctttccctctggcctgcagagctccttccttcatcttgcccactctgtcatatgttcgtgcccttgtgcacccaggtaaactacccaggtccctctgagcagccctggtaacaagggtgggaagaagggacagctgttctccggcccctcctccagccccgccctctcctcattgcccaggtttggcttcctgtcttggggtgtctcgtgtgggagggtggatggggtctcgggatgcgcctgtgccctgtgtcctcccagggaccctcttctcatctctttcacccttgtctttcaacaacagaaccggccacaccgctgaaggccaaagaggccacaaagaagaaaaagaaacagtttgggaagaaaaggaaaagaatcccgcccactaagacgcgacccctcagacaggggtccaagaagcccctgctggaggacgaccctcagggtgccaggaagatctcgtcggagcctgttcctggcgagatcattgctgtgcgtgtgaaggaagagcatctagacgtggcctcgcccgacaaggcttcaagtccagagctgcctgtctccgtcgagaacatcaagcaggaaacagacgactgagccttcctgcctccagcctggcttctagctggaagccagcccagcgtttctctaccaccaccaccatgcctccacctgactttggcttggagactgatcctctctgtgtaaattctgcccggtgctgtgaaggctggacggtggaggacctgctggggtctcctgggacccgcctgttgcttctgccctcccctgtggaaaggtctatatgacgggccgcctgaggccccagaactcgtctgtgaaccaccttttccagccagagttcccaaagctggaacgctagctgcctgctcttccttaagatggcctccccccgacccgccacggccctcagttgccagggatggggccaccactgtcacactgtggaatacaagacagtgaactctgtctgcct

SEQ ID NO: 29355 - protein, 617 aa, Homo sapiens
MEKPRSIEETPSSEPMEEEEDDDLELFGGYDSFRSYNSSVGSESSSYLEESSEAENEDREAGELPTSPLHLLSPGTPRSLDGSGSEPAVCEMCGIVGTREAFFSKTKRFCSVSCSRSYSSNSKKASILARLQGKPPTKKAKVLHKAAWSAKIGAFLHSQGTGQLADGTPTGQDALVLGFDWGKFLKDHSYKAAPVSCFKHVPLYDQWEDVMKGMKVEVLNSDAVLPSRVYWIASVIQTAGYRVLLRYEGFENDASHDFWCNLGTVDVHPIGWCAINSKILVPPRTIHAKFTDWKGYLMKRLVGSRTLPVDFHIKMVESMKYPFRQGMRLEVVDKSQVSRTRMAVVDTVIGGRLRLLYEDGDSDDDFWCHMWSPLIHPVGWSRRVGHGIKMSERRSDMAHHPTFRKIYCDAVPYLFKKVRAVYTEGGWFEEGMKLEAIDPLNLGNICVATVCKVLLDGYLMICVDGGPSTDGLDWFCYHASSHAIFPATFCQKNDIELTPPKGYEAQTFNWENYLEKTKSKAAPSRLFNMDCPNHGFKVGMKLEAVDLMEPRLICVATVKRVVHRLLSIHFDGWDSEYDQWVDCESPDIYPVGWCELTGYQLQPPVAAGVGSRGPKRL

SEQ ID NO: 29356 - DNA, 5993 bp, Homo sapiens
gaatggcgggagcaggcacggaaccggcttttcctccttcctgcagcgtgattggcccgcggctcagggaggcgaccaatgagtgctctcgcggagagcgacggggcaggccaatatggcttcctgcacctggtgacgcttggcgaaactgaggtctcatggagaagccccggagtattgaggagaccccatcttcagaaccaatggaggaagaggaagatgacgacttggagctgtttggtggctatgatagtttccggagttataacagcagtgtgggcagtgagagcagctcctatctggaggagtcaagtgaagcagaaaatgaggatcgggaagcaggggaactgccgacctccccgctgcatttgctcagccctgggactcctcgctccttggatggcagtggttctgagccagctgtctgtgagatgtgtggtatcgtgggtacaagggaagccttcttctccaagaccaagaggttctgcagcgtctcctgctccaggagctactcctccaactccaagaaagccagtatcttggctaggttacagggaaaaccaccgaccaaaaaagccaaagtcctgcacaaggctgcctggtctgccaaaattggagccttcctccactctcaagggacaggacagctggcagatgggacaccaacaggacaagacgctctggtcttgggcttcgactgggggaagttcctgaaggatcacagttacaaggctgctcccgtcagctgtttcaagcacgtgagtgccctggagctgagggagggaggccggggagccgggcctggagctgctcctccacctgcttcaccagggcggcttcaggctggacagtgacagtggggaggtctgggcaggagacggatggcgttaccactcgctccatttcatgtttatgtcaaaaaaatcctcctacaaacacttctatcacctgcttggcttcactcccggtctgaagcccttcagtttatttacatgatggaacttggtgctagctgatgtcgaagggtctttgcagtctgaaacccttctctcctttctcccccatttgcagcattttcccatggaaagcagggtgcttctgtagctggcctgggccccgtgggccccgagaggcagatgtggatgctcctggagccacttctgtaaaaggctcctcgatgcggatcatgtaaaagccagaacgaagggcaaggcccttaggggcggggcttgagcgcaagaaccgaatatccagcagctgtgacgtgtggagcctgcaggccgggagagcagagcccacaacagcactcttgttttgtcttcacaccacgtccctaagctccgggaaatccaggaggaggcctctttagtcttgaggaagtagggagtcttttacccagagtaagccacttcctctcctcctttcagaactgccactgaactctggggagtgccctgaacaatgacagctgcttcttgactcagctaactcactcctctcgtctctgaatggctaatgaaggtgcacctccttcctgctggagggggagcctcttttttgccctgaattctctaatagtttcagcattttcatttccagggagttgcatcatccttgtgtctaacacatataatccaatttgctttgtaaaaagcctgcccctgcgtgcctgggctagcgcaactgtgtccgggttctgtgatgaactaaactcaagtgaccagggagatggaatgggatacctcaactggctgaagccagggctgagaataaaaaaggtgaatttggccaggcgcagtggcttacccctataatcccagcactttgggaggccgaggcgggtggatcacctgaggtgaggagttcgagaccagcctggccaacatggtgaaaccccatctctactaaaaatacaaaaattagctggaagtggtggcaggcacctgtaatcccagctacttgggaggccgagacaggagaatcccttgaacctgagaggcggaggttgtaatgagctgagattgcgccactgcactccagcctgggtgacggagcaagactctaaaaaaagtgattctcccaaaggagaatcaaaagtaccattggcaggaaagtgaggattaggtactgggaaggcaactgaaacagtccagtgctgtcctggggcactttattttattttatttattttttcgatatgggagtttcactcttgttgcccagagctggagtgcaatggcactatctcagctcacagcagcctccccctcccaggttcaagcgattctcctgcctcagcctccggagtagctgggattacaggcatgtgccaccaccacgcccggctaattttgtatttttagtagagacatggattctccatgttggtcaggctggtctcgaactcccagcctcaggtgatccgcccgtctcggcctcccaaagtgctgggattacaggcgtgagccaccatgcctggccccctggagcatttcagtaggaggggaggtagagagtaaacttgcaggtggatggctgtgtgtaaacaagggggtcataatgcccacagcccaggtttgtatgatgattgaaggaaagtatatttgtgctaatatcagcgccctgccattgctcgggctggcacagggacgaagggatcgaggctcaccaaggcatcatgtgcccaaaatgatacagtaagaaaccagtcctataaagattttaggactcggttctgtctgactctgggtctctagccatcaccctgcatcccaccacctccacctctactcccggcttagctcttcaaggacaggagacctcatctctttatctctagtagctggttctgcacacagtgggtgatgtgaaaagttgaggtgcaaacgaggacttgactgaggccgtgaggcagtctgtctcccctgctagcacagttagctcactctctcggtacactctcatcgccacacaggtcccactctatgaccagtgggaggatgtgatgaaagggatgaaggtggaggtgctcaacagtgatgctgtgctccccagccgggtgtactggatcgcctctgtcatccagacagcagggtatcgggtgctgcttcggtatgaaggctttgaaaatgacgccagccatgacttctggtgcaacctgggaacagtggatgtccaccccattggctggtgtgccatcaacagcaagatcctagtgcccccacggaccatccatgccaagttcaccgactggaagggctacctcatgaaacggctggtgggctccaggacgcttcccgtggatttccacatcaagatggtggagagcatgaagtacccctttaggcagggcatgcggctggaagtggtggacaagtcccaggtgtcacgcactcgcatggctgtggtggacacagtaatcgggggtcgcctacggctcctctacgaggatggtgacagtgacgacgacttctggtgccacatgtggagccccctgatccacccagtgggttggtcacgacgtgtgggccacggcatcaagatgtcagagaggcgaagtgacatggcccatcaccccaccttccggaagatctactgtgatgccgttccttacctcttcaagaaggtacgagcagtctacacagaaggcggttggtttgaggaagggatgaagctggaggccattgaccccctgaatctgggcaacatctgcgtggcaactgtctgtaaggttctcctggatggatacctgatgatctgtgtggacggggggccctccacagatggcttggactggttctgctaccatgcctcttcccacgccatcttcccggccaccttctgtcagaagaatgacattgagctcacaccgccaaaaggttatgaggcacagactttcaactgggagaactacttggagaagaccaagtcgaaagccgctccatcgagactctttaacatggattgcccaaaccatggcttcaaggtgggcatgaagctggaggccgtggacctgatggagccccggctcatctgtgtggccacggtgaaacgagtggtgcatcggctcctcagcatccactttgacggctgggacagcgagtacgaccagtgggtggactgcgagtccccagacatctaccccgtcggctggtgtgagctcaccggctaccagctccagcctcctgtggccgcaggtgtgggctctcgtggccctaagaggctctgactttctttcctcttcttttttccttcttcccccgcccctgtgcccatctccgttctttggcatgaggtggagatgtctcatggaccactttaagtagagagtgagccccgtcacccagcccctgctcctgacttctctgtctccctttccctctggcctgcagagctccttccttcatcttgcccactctgtcatatgttcgtgcccttgtgcacccaggtaaactacccaggtccctctgagcagccctggtaacaagggtgggaagaagggacagctgttctccggcccctcctccagccccgccctctcctcattgcccaggtttggcttcctgtcttggggtgtctcgtgtgggagggtggatggggtctcgggatgcgcctgtgccctgtgtcctcccagggaccctcttctcatctctttcacccttgtctttcaacaacagaaccggccacaccgctgaaggccaaagaggccacaaagaagaaaaagaaacagtttgggaagaaaaggaaaagaatcccgcccactaagacgcgacccctcagacaggggtccaagaagcccctgctggaggacgaccctcagggtgccaggaagatctcgtcggagcctgttcctggcgagatcattgctgtgcgtgtgaaggaagagcatctagacgtggcctcgcccgacaaggcttcaagtccagagctgcctgtctccgtcgagaacatcaagcaggaaacagacgactgagccttcctgcctccagcctggcttctagctggaagccagcccagcgtttctctaccaccaccaccatgcctccacctgactttggcttggagactgatcctctctgtgtaaattctgcccggtgctgtgaaggctggacggtggaggacctgctggggtctcctgggacccgcctgttgcttctgccctcccctgtggaaaggtctatatgacgggccgcctgaggccccagaactcgtctgtgaaccaccttttccagccagagttcccaaagctggaacgctagctgcctgctcttccttaagatggcctccccccgacccgccacggccctcagttgccagggatggggccaccactgtcacactgtggaatacaagacagtgaactctgtctgcctgaacgagccatgtaaattaagttctagagcagctctctgagcaggataaggtcccctgacagtgagttgtgtggtgggggcagcctctgcctcaaaaattcaccaagcagaatgcctctcagcctcatgtgttggtcctctgctcctcctagctccccagggatgttggggacccagcttgtctcggcagctaagaagcagtgaccaggatgtggattttggcgacctgtgtggtggccttgagctgctttctgtgtttgtgaggactgactcccatttcctaaaggaaatgcccccggggaggacattgggaggaagatggcctgagtgtgcactttggctctgctacctgctcctgaagccccgctaaaaataattcatccaagattcctttgtagttaaagggtccagttctgactggagcctctagagagctgggcttgtatgttcttttggccttttgttcctacctaaatgaagaaaccatgcctggaggggccgtgaacacagaaccctcaagacaaggatgacagagctggaggacacatctagctgccattgcaacctcactgggctccccagactctgtgtgtgagaaattaaaccccctgcttgcttgag

SEQ ID NO: 29357 - protein, 407 aa, Homo sapiens
MKGMKVEVLNSDAVLPSRVYWIASVIQTAGYRVLLRYEGFENDASHDFWCNLGTVDVHPIGWCAINSKILVPPRTIHAKFTDWKGYLMKRLVGSRTLPVDFHIKMVESMKYPFRQGMRLEVVDKSQVSRTRMAVVDTVIGGRLRLLYEDGDSDDDFWCHMWSPLIHPVGWSRRVGHGIKMSERRSDMAHHPTFRKIYCDAVPYLFKKVRAVYTEGGWFEEGMKLEAIDPLNLGNICVATVCKVLLDGYLMICVDGGPSTDGLDWFCYHASSHAIFPATFCQKNDIELTPPKGYEAQTFNWENYLEKTKSKAAPSRLFNMDCPNHGFKVGMKLEAVDLMEPRLICVATVKRVVHRLLSIHFDGWDSEYDQWVDCESPDIYPVGWCELTGYQLQPPVAAGVGSRGPKRL

SEQ ID NO: 29358 - DNA, 3297 bp, Homo sapiens
gaatggcgggagcaggcacggaaccggcttttcctccttcctgcagcgtgattggcccgcggctcagggaggcgaccaatgagtgctctcgcggagagcgacggggcaggccaatatggcttcctgcacctggtgacgcttggcgaaactgaggtctcatggagaagccccggagtattgaggagaccccatcttcagaaccaatggaggaagaggaagatgacgacttggagctgtttggtggctatgatagtttccggagttataacagcagtgtgggcagtgagagcagctcctatctggaggagtcaagtgaagcagaaaatgaggatcgggaagcaggggaactgccgacctccccgctgcatttgctcagccctgggactcctcgctccttggatggcagtggttctgagccagctgtctgtgagatgtgtggtatcgtgggtacaagggaagccttcttctccaagaccaagaggttctgcagcgtctcctgctccaggagctactcctccaactccaagaaagccagtatcttggctaggttacagggaaaaccaccgaccaaaaaagccaaagtcctgcacaaggctgcctggtctgccaaaattggagccttcctccactctcaagggacaggacagctggcagatgggacaccaacaggacaagacgctctggtcttgggcttcgactgggggaagttcctgaaggatcacagttacaaggctgctcccgtcagctgtttcaagcacgtcccactctatgaccagtgggaggatgtgatgaaagggatgaaggtggaggtgctcaacagtgatgctgtgctccccagccgggtgtactggatcgcctctgtcatccagacagcagggtatcgggtgctgcttcggtatgaaggctttgaaaatgacgccagccatgacttctggtgcaacctgggaacagtggatgtccaccccattggctggtgtgccatcaacagcaagatcctagtgcccccacggaccatccatgccaagttcaccgactggaagggctacctcatgaaacggctggtgggctccaggacgcttcccgtggatttccacatcaagatggtggagagcatgaagtacccctttaggcagggcatgcggctggaagtggtggacaagtcccaggtgtcacgcactcgcatggctgtggtggacacagtaatcgggggtcgcctacggctcctctacgaggatggtgacagtgacgacgacttctggtgccacatgtggagccccctgatccacccagtgggttggtcacgacgtgtgggccacggcatcaagatgtcagagaggcgaagtgacatggcccatcaccccaccttccggaagatctactgtgatgccgttccttacctcttcaagaaggtacgagcagtctacacagaaggcggttggtttgaggaagggatgaagctggaggccattgaccccctgaatctgggcaacatctgcgtggcaactgtctgtaaggttctcctggatggatacctgatgatctgtgtggacggggggccctccacagatggcttggactggttctgctaccatgcctcttcccacgccatcttcccggccaccttctgtcagaagaatgacattgagctcacaccgccaaaaggttatgaggcacagactttcaactgggagaactacttggagaagaccaagtcgaaagccgctccatcgagactctttaacatggattgcccaaaccatggcttcaaggtgggcatgaagctggaggccgtggacctgatggagccccggctcatctgtgtggccacggtgaaacgagtggtgcatcggctcctcagcatccactttgacggctgggacagcgagtacgaccagtgggtggactgcgagtccccagacatctaccccgtcggctggtgtgagctcaccggctaccagctccagcctcctgtggccgcagaaccggccacaccgctgaaggccaaagaggccacaaagaagaaaaagaaacagtttgggaagaaaaggaaaagaatcccgcccactaagacgcgacccctcagacaggggtccaagaagcccctgctggaggacgaccctcagggtgccaggaagatctcgtcggagcctgttcctggcgagatcattgctgtgcgtgtgaaggaagagcatctagacgtggcctcgcccgacaaggcttcaagtccagagctgcctgtctccgtcgagaacatcaagcaggaaacagacgactgagccttcctgcctccagcctggcttctagctggaagccagcccagcgtttctctaccaccaccaccatgcctccacctgactttggcttggagactgatcctctctgtgtaaattctgcccggtgctgtgaaggctggacggtggaggacctgctggggtctcctgggacccgcctgttgcttctgccctcccctgtggaaaggtctatatgacgggccgcctgaggccccagaactcgtctgtgaaccaccttttccagccagagttcccaaagctggaacgctagctgcctgctcttccttaagatggcctccccccgacccgccacggccctcagttgccagggatggggccaccactgtcacactgtggaatacaagacagtgaactctgtctgcctgaacgagccatgtaaattaagttctagagcagctctctgagcaggataaggtcccctgacagtgagttgtgtggtgggggcagcctctgcctcaaaaattcaccaagcagaatgcctctcagcctcatgtgttggtcctctgctcctcctagctccccagggatgttggggacccagcttgtctcggcagctaagaagcagtgaccaggatgtggattttggcgacctgtgtggtggccttgagctgctttctgtgtttgtgaggactgactcccatttcctaaaggaaatgcccccggggaggacattgggaggaagatggcctgagtgtgcactttggctctgctacctgctcctgaagccccgctaaaaataattcatccaagattcctttgtagttaaagggtccagttctgactggagcctctagagagctgggcttgtatgttcttttggccttttgttcctacctaaatgaagaaaccatgcctggaggggccgtgaacacagaaccctcaagacaaggatgacagagctggaggacacatctagctgccattgcaacctcactgggctccccagactctgtgtgtgagaaattaaaccccctgcttgcttgag

SEQ ID NO: 29359 - protein, 705 aa, Homo sapiens; identical to SEQ ID NO: 4041

SEQ ID NO: 29360 - DNA, 3402 bp, Homo sapiens
gaatggcgggagcaggcacggaaccggcttttcctccttcctgcagcgtgattggcccgcggctcagggaggcgaccaatgagtgctctcgcggagagcgacggggcaggccaatatggcttcctgcacctggtgacgcttggcgaaactgaggtctcatggagaagccccggagtattgaggagaccccatcttcagaaccaatggaggaagaggaagatgacgacttggagctgtttggtggctatgatagtttccggagttataacagcagtgtgggcagtgagagcagctcctatctggaggagtcaagtgaagcagaaaatgaggatcgggaagcaggggaactgccgacctccccgctgcatttgctcagccctgggactcctcgctccttggatggcagtggttctgagccagctgtctgtgagatgtgtggtatcgtgggtacaagggaagccttcttctccaagaccaagaggttctgcagcgtctcctgctccaggagctactcctccaactccaagaaagccagtatcttggctaggttacagggaaaaccaccgaccaaaaaagccaaagtcctgcacaaggctgcctggtctgccaaaattggagccttcctccactctcaagggacaggacagctggcagatgggacaccaacaggacaagacgctctggtcttgggcttcgactgggggaagttcctgaaggatcacagttacaaggctgctcccgtcagctgtttcaagcacgtcccactctatgaccagtgggaggatgtgatgaaagggatgaaggtggaggtgctcaacagtgatgctgtgctccccagccgggtgtactggatcgcctctgtcatccagacagcagggtatcgggtgctgcttcggtatgaaggctttgaaaatgacgccagccatgacttctggtgcaacctgggaacagtggatgtccaccccattggctggtgtgccatcaacagcaagatcctagtgcccccacggaccatccatgccaagttcaccgactggaagggctacctcatgaaacggctggtgggctccaggacgcttcccgtggatttccacatcaagatggtggagagcatgaagtacccctttaggcagggcatgcggctggaagtggtggacaagtcccaggtgtcacgcactcgcatggctgtggtggacacagtaatcgggggtcgcctacggctcctctacgaggatggtgacagtgacgacgacttctggtgccacatgtggagccccctgatccacccagtgggttggtcacgacgtgtgggccacggcatcaagatgtcagagaggcgaagtgacatggcccatcaccccaccttccggaagatctactgtgatgccgttccttacctcttcaagaaggtacgagcagtctacacagaaggcggttggtttgaggaagggatgaagctggaggccattgaccccctgaatctgggcaacatctgcgtggcaactgtctgtaaggttctcctggatggatacctgatgatctgtgtggacggggggccctccacagatggcttggactggttctgctaccatgcctcttcccacgccatcttcccggccaccttctgtcagaagaatgacattgagctcacaccgccaaaaggttatgaggcacagactttcaactgggagaactacttggagaagaccaagtcgaaagccgctccatcgagactctttaacatggattgcccaaaccatggcttcaaggtgggcatgaagctggaggccgtggacctgatggagccccggctcatctgtgtggccacggtgaaacgagtggtgcatcggctcctcagcatccactttgacggctgggacagcgagtacgaccagtgggtggactgcgagtccccagacatctaccccgtcggctggtgtgagctcaccggctaccagctccagcctcctgtggccgcaggtaaactacccaggtccctctgagcagccctggtaacaagggtgggaagaagggacagctgttctccggcccctcctccagccccgccctctcctcattgcccagaaccggccacaccgctgaaggccaaagaggccacaaagaagaaaaagaaacagtttgggaagaaaaggaaaagaatcccgcccactaagacgcgacccctcagacaggggtccaagaagcccctgctggaggacgaccctcagggtgccaggaagatctcgtcggagcctgttcctggcgagatcattgctgtgcgtgtgaaggaagagcatctagacgtggcctcgcccgacaaggcttcaagtccagagctgcctgtctccgtcgagaacatcaagcaggaaacagacgactgagccttcctgcctccagcctggcttctagctggaagccagcccagcgtttctctaccaccaccaccatgcctccacctgactttggcttggagactgatcctctctgtgtaaattctgcccggtgctgtgaaggctggacggtggaggacctgctggggtctcctgggacccgcctgttgcttctgccctcccctgtggaaaggtctatatgacgggccgcctgaggccccagaactcgtctgtgaaccaccttttccagccagagttcccaaagctggaacgctagctgcctgctcttccttaagatggcctccccccgacccgccacggccctcagttgccagggatggggccaccactgtcacactgtggaatacaagacagtgaactctgtctgcctgaacgagccatgtaaattaagttctagagcagctctctgagcaggataaggtcccctgacagtgagttgtgtggtgggggcagcctctgcctcaaaaattcaccaagcagaatgcctctcagcctcatgtgttggtcctctgctcctcctagctccccagggatgttggggacccagcttgtctcggcagctaagaagcagtgaccaggatgtggattttggcgacctgtgtggtggccttgagctgctttctgtgtttgtgaggactgactcccatttcctaaaggaaatgcccccggggaggacattgggaggaagatggcctgagtgtgcactttggctctgctacctgctcctgaagccccgctaaaaataattcatccaagattcctttgtagttaaagggtccagttctgactggagcctctagagagctgggcttgtatgttcttttggccttttgttcctacctaaatgaagaaaccatgcctggaggggccgtgaacacagaaccctcaagacaaggatgacagagctggaggacacatctagctgccattgcaacctcactgggctccccagactctgtgtgtgagaaattaaaccccctgcttgcttgag

SEQ ID NO: 29361 - protein, 614 aa, Homo sapiens; identical to SEQ ID NO: 4039

SEQ ID NO: 29362 - DNA, 6253 bp, Homo sapiens
gaatggcgggagcaggcacggaaccggcttttcctccttcctgcagcgtgattggcccgcggctcagggaggcgaccaatgagtgctctcgcggagagcgacggggcaggccaatatggcttcctgcacctggtgacgcttggcgaaactgaggtctcatggagaagccccggagtattgaggagaccccatcttcagaaccaatggaggaagaggaagatgacgacttggagctgtttggtggctatgatagtttccggagttataacagcagtgtgggcagtgagagcagctcctatctggaggagtcaagtgaagcagaaaatgaggatcgggaagcaggggaactgccgacctccccgctgcatttgctcagccctgggactcctcgctccttggatggcagtggttctgagccagctgtctgtgagatgtgtggtatcgtgggtacaagggaagccttcttctccaagaccaagaggttctgcagcgtctcctgctccaggagctactcctccaactccaagaaagccagtatcttggctaggttacagggaaaaccaccgaccaaaaaagccaaagtcctgcacaaggctgcctggtctgccaaaattggagccttcctccactctcaagggacaggacagctggcagatgggacaccaacaggacaagacgctctggtcttgggcttcgactgggggaagttcctgaaggatcacagttacaaggctgctcccgtcagctgtttcaagcacgtgagtgccctggagctgagggagggaggccggggagccgggcctggagctgctcctccacctgcttcaccagggcggcttcaggctggacagtgacagtggggaggtctgggcaggagacggatggcgttaccactcgctccatttcatgtttatgtcaaaaaaatcctcctacaaacacttctatcacctgcttggcttcactcccggtctgaagcccttcagtttatttacatgatggaacttggtgctagctgatgtcgaagggtctttgcagtctgaaacccttctctcctttctcccccatttgcagcattttcccatggaaagcagggtgcttctgtagctggcctgggccccgtgggccccgagaggcagatgtggatgctcctggagccacttctgtaaaaggctcctcgatgcggatcatgtaaaagccagaacgaagggcaaggcccttaggggcggggcttgagcgcaagaaccgaatatccagcagctgtgacgtgtggagcctgcaggccgggagagcagagcccacaacagcactcttgttttgtcttcacaccacgtccctaagctccgggaaatccaggaggaggcctctttagtcttgaggaagtagggagtcttttacccagagtaagccacttcctctcctcctttcagaactgccactgaactctggggagtgccctgaacaatgacagctgcttcttgactcagctaactcactcctctcgtctctgaatggctaatgaaggtgcacctccttcctgctggagggggagcctcttttttgccctgaattctctaatagtttcagcattttcatttccagggagttgcatcatccttgtgtctaacacatataatccaatttgctttgtaaaaagcctgcccctgcgtgcctgggctagcgcaactgtgtccgggttctgtgatgaactaaactcaagtgaccagggagatggaatgggatacctcaactggctgaagccagggctgagaataaaaaaggtgaatttggccaggcgcagtggcttacccctataatcccagcactttgggaggccgaggcgggtggatcacctgaggtgaggagttcgagaccagcctggccaacatggtgaaaccccatctctactaaaaatacaaaaattagctggaagtggtggcaggcacctgtaatcccagctacttgggaggccgagacaggagaatcccttgaacctgagaggcggaggttgtaatgagctgagattgcgccactgcactccagcctgggtgacggagcaagactctaaaaaaagtgattctcccaaaggagaatcaaaagtaccattggcaggaaagtgaggattaggtactgggaaggcaactgaaacagtccagtgctgtcctggggcactttattttattttatttattttttcgatatgggagtttcactcttgttgcccagagctggagtgcaatggcactatctcagctcacagcagcctccccctcccaggttcaagcgattctcctgcctcagcctccggagtagctgggattacaggcatgtgccaccaccacgcccggctaattttgtatttttagtagagacatggattctccatgttggtcaggctggtctcgaactcccagcctcaggtgatccgcccgtctcggcctcccaaagtgctgggattacaggcgtgagccaccatgcctggccccctggagcatttcagtaggaggggaggtagagagtaaacttgcaggtggatggctgtgtgtaaacaagggggtcataatgcccacagcccaggtttgtatgatgattgaaggaaagtatatttgtgctaatatcagcgccctgccattgctcgggctggcacagggacgaagggatcgaggctcaccaaggcatcatgtgcccaaaatgatacagtaagaaaccagtcctataaagattttaggactcggttctgtctgactctgggtctctagccatcaccctgcatcccaccacctccacctctactcccggcttagctcttcaaggacaggagacctcatctctttatctctagtagctggttctgcacacagtgggtgatgtgaaaagttgaggtgcaaacgaggacttgactgaggccgtgaggcagtctgtctcccctgctagcacagttagctcactctctcggtacactctcatcgccacacaggtcccactctatgaccagtgggaggatgtgatgaaagggatgaaggtggaggtgctcaacagtgatgctgtgctccccagccgggtgtactggatcgcctctgtcatccagacagcagggtatcgggtgctgcttcggtatgaaggctttgaaaatgacgccagccatgacttctggtgcaacctgggaacagtggatgtccaccccattggctggtgtgccatcaacagcaagatcctagtgcccccacggaccatccatgccaagttcaccgactggaagggctacctcatgaaacggctggtgggctccaggacgcttcccgtggatttccacatcaagatggtggagagcatgaagtacccctttaggcagggcatgcggctggaagtggtggacaagtcccaggtgtcacgcactcgcatggctgtggtggacacagtaatcgggggtcgcctacggctcctctacgaggatggtgacagtgacgacgacttctggtgccacatgtggagccccctgatccacccagtgggttggtcacgacgtgtgggccacggcatcaagatgtcagagaggcgaagtgacatggcccatcaccccaccttccggaagatctactgtgatgccgttccttacctcttcaagaaggtacgagcagtctacacagaaggcggttggtttgaggaagggatgaagctggaggccattgaccccctgaatctgggcaacatctgcgtggcaactgtctgtaaggttctcctggatggatacctgatgatctgtgtggacggggggccctccacagatggcttggactggttctgctaccatgcctcttcccacgccatcttcccggccaccttctgtcagaagaatgacattgagctcacaccgccaaaaggttatgaggcacagactttcaactgggagaactacttggagaagaccaagtcgaaagccgctccatcgagactctttaacatggattgcccaaaccatggcttcaaggtgggcatgaagctggaggccgtggacctgatggagccccggctcatctgtgtggccacggtgaaacgagtggtgcatcggctcctcagcatccactttgacggctgggacagcgagtacgaccagtgggtggactgcgagtccccagacatctaccccgtcggctggtgtgagctcaccggctaccagctccagcctcctgtggccgcaggtgtgggctctcgtggccctaagaggctctgactttctttcctcttcttttttccttcttcccccgcccctgtgcccatctccgttctttggcatgaggtggagatgtctcatggaccactttaagtagagagtgagccccgtcacccagcccctgctcctgacttctctgtctccctttccctctggcctgcagagctccttccttcatcttgcccactctgtcatatgttcgtgcccttgtgcacccaggtaaactacccaggtccctctgagcagccctggtaacaagggtgggaagaagggacagctgttctccggcccctcctccagccccgccctctcctcattgcccaggtttggcttcctgtcttggggtgtctcgtgtgggagggtggatggggtctcgggatgcgcctgtgccctgtgtcctcccagggaccctcttctcatctctttcacccttgtctttcaacaacagaaccggccacaccgctgaaggccaaagaggccacaaagaagaaaaagaaacagtttgggaagaaaaggaaaagaatcccgcccactaagacgcgacccctcagacaggggtccaagaagcccctgctggaggacgaccctcagggtgccaggaagatctcgtcggagcctgttcctggcgagatcattgctgtgcgtgtgaaggaagagcatctagacgtggcctcgcccgacaaggcttcaagtccagagctgcctgtctccgtcgagaacatcaagcaggaaacagacgactgagccttcctgcctccagcctggcttctagctggaagccagcccagcgtttctctaccaccaccaccatgcctccacctgactttggcttggagactgatcctctctgtgtaaattctgcccggtgctgtgaaggctggacggtggaggacctgctggggtctcctgggacccgcctgttgcttctgccctcccctgtggaaaggtctatatgacgggccgcctgaggccccagaactcgtctgtgaaccaccttttccagccagagttcccaaagctggaacgctagctgcctgctcttccttaagatggcctccccccgacccgccacggccctcagttgccagggatggggccaccactgtcacactgtggaatacaagacagtgaactctgtctgcctgaacgagccatgtaaattaagttctagagcagctctctgagcaggataaggtcccctgacagtgagttgtgtggtgggggcagcctctgcctcaaaaattcaccaagcagaatgcctctcagcctcatgtgttggtcctctgctcctcctagctccccagggatgttggggacccagcttgtctcggcagctaagaagcagtgaccaggatgtggattttggcgacctgtgtggtggccttgagctgctttctgtgtttgtgaggactgactcccatttcctaaaggaaatgcccccggggaggacattgggaggaagatggcctgagtgtgcactttggctctgctacctgctcctgaagccccgctaaaaataattcatccaagattcctttgtagttaaagggtccagttctgactggagcctctagagagctgggcttgtatgttcttttggccttttgttcctacctaaatgaagaaaccatgcctggaggggccgtgaacacagaaccctcaagacaaggatgacagagctggaggacacatctagctgccattgcaacctcactgggctccccagactctgtgtgtgagaaattaaaccccctgcttgcttgagtcccgtttgttagatctctattccttgcagattgtgttctgaccccacccccccacctcgtggtatcgatcatgaaggccacgtgagtcaagacacgagtgtgcagggccgtaaagaaatgtcgcctgtcatcagctcaagttccctgtcttagccacatgctgtcattctttacggttgtgccattctccccaaagactgtgagttccccagagatggagcctgtgtccgcctgtgcgtagcacctggcataggctggc

SEQ ID NO: 29363 - protein, 407 aa, Homo sapiens; identical to SEQ ID NO: 29357

SEQ ID NO: 29364 - DNA, 3557 bp, Homo sapiens
gaatggcgggagcaggcacggaaccggcttttcctccttcctgcagcgtgattggcccgcggctcagggaggcgaccaatgagtgctctcgcggagagcgacggggcaggccaatatggcttcctgcacctggtgacgcttggcgaaactgaggtctcatggagaagccccggagtattgaggagaccccatcttcagaaccaatggaggaagaggaagatgacgacttggagctgtttggtggctatgatagtttccggagttataacagcagtgtgggcagtgagagcagctcctatctggaggagtcaagtgaagcagaaaatgaggatcgggaagcaggggaactgccgacctccccgctgcatttgctcagccctgggactcctcgctccttggatggcagtggttctgagccagctgtctgtgagatgtgtggtatcgtgggtacaagggaagccttcttctccaagaccaagaggttctgcagcgtctcctgctccaggagctactcctccaactccaagaaagccagtatcttggctaggttacagggaaaaccaccgaccaaaaaagccaaagtcctgcacaaggctgcctggtctgccaaaattggagccttcctccactctcaagggacaggacagctggcagatgggacaccaacaggacaagacgctctggtcttgggcttcgactgggggaagttcctgaaggatcacagttacaaggctgctcccgtcagctgtttcaagcacgtcccactctatgaccagtgggaggatgtgatgaaagggatgaaggtggaggtgctcaacagtgatgctgtgctccccagccgggtgtactggatcgcctctgtcatccagacagcagggtatcgggtgctgcttcggtatgaaggctttgaaaatgacgccagccatgacttctggtgcaacctgggaacagtggatgtccaccccattggctggtgtgccatcaacagcaagatcctagtgcccccacggaccatccatgccaagttcaccgactggaagggctacctcatgaaacggctggtgggctccaggacgcttcccgtggatttccacatcaagatggtggagagcatgaagtacccctttaggcagggcatgcggctggaagtggtggacaagtcccaggtgtcacgcactcgcatggctgtggtggacacagtaatcgggggtcgcctacggctcctctacgaggatggtgacagtgacgacgacttctggtgccacatgtggagccccctgatccacccagtgggttggtcacgacgtgtgggccacggcatcaagatgtcagagaggcgaagtgacatggcccatcaccccaccttccggaagatctactgtgatgccgttccttacctcttcaagaaggtacgagcagtctacacagaaggcggttggtttgaggaagggatgaagctggaggccattgaccccctgaatctgggcaacatctgcgtggcaactgtctgtaaggttctcctggatggatacctgatgatctgtgtggacggggggccctccacagatggcttggactggttctgctaccatgcctcttcccacgccatcttcccggccaccttctgtcagaagaatgacattgagctcacaccgccaaaaggttatgaggcacagactttcaactgggagaactacttggagaagaccaagtcgaaagccgctccatcgagactctttaacatggattgcccaaaccatggcttcaaggtgggcatgaagctggaggccgtggacctgatggagccccggctcatctgtgtggccacggtgaaacgagtggtgcatcggctcctcagcatccactttgacggctgggacagcgagtacgaccagtgggtggactgcgagtccccagacatctaccccgtcggctggtgtgagctcaccggctaccagctccagcctcctgtggccgcagaaccggccacaccgctgaaggccaaagaggccacaaagaagaaaaagaaacagtttgggaagaaaaggaaaagaatcccgcccactaagacgcgacccctcagacaggggtccaagaagcccctgctggaggacgaccctcagggtgccaggaagatctcgtcggagcctgttcctggcgagatcattgctgtgcgtgtgaaggaagagcatctagacgtggcctcgcccgacaaggcttcaagtccagagctgcctgtctccgtcgagaacatcaagcaggaaacagacgactgagccttcctgcctccagcctggcttctagctggaagccagcccagcgtttctctaccaccaccaccatgcctccacctgactttggcttggagactgatcctctctgtgtaaattctgcccggtgctgtgaaggctggacggtggaggacctgctggggtctcctgggacccgcctgttgcttctgccctcccctgtggaaaggtctatatgacgggccgcctgaggccccagaactcgtctgtgaaccaccttttccagccagagttcccaaagctggaacgctagctgcctgctcttccttaagatggcctccccccgacccgccacggccctcagttgccagggatggggccaccactgtcacactgtggaatacaagacagtgaactctgtctgcctgaacgagccatgtaaattaagttctagagcagctctctgagcaggataaggtcccctgacagtgagttgtgtggtgggggcagcctctgcctcaaaaattcaccaagcagaatgcctctcagcctcatgtgttggtcctctgctcctcctagctccccagggatgttggggacccagcttgtctcggcagctaagaagcagtgaccaggatgtggattttggcgacctgtgtggtggccttgagctgctttctgtgtttgtgaggactgactcccatttcctaaaggaaatgcccccggggaggacattgggaggaagatggcctgagtgtgcactttggctctgctacctgctcctgaagccccgctaaaaataattcatccaagattcctttgtagttaaagggtccagttctgactggagcctctagagagctgggcttgtatgttcttttggccttttgttcctacctaaatgaagaaaccatgcctggaggggccgtgaacacagaaccctcaagacaaggatgacagagctggaggacacatctagctgccattgcaacctcactgggctccccagactctgtgtgtgagaaattaaaccccctgcttgcttgagtcccgtttgttagatctctattccttgcagattgtgttctgaccccacccccccacctcgtggtatcgatcatgaaggccacgtgagtcaagacacgagtgtgcagggccgtaaagaaatgtcgcctgtcatcagctcaagttccctgtcttagccacatgctgtcattctttacggttgtgccattctccccaaagactgtgagttccccagagatggagcctgtgtccgcctgtgcgtagcacctggcataggctggc

SEQ ID NO: 29365 - protein, 705 aa, Homo sapiens; identical to SEQ ID NO: 4041

SEQ ID NO: 29366 - DNA, 480 bp, Homo sapiens
gcgacggggcaggccaatatggcttcctgcacctggtgacgcttggcgaaactgaggtctcatggagaagccccggagtattgagacggagtcttgctctgtcacctaggctggagtgcagtggcgcgatctcggctcactgcaacctccgtctcccgggttcaagcaattctgtctccatctcccatgttcctgggattacaggcataccccatcttcagaaccaatggaggaagaggaagatgacgacttggagctgtttggtggctatgatagtttccggagttataacagcagtgtgggcagtgagagcagctcctatctggaggagtcaagtgaagcagaaaatgaggatcgggaagcaggggaactgccgacctccccgctgcatttgctcagccctgggactcctcgctccttggatggcagtggttctgagccaggtgccttcagagtgtcccctgaggatggagaggagat

SEQ ID NO: 29367 - protein, 83 aa, Homo sapiens
MEEEEDDDLELFGGYDSFRSYNSSVGSESSSYLEESSEAENEDREAGELPTSPLHLLSPGTPRSLDGSGSEPGAFRVSPEDGE

SEQ ID NO: 29368 - DNA, 531 bp, Homo sapiens
aggccaatatggcttcctgcacctggtgacgcttggcgaaactgaggtctcatggagaagccccggagtattgagagatggggtgtggctgtgttgccaaggctggtctcaaactcctgggttcaagcaatccacctgcctcagcctcccaaagtgctgggattacagatgtgaaccaccgtacccaggctcttcacacgttttctgttacatgctgggagaccccatcttcagaaccaatggaggaagaggaagatgacgacttggagctgtttggtggctatgatagtttccggagttataacagcagtgtgggcagtgagagcagctcctatctggaggagtcaagtgaagcagaaaatgaggatcgggaagcaggggaactgccgacctccccgctgcatttgctcagccctgggactcctcgctccttggatggcagtggttctgagccaggtgccttcagagtgtcccctgaggatggagaggagatagaagattatagaggaagaggggggtggatataggcta

SEQ ID NO: 29369 - protein, 149 aa, Homo sapiens
MGCGCVAKAGLKLLGSSNPPASASQSAGITDVNHRTQALHTFSVTCWETPSSEPMEEEEDDDLELFGGYDSFRSYNSSVGSESSSYLEESSEAENEDREAGELPTSPLHLLSPGTPRSLDGSGSEPGAFRVSPEDGEEIEDYRGRGGWI

SEQ ID NO: 29370 - DNA, 1282 bp, Homo sapiens
ggcgaaactgaggtctcatggagaagccccggagtattgaggagaccccatcttcagaaccaatggaggaagaggaagatgacgacttggagctgtttggtggctatgatagtttccggagttataacagcagtgtgggcagtgagagcagctcctatctggaggagtcaagtgaagcagaaaatgaggatcgggaagcaggggaactgccgacctccccgctgcatttgctcagccctgggactcctcgctccttggatggcagtggttctgagccagctgtctgtgagatgtgtggtatcgtgggtacaagggaagccttcttcatgcctccacctgactttggcttggagactgatcctctctgtgtaaattctgcccggtgctgtgaaggctggacggtggaggacctgctggggtctcctgggacccgcctgttgcttctgccctcccctgtggaaaggtctatatgacgggccgcctgaggccccagaactcgtctgtgaaccaccttttccagccagagttcccaaagctggaacgctagctgcctgctcttccttaagatggcctccccccgacccgccacggccctcagttgccagggatggggccaccactgtcacactgtggaatacaagacagtgaactctgtctgcctgaacgagccatgtaaattaagttctagagcagctctctgagcaggataaggtcccctgacagtgagttgtgtggtgggggcagcctctgcctcaaaaattcaccaagcagaatgcctctcagcctcatgtgttggtcctctgctcctcctagctccccagggatgttggggacccagcttgtctcggcagctaagaagcagtgaccaggatgtggattttggcgacctgtgtggtggccttgagctgctttctgtgtttgtgaggactgactcccatttcctaaaggaaatgcccccggggaggacattgggaggaagatggcctgagtgtgcactttggctctgctacctgctcctgaagccccgctaaaaataattcatccaagattcctttgtagttaaagggtccagttctgactggagcctctagagagctgggcttgtatgttcttttggccttttgttcctacctaaatgaagaaaccatgcctggaggggccgtgaacacagaaccctcaagacaaggatgacagagctggaggacacatctagctgccattgcaacctcactgggctccccagactctgtgtgtgagaaattaaaccccctgcttgcttgag

SEQ ID NO: 29371 - protein, 151 aa, Homo sapiens
MEKPRSIEETPSSEPMEEEEDDDLELFGGYDSFRSYNSSVGSESSSYLEESSEAENEDREAGELPTSPLHLLSPGTPRSLDGSGSEPAVCEMCGIVGTREAFFMPPPDFGLETDPLCVNSARCCEGWTVEDLLGSPGTRLLLLPSPVERSI

SEQ ID NO: 29372 - DNA, 1542 bp, Homo sapiens
ggcgaaactgaggtctcatggagaagccccggagtattgaggagaccccatcttcagaaccaatggaggaagaggaagatgacgacttggagctgtttggtggctatgatagtttccggagttataacagcagtgtgggcagtgagagcagctcctatctggaggagtcaagtgaagcagaaaatgaggatcgggaagcaggggaactgccgacctccccgctgcatttgctcagccctgggactcctcgctccttggatggcagtggttctgagccagctgtctgtgagatgtgtggtatcgtgggtacaagggaagccttcttcatgcctccacctgactttggcttggagactgatcctctctgtgtaaattctgcccggtgctgtgaaggctggacggtggaggacctgctggggtctcctgggacccgcctgttgcttctgccctcccctgtggaaaggtctatatgacgggccgcctgaggccccagaactcgtctgtgaaccaccttttccagccagagttcccaaagctggaacgctagctgcctgctcttccttaagatggcctccccccgacccgccacggccctcagttgccagggatggggccaccactgtcacactgtggaatacaagacagtgaactctgtctgcctgaacgagccatgtaaattaagttctagagcagctctctgagcaggataaggtcccctgacagtgagttgtgtggtgggggcagcctctgcctcaaaaattcaccaagcagaatgcctctcagcctcatgtgttggtcctctgctcctcctagctccccagggatgttggggacccagcttgtctcggcagctaagaagcagtgaccaggatgtggattttggcgacctgtgtggtggccttgagctgctttctgtgtttgtgaggactgactcccatttcctaaaggaaatgcccccggggaggacattgggaggaagatggcctgagtgtgcactttggctctgctacctgctcctgaagccccgctaaaaataattcatccaagattcctttgtagttaaagggtccagttctgactggagcctctagagagctgggcttgtatgttcttttggccttttgttcctacctaaatgaagaaaccatgcctggaggggccgtgaacacagaaccctcaagacaaggatgacagagctggaggacacatctagctgccattgcaacctcactgggctccccagactctgtgtgtgagaaattaaaccccctgcttgcttgagtcccgtttgttagatctctattccttgcagattgtgttctgaccccacccccccacctcgtggtatcgatcatgaaggccacgtgagtcaagacacgagtgtgcagggccgtaaagaaatgtcgcctgtcatcagctcaagttccctgtcttagccacatgctgtcattctttacggttgtgccattctccccaaagactgtgagttccccagagatggagcctgtgtccgcctgtgcgtagcacctggcataggctggc

SEQ ID NO: 29373 - protein, 151 aa, Homo sapiens; identical to SEQ ID NO: 29371

SEQ ID NO: 29374 - DNA, 2500 bp, Homo sapiens
ccgcatcgaggagccttttacagaagtggctccaggagcatccacatctgcctctcggggcccacggggcccaggccagctacagaagcaccctgctttccatgggaaaatgctgcaaatgggggagaaaggagagaagggtttcagactgcaaagacccttcgacatcagctagcaccaagttccatcatgtaaataaactgaagggcttcagaccgggagtgaagccaagcaggtgatagaagtgtttgtaggaggatttttttgacataaacatgaaatggagcgagtggtaacgccatccgtctcctgcccagacctccccactgtcactgtccagcctgaagccgccctggtgaagcaggtggaggagcagctccaggcccggctccccggcctccctccctcagctccagggcactcacgtgcttgaaacagctgacgggagcagccttgtaactgtgatccttcaggaacttcccccagtcgaagcccaagaccagagctgcagagcagagaggacgagtcagactaggagcctgcgcagcagccactccaggagcctggaccccaagggccctgtgggacctgcagaggtgatcccaacatgcaggcaaatttgggaagcagtgttgcagatgctggtcccagctactgggaaacaaggtaagatgaggcccctgagatgaggttccagcctcaattccgccattctcctcctacagagccacactaggtatgtcattctacctccttggacctcagtatacttatcaataaatgtgtgggttcaacaccacatccaagaatctttccatctctaaagattctataaatatcagtaatttagaaaattggcaagactttctaggtagctgcctgtgacatggagtccgaggaggcatggtcttcctgaagccaccgtggctggtgaaccttgggcctgtttcccaacttcctttgaaaggatttataaaagtgtggggtgaagaccaagggtgtcagactcccccatagttcttgtttaaaatgtactgaatacaccagactctgggggatgatggtaggtaatggagcgtagcttcaggaacctataatttaaaaagctccacaaatggattctactgtcctctgaagtttgagaacataataaataccagctggccacaagcaaggaccttttcaaactttcctggccctggccttcagtcacttggtggttcctgtctcagcaccaaaggcaccgggaaggatccaagtgattgcctctcacctgtaacctagccaagatactggctttcttggagttggaggagtagctcctggagcaggagacgctgcagaacctcttggtcttggagaagaaggcttcccttgtacccacgataccacacatctcacagacagctgggaagagaacttagcacatgactcacccgatatgaccacctcaaagcaaacaaagtgatgggcccttcaaaacctggggcactgcattaaccaggtgagcccctgcccccacaaaggctaatggaataagaggaggaatgggaggtactggtgtgtatatcctgaatctacctgaatgaagtgctgctgcttggcctcccttggctacagatgtcaacagaggggctaatggaaatccatgaggacgactgggggaacaggggacactctgaaggcacctggctcagaaccactgccatccaaggagcgaggagtcccagggctgagcaaatgcagcggggaggtcggcagttcccctgcttcccgatcctcattttctgcttcacttgactcctccagataggagctgctctcactgcccacactgctgttataactccggaaactatcatagccaccaaacagctccaagtcgtcatcttcctcttcctccattggttctgaagatggggtctcctaatggaggatgacacaaaccaggtagaaagaattatgattggctttagtgcacggggggagaagctgcagatctgctatcagccccctcacactttcgggaacctttcaaataccccttttacaaacaccaagatcattacttctatttacacatttctccaccatgatgcaattcaacagcttaacaagacagaaaatatgtgttaggaattcaccaggctcctctgtggatttacaaatgatgatattttaacatggttcaaatagaatactgtataacaatgtgggccaggtgcggtggctcatgcctgtaatcctagcactttgggaggccgaggctggcagatcacctgaggtcaggagttcgagaccagcctggccaagagggtgaaaccctgtctctacaaaaaaatacaagaaaaaattagccaggcgtggtggcgggcacctgtagtccagctacttgggaggctggggcagagaattgcttgaacccaggaggcaaaggttgtagtgggccaagatcgtgccactgcactccagtctgcgtgacagagcaagactccatctc

SEQ ID NO: 29375 - protein, 59 aa, Homo sapiens
MSTEGLMEIHEDDWGNRGHSEGTWLRTTAIQGARSPRAEQMQRGGRQFPCFPILIFCFT

SEQ ID NO: 29376 - DNA, 1060 bp, Homo sapiens
tttaattagctgggtatggtggcacaggcctgtagtcccagctactcaggaggctaaggtaggaggatcacctgagcctgggaggtcaaggctgcagtgaactgtgatcaccccactgtactcaaacctgggtgacagagtgagaccctcttcaaaaaatctttttatttaaaaaaagattttaaaaagcagttacaaccacgactgcctggggcttggtttgagggaggtggtggtattacttcccattggagagaatctgagctcagggcacatagccaataagatgtgttgtcagagttggagtccaggctttctgtccccaaactggcacttttccctctgccacgctgcctgaccactgggtgagacctatcccataaagccttacctaaatacaaccctaatgctgggtttgaatccatttttattcaaagggaaaagaatcccgcccactaagacgcgacccctcagacaggggtccaagaagcccctgctggaggacgaccctcagggtgccaggaagatctcgtcggagcctgttcctggcgagatcattgctgtgcgtgtgaaggaagagcatctagacgtggcctcgcccgacaaggcttcaagtccagagctgcctgtctccgtcgagaacatcaagcaggaaacagacgactgagccttcctgcctccagcctggcttctagctggaagccagcccagcgtttctctaccaccaccaccatgcctccacctgactttggcttggagactgatcctctctgtgtaaattctgcccggtgctgtgaaggctggacggtggaggacctgctggggtctcctgggacccgcctgttgcttctgccctcccctgtggaaaggtctatatgacgggccgcctgaggccccagaactcgtctgtgaaccaccttttccagccagagttcccaaagctggaacgctagctgcctgctcttccttaagatggcctccccccgacccgccacggccctcagttgccagggatggggccaccactgtcacactgtggaatacaagacagtgaactctg

SEQ ID NO: 29377 - protein, 86 aa, Homo sapiens [sequence omitted]

SEQ ID NO: 29378 - DNA, 1688 bp, Homo sapiens
tttaattagctgggtatggtggcacaggcctgtagtcccagctactcaggaggctaaggtaggaggatcacctgagcctgggaggtcaaggctgcagtgaactgtgatcaccccactgtactcaaacctgggtgacagagtgagaccctcttcaaaaaatctttttatttaaaaaaagattttaaaaagcagttacaaccacgactgcctggggcttggtttgagggaggtggtggtattacttcccattggagagaatctgagctcagggcacatagccaataagatgtgttgtcagagttggagtccaggctttctgtccccaaactggcacttttccctctgccacgctgcctgaccactgggtgagacctatcccataaagccttacctaaatacaaccctaatgctgggtttgaatccatttttattcaaagggaaaagaatcccgcccactaagacgcgacccctcagacaggggtccaagaagcccctgctggaggacgaccctcagggtgccaggaagatctcgtcggagcctgttcctggcgagatcattgctgtgcgtgtgaaggaagagcatctagacgtggcctcgcccgacaaggcttcaagtccagagctgcctgtctccgtcgagaacatcaagcaggaaacagacgactgagccttcctgcctccagcctggcttctagctggaagccagcccagcgtttctctaccaccaccaccatgcctccacctgactttggcttggagactgatcctctctgtgtaaattctgcccggtgctgtgaaggctggacggtggaggacctgctggggtctcctgggacccgcctgttgcttctgccctcccctgtggaaaggtctatatgacgggccgcctgaggccccagaactcgtctgtgaaccaccttttccagccagagttcccaaagctggaacgctagctgcctgctcttccttaagatggcctccccccgacccgccacggccctcagttgccagggatggggccaccactgtcacactgtggaatacaagacagtgaactctgtctgcctgaacgagccatgtaaattaagttctagagcagctctctgagcaggataaggtcccctgacagtgagttgtgtggtgggggcagcctctgcctcaaaaattcaccaagcagaatgcctctcagcctcatgtgttggtcctctgctcctcctagctccccagggatgttggggacccagcttgtctcggcagctaagaagcagtgaccaggatgtggattttggcgacctgtgtggtggccttgagctgctttctgtgtttgtgaggactgactcccatttcctaaaggaaatgcccccggggaggacattgggaggaagatggcctgagtgtgcactttggctctgctacctgctcctgaagccccgctaaaaataattcatccaagattcctttgtagttaaagggtccagttctgactggagcctctagagagctgggcttgtatgttcttttggccttttgttcctacctaaatgaagaaaccatgcctggaggggccgtgaacacagaaccctcaagacaaggatgacagagctggaggacacatctagctgccattgcaacctcactgggctccccagactctgtgtgtgagaaattaaaccccctgcttgcttgag

SEQ ID NO: 29379 - protein, 86 aa, Homo sapiens [sequence omitted]

SEQ ID NO: 29380 - DNA, 1948 bp, Homo sapiens
tttaattagctgggtatggtggcacaggcctgtagtcccagctactcaggaggctaaggtaggaggatcacctgagcctgggaggtcaaggctgcagtgaactgtgatcaccccactgtactcaaacctgggtgacagagtgagaccctcttcaaaaaatctttttatttaaaaaaagattttaaaaagcagttacaaccacgactgcctggggcttggtttgagggaggtggtggtattacttcccattggagagaatctgagctcagggcacatagccaataagatgtgttgtcagagttggagtccaggctttctgtccccaaactggcacttttccctctgccacgctgcctgaccactgggtgagacctatcccataaagccttacctaaatacaaccctaatgctgggtttgaatccatttttattcaaagggaaaagaatcccgcccactaagacgcgacccctcagacaggggtccaagaagcccctgctggaggacgaccctcagggtgccaggaagatctcgtcggagcctgttcctggcgagatcattgctgtgcgtgtgaaggaagagcatctagacgtggcctcgcccgacaaggcttcaagtccagagctgcctgtctccgtcgagaacatcaagcaggaaacagacgactgagccttcctgcctccagcctggcttctagctggaagccagcccagcgtttctctaccaccaccaccatgcctccacctgactttggcttggagactgatcctctctgtgtaaattctgcccggtgctgtgaaggctggacggtggaggacctgctggggtctcctgggacccgcctgttgcttctgccctcccctgtggaaaggtctatatgacgggccgcctgaggccccagaactcgtctgtgaaccaccttttccagccagagttcccaaagctggaacgctagctgcctgctcttccttaagatggcctccccccgacccgccacggccctcagttgccagggatggggccaccactgtcacactgtggaatacaagacagtgaactctgtctgcctgaacgagccatgtaaattaagttctagagcagctctctgagcaggataaggtcccctgacagtgagttgtgtggtgggggcagcctctgcctcaaaaattcaccaagcagaatgcctctcagcctcatgtgttggtcctctgctcctcctagctccccagggatgttggggacccagcttgtctcggcagctaagaagcagtgaccaggatgtggattttggcgacctgtgtggtggccttgagctgctttctgtgtttgtgaggactgactcccatttcctaaaggaaatgcccccggggaggacattgggaggaagatggcctgagtgtgcactttggctctgctacctgctcctgaagccccgctaaaaataattcatccaagattcctttgtagttaaagggtccagttctgactggagcctctagagagctgggcttgtatgttcttttggccttttgttcctacctaaatgaagaaaccatgcctggaggggccgtgaacacagaaccctcaagacaaggatgacagagctggaggacacatctagctgccattgcaacctcactgggctccccagactctgtgtgtgagaaattaaaccccctgcttgcttgagtcccgtttgttagatctctattccttgcagattgtgttctgaccccacccccccacctcgtggtatcgatcatgaaggccacgtgagtcaagacacgagtgtgcagggccgtaaagaaatgtcgcctgtcatcagctcaagttccctgtcttagccacatgctgtcattctttacggttgtgccattctccccaaagactgtgagttccccagagatggagcctgtgtccgcctgtgcgtagcacctggcataggctggc

SEQ ID NO: 29381 - protein, 86 aa, Homo sapiens [sequence omitted]

SEQ ID NO: 29382 - DNA, 2536 bp, Homo sapiens
gacagcctgtccctgcgctgcgcctccaggctggaccagcagttccaggcggcatggaggggccccggagctccacccatgtccccttggtgctgccgcttcttgtacttctgctgctggccccggctaggcaggccgccgcccagcgctgcccacaggcctgcatctgtgacaactccaggcgacacgttgcctgccggtaccagaacctcactgaggtgccagacgccatccctgagctgacccagcggctggacctgcagggcaatttgctgaaggtgatccccgcagccgccttccagggcgtgcctcacctcacacacctggacctgcgccactgcgaggtggagctggtggccgagggcgccttccgtggcctgggccgcctgctcctgctcaacctggcctccaaccacctgcgtgagctgccccaggaggcgctggacgggctgggctcgttgcggcggctggagctggaggggaacgcactggaggagctgcggccggggacgttcggggcactgggtgcgctggccacgctaaacctggcccacaacgccctggtttacctgcccgccatggccttccaggggctactgcgcgtccgctggctgcggctgtcgcacaacgcgctcagcgtgctggcccccgaggccctggctggcctgcccgccctgagacggctcagcctacaccacaacgagctccaggctctgcccgggcctgtcttgtcccaggcccgcggcctggcccgtctggagctgggccacaacccgctcacctacgcgggcgaggaggacgggctggcgctgcccggcctgcgggagctgctgctggacggcggggccctgcaggccctgggtcccagggccttcgcacactgtccgcgcctgcacaccctcgacctccgcgggaaccagctagacaccctgcccccgctgcagggcccgggccagctgcgccggctgcggctgcaggggaatccgctgtggtgcggctgccaggcgcggcccctactcgagtggctggcgcgggcgcgcgtgcgctcggacggcgcgtgccaggggccgcggcgcctgcggggcgaggctctggacgccctgcggccctgggacctgcgctgccctggggacgcggcgcaggaagaggaagagctggaagagcgggctgtggccgggccccgcgcccctccgcgcggccctccgcgcggccccggggaggagcgggcagtcgcgccttgccctcgcgcctgcgtgtgcgtccccgagtcccggcacagcagctgcgagggctgcggcctgcaggcggtgccccgcggcttccccagcgacacccagctcctggacctgaggcggaaccacttcccctcggtgccccgagcggccttccccggcctgggccacctggtgtcgctgcacctgcagcactgcggcatcgcggagctggaagcgggcgccctggccgggctgggccgcctgatctacctgtacctctccgacaaccagctcgcaggcctcagcgctgctgcccttgaaggggctccccgcctcggctacctgtacctagaacgcaaccgtttcctgcaggtgccaggggctgccctgcgcgccctgcccagcctcttctccctgcacctgcaggacaacgctgtggaccgcctggcacctggggacctggggagaacacgggccttgcgctgggtctacctgagtggaaaccgcatcaccgaagtgtcccttggggcgctgggcccagctcgggagctggagaagctgcacctggacaggaatcagctgcgagaggtgcccactggggccttggaggggctgcctgccctcctggagctgcagctctcgggcaacccactcagggccttgcgtgacggagccttccagcctgtgggcaggtcgctgcagcacctcttcctgaacagcagtggcctggagcagatttgtcctggggccttttcaggcctggggcccgggctccagagcctgcacctgcagaagaaccagcttcgggccctgcctgccctgcccagtctcagccagctggagctcatcgacctcagcagcaatcccttccactgtgactgccagctgcttccgctgcacaggtggcttactgggctgaacctgcgggtgggggccacctgcgccacccctcccaatgcccgtggccagagggtgaaggctgcagctgctgtctttgaagactgcccgggctgggctgccagaaaggccaagcggacaccagcctccaggcccagtgccaggagaacccccatcaaaggaagacagtgtggagcagataaggtggggaaggagaagggtcgtctctgagcacggagcaggctggtcctgccttgacccagcccggtggctcttactctcgccaggaacaggctccgacgagatcttcctggcaccctgagggtcgtcctccagcaggggcttcttggacccctgtctgaggggtcgcgtcttagtgggcgggattcttttccctttgaataaaaatggattcaaacccagca

SEQ ID NO: 29383 - protein, 762 aa, Homo sapiens
MEGPRSSTHVPLVLPLLVLLLLAPARQAAAQRCPQACICDNSRRHVACRYQNLTEVPDAIPELTQRLDLQGNLLKVIPAAAFQGVPHLTHLDLRHCEVELVAEGAFRGLGRLLLLNLASNHLRELPQEALDGLGSLRRLELEGNALEELRPGTFGALGALATLNLAHNALVYLPAMAFQGLLRVRWLRLSHNALSVLAPEALAGLPALRRLSLHHNELQALPGPVLSQARGLARLELGHNPLTYAGEEDGLALPGLRELLLDGGALQALGPRAFAHCPRLHTLDLRGNQLDTLPPLQGPGQLRRLRLQGNPLWCGCQARPLLEWLARARVRSDGACQGPRRLRGEALDALRPWDLRCPGDAAQEEEELEERAVAGPRAPPRGPPRGPGEERAVAPCPRACVCVPESRHSSCEGCGLQAVPRGFPSDTQLLDLRRNHFPSVPRAAFPGLGHLVSLHLQHCGIAELEAGALAGLGRLIYLYLSDNQLAGLSAAALEGAPRLGYLYLERNRFLQVPGAALRALPSLFSLHLQDNAVDRLAPGDLGRTRALRWVYLSGNRITEVSLGALGPARELEKLHLDRNQLREVPTGALEGLPALLELQLSGNPLRALRDGAFQPVGRSLQHLFLNSSGLEQICPGAFSGLGPGLQSLHLQKNQLRALPALPSLSQLELIDLSSNPFHCDCQLLPLHRWLTGLNLRVGATCATPPNARGQRVKAAAAVFEDCPGWAARKAKRTPASRPSARRTPIKGRQCGADKVGKEKGRL

SEQ ID NO: 29384 - DNA, 3057 bp, Homo sapiens
atggtgcaaggggggattcagagcagctcagtggcctcaggtaagtctctgccccctctgggcctctcagaggctggcgggcaggggctctggggacttcctggggttctccaggaagggggtctcccaaggccccggagctccacccatgtccccttggtgctgccgcttcttgtacttctgctgctggccccggctaggcaggccgccgcccagcgctgcccacaggcctgcatctgtgacaactccaggcgacacgttgcctgccggtaccagaacctcactgaggtgccagacgccatccctgagctgacccagcggctggacctgcagggcaatttgctgaaggtgatccccgcagccgccttccagggcgtgcctcacctcacacacctggacctgcgccactgcgaggtggagctggtggccgagggcgccttccgtggcctgggccgcctgctcctgctcaacctggcctccaaccacctgcgtgagctgccccaggaggcgctggacgggctgggctcgttgcggcggctggagctggaggggaacgcactggaggagctgcggccggggacgttcggggcactgggtgcgctggccacgctaaacctggcccacaacgccctggtttacctgcccgccatggccttccaggggctactgcgcgtccgctggctgcggctgtcgcacaacgcgctcagcgtgctggcccccgaggccctggctggcctgcccgccctgagacggctcagcctacaccacaacgagctccaggctctgcccgggcctgtcttgtcccaggcccgcggcctggcccgtctggagctgggccacaacccgctcacctacgcgggcgaggaggacgggctggcgctgcccggcctgcgggagctgctgctggacggcggggccctgcaggccctgggtcccagggccttcgcacactgtccgcgcctgcacaccctcgacctccgcgggaaccagctagacaccctgcccccgctgcagggcccgggccagctgcgccggctgcggctgcaggggaatccgctgtggtgcggctgccaggcgcggcccctactcgagtggctggcgcgggcgcgcgtgcgctcggacggcgcgtgccaggggccgcggcgcctgcggggcgaggctctggacgccctgcggccctgggacctgcgctgccctggggacgcggcgcaggaagaggaagagctggaagagcgggctgtggccgggccccgcgcccctccgcgcggccctccgcgcggccccggggaggagcgggcagtcgcgccttgccctcgcgcctgcgtgtgcgtccccgagtcccggcacagcagctgcgagggctgcggcctgcaggcggtgccccgcggcttccccagcgacacccagctcctggacctgaggcggaaccacttcccctcggtgccccgagcggccttccccggcctgggccacctggtgtcgctgcacctgcagcactgcggcatcgcggagctggaagcgggcgccctggccgggctgggccgcctgatctacctgtacctctccgacaaccagctcgcaggcctcagcgctgctgcccttgaaggggctccccgcctcggctacctgtacctagaacgcaaccgtttcctgcaggtgccaggggctgccctgcgcgccctgcccagcctcttctccctgcacctgcaggacaacgctgtggaccgcctggcacctggggacctggggagaacacgggccttgcgctgggtctacctgagtggaaaccgcatcaccgaagtgtcccttggggcgctgggcccagctcgggagctggagaagctgcacctggacaggaatcagctgcgagaggtgcccactggggccttggaggggctgcctgccctcctggagctgcagctctcgggcaacccactcagggccttgcgtgacggagccttccagcctgtgggcaggtcgctgcagcacctcttcctgaacagcagtggcctggagcagatttgtcctggggccttttcaggcctggggcccgggctccagagcctgcacctgcagaagaaccagcttcgggccctgcctgccctgcccagtctcagccagctggagctcatcgacctcagcagcaatcccttccactgtgactgccagctgcttccgctgcacaggtggcttactgggctgaacctgcgggtgggggccacctgcgccacccctcccaatgcccgtggccagagggtgaaggctgcagctgctgtctttgaagactgcccgggctgggctgccagaaaggccaagcggacaccagcctccaggcccagtgccaggagaacccccatcaaaggaagacagtgtggagcagataaggaaatgggagtcagtcctcacaaacacagaaagcagctcaaggccaccacacaggtcgccaaaatccacatcctggtcactgcttcttagctgccgagacaagctgggtccccaacatccctggggagctaggaggagcagaggaccaacacatgaggctgagaggcattctgcttggtgaatttttgaggcagaggctgcccccaccacacaactcactgtcaggggaccttatcctgctcagagagctgctctagaacttaatttacatggctcgttcaggcagacagagttcactgtcttgtattccacagtgtgacagtggtggccccatccctggcaactgagggccgtggcgggtcggggggaggccatcttaaggaagagcaggcagctagcgttccagctttgggaactctggctggaaaaggtggttcacagacgagttctggggcctcaggcggcccgtcatatagacctttccacaggggagggcagaagcaacaggcgggtcccaggagaccccagcaggtcctccaccgtccagccttcacagcaccgggcagaatttacacagagaggatcagtctccaagccaaagtcaggtggaggcatggtggtggtggtagagaaacgctgggctggcttccagctagaagccaggctggaggc

SEQ ID NO: 29385 - protein, 824 aa, Homo sapiens
MVQGGIQSSSVASGKSLPPLGLSEAGGQGLWGLPGVLQEGGLPRPRSSTHVPLVLPLLVLLLLAPARQAAAQRCPQACICDNSRRHVACRYQNLTEVPDAIPELTQRLDLQGNLLKVIPAAAFQGVPHLTHLDLRHCEVELVAEGAFRGLGRLLLLNLASNHLRELPQEALDGLGSLRRLELEGNALEELRPGTFGALGALATLNLAHNALVYLPAMAFQGLLRVRWLRLSHNALSVLAPEALAGLPALRRLSLHHNELQALPGPVLSQARGLARLELGHNPLTYAGEEDGLALPGLRELLLDGGALQALGPRAFAHCPRLHTLDLRGNQLDTLPPLQGPGQLRRLRLQGNPLWCGCQARPLLEWLARARVRSDGACQGPRRLRGEALDALRPWDLRCPGDAAQEEEELEERAVAGPRAPPRGPPRGPGEERAVAPCPRACVCVPESRHSSCEGCGLQAVPRGFPSDTQLLDLRRNHFPSVPRAAFPGLGHLVSLHLQHCGIAELEAGALAGLGRLIYLYLSDNQLAGLSAAALEGAPRLGYLYLERNRFLQVPGAALRALPSLFSLHLQDNAVDRLAPGDLGRTRALRWVYLSGNRITEVSLGALGPARELEKLHLDRNQLREVPTGALEGLPALLELQLSGNPLRALRDGAFQPVGRSLQHLFLNSSGLEQICPGAFSGLGPGLQSLHLQKNQLRALPALPSLSQLELIDLSSNPFHCDCQLLPLHRWLTGLNLRVGATCATPPNARGQRVKAAAAVFEDCPGWAARKAKRTPASRPSARRTPIKGRQCGADKEMGVSPHKHRKQLKATTQVAKIHILVTAS

SEQ ID NO: 29386 - DNA, 2014 bp, Homo sapiens
gtctcaaaaaaaaaagaaaaagaaaaagaaaaaaagcaaccaaaaaaacaatggctagccatttacttatgatccagattggactctagtgggccagtcctatgtggccactggcagccagtaaggattccctggcctatgtctgctggaagggcccttggagagcctggctgagggggccttcattctggccagctctgggctgtgtggcgttgggtgcctggctctctgagcctctcgcacctcccatccccacccacggtgtgcagaaggcagagggctaatgtctctcttgctgagtcgttgtgcaaattaacaaaaatgagtctggcaccaaaatggcccccacacttggaaaacaggccaagaggcatccaccgacctgctgacccctctttccccgcaggcccaacagcgccctggaatcctgctccttcgcccgccacagtctgctgcagacgctgtacaaggtctagactcaaagcctctcccatcccttggcctggaccagtgagctggggagggactcggatgaactgaggcgcagcctacgccattgccttggacaggactctggccacaggcagggcgggtctgtgtcccatgtgtcctgtcagtcccctgagtatgtgtgtgggtgtggcgcatgtgcaggtctgtgcctcctgtcgggatttgggttttaacgtcttctgctggcccagccctgctctgttgtggggagttggcccccaggggaaagggctgtgagctgctccgccattaaactcacctccacctgagggcgctctgctgatctccgcctgggccctgatggccgtccccacccacctgccttccggcccggctccctggcggagccagaacccagggagttgcccgcgtgctgtccttcccctctgtgttgtgattgggttgtttcctgccctgcctggggctgcttctcgtcaccaagctgttctccagtctggggagggagaggcagggtccccaatgtccgagctgcatctggacgctgctcttaaaggacctcctggggcaggggagcggtagggtctggactgggcagatgctgtatgacctccctgagcacccgtgactgccccatgctttcccctttgtgctctgtgtgtgtctgggctgtgcccgggggcttcacaaataaagtcgtgtggcagcttcagagactcagaaactctcactgaaagcgggatagtctcgggggccgttgtacgtggagtcccacctcggcagagcatgcggccccgcagcagtctgtggggcagtcagccctgcagaagggcccggcctcggcctcaggccactacctgggaagtggcagtcctgagtgggggcccattttcctgcctggccacacctcacccagcaccctgcctttgggctgcagctcgcttggcttctgcgttgctccttcactatggaagccacctcccttgggatcctttgctccactgccacatatgtgaggacagcccagccaaccttccttacctcctaccctacaccatgtatgtgctttgggagcccatgtcccccacaaacggcctccaagaagtccctccaaggtttcttagagggcaatattttctcattggcagtcggccacgtaggtgaccaggtggcagaggatactgctggccctgtcccctgtcttctgtgtgagttgatacggtagggggtgggtgtggggctggcattaagttctgatgccagctacaacgtggatgaactttgaaaacatgttaaatgaaataagccagacacaaaaggacaaatatgattccatttagatgaggcatctagaataagcaaattcagagacaagaaggtagaggttgccagggctaggggaagggtggaatagggagtgaggctgcaaacagattctctgggatgatgaagatgttctggaaatggagagtggtgatggttgcataacattgtgaatgtacttaatgcactgaattgtacacataaaaatggttaaaatgat

SEQ ID NO: 29387 - protein, 79 aa, Homo sapiens
MAVPTHLPSGPAPWRSQNPGSCPRAVLPLCVVIGLFPALPGAASRHQAVLQSGEGEAGSPMSELHLDAALKGPPGAGER

SEQ ID NO: 29388 - DNA, 2368 bp, Homo sapiens
ggtccggaattctccagagcctctgtgcccctacttcccaggagccagctcccgtgctgtcctccccacctcctgcagacgtctccaccttcctggcttttccctctccagagaagctgctgcgcctagggcccaagagctccgtgctgatagcccagcagactgacacgtctgaccccgagaaggtggtctctgccttcctaaaggtgtcatctgtgttcaaggacgaagctactgtgaggatggcagtgcaggatgcagtagatgccctgatgcagaaggctttcaactcctcgtccttcaactccaacaccttcctcaccaggctgctcgtgcacatgggtctgctcaagagtgaagacaaggtcaaggccattgccaacctgtacggccccctgatggcgctgaaccacatggtgcagcaggactatttccccaaggcccttgcacccctgctgctggcgttcgtgaccaagcccaacagcgccctggaatcctgctccttcgcccgccacagtctgctgcagacgctgtacaaggtctagactcaaagcctctcccatcccttggcctggaccagtgagctggggagggactcggatgaactgaggcgcagcctacgccattgccttggacaggactctggccacaggcagggcgggtctgtgtcccatgtgtcctgtcagtcccctgagtatgtgtgtgggtgtggcgcatgtgcaggtctgtgcctcctgtcgggatttgggttttaacgtcttctgctggcccagccctgctctgttgtggggagttggcccccaggggaaagggctgtgagctgctccgccattaaactcacctccacctgagggcgctctgctgatctccgcctgggccctgatggccgtccccacccacctgccttccggcccggctccctggcggagccagaacccagggagttgcccgcgtgctgtccttcccctctgtgttgtgattgggttgtttcctgccctgcctggggctgcttctcgtcaccaagccctggtcctgcggcagctgtcacccctaccatccataccactgtgctgaccgctcagcctgaagagcagagaatgccatgggtgggactgtgggggtcggatcgtggggttgttggcagagggcaaccctgggccccacaccgtgtggacaggcagacaccagattgtccaggagcaggagctgctgggactgcgctggccccggacctagtgggccttctcctggctgctgagatgtcgtctgtgactggcctggctggagggggagtgttgacaacccaaagctgttctccagtctggggagggagaggcagggtccccaatgtccgagctgcatctggacgctgctcttaaaggacctcctggggcaggggagcggtagggtctggactgggcagatgctgtatgacctccctgagcacccgtgactgccccatgctttcccctttgtgctctgtgtgtgtctgggctgtgcccgggggcttcacaaataaagtcgtgtggcagcttcagagactcagaaactctcactgaaagcgggatagtctcgggggccgttgtacgtggagtcccacctcggcagagcatgcggccccgcagcagtctgtggggcagtcagccctgcagaagggcccggcctcggcctcaggccactacctgggaagtggcagtcctgagtgggggcccattttcctgcctggccacacctcacccagcaccctgcctttgggctgcagctcgcttggcttctgcgttgctccttcactatggaagccacctcccttgggatcctttgctccactgccacatatgtgaggacagcccagccaaccttccttacctcctaccctacaccatgtatgtgctttgggagcccatgtcccccacaaacggcctccaagaagtccctccaaggtttcttagagggcaatattttctcattggcagtcggccacgtaggtgaccaggtggcagaggatactgctggccctgtcccctgtcttctgtgtgagttgatacggtagggggtgggtgtggggctggcattaagttctgatgccagctacaacgtggatgaactttgaaaacatgttaaatgaaataagccagacacaaaaggacaaatatgattccatttagatgaggcatctagaataagcaaattcagagacaagaaggtagaggttgccagggctaggggaagggtggaatagggagtgaggctgcaaacagattctctgggatgatgaagatgttctggaaatggagagtggtgatggttgcataacattgtgaatgtacttaatgcactgaattgtacacataaaaatggttaaaatgat

SEQ ID NO: 29389 - protein, 100 aa, Homo sapiens
MAVQDAVDALMQKAFNSSSFNSNTFLTRLLVHMGLLKSEDKVKAIANLYGPLMALNHMVQQDYFPKALAPLLLAFVTKPNSALESCSFARHSLLQTLYKV

SEQ ID NO: 29390 - DNA, 2420 bp, Homo sapiens
cagtgatgacgaggacgaggaggaggaggaggaaggagaagaggaagaagaggaagcagaagaagaggaggaggaagatgaggaagaggaggaagaagaggaggaggaggaggaagaagagcctcagcagcgagggcagggagagaagtcagccacgccctcacgaagctgctgcgcctagggcccaagagctccgtgctgatagcccagcagactgacacgtctgaccccgagaaggtggtctctgccttcctaaaggtgtcatctgtgttcaaggacgaagctactgtgaggatggcagtgcaggatgcagtagatgccctgatgcagaaggctttcaactcctcgtccttcaactccaacaccttcctcaccaggctgctcgtgcacatgggtctgctcaagagtgaagacaaggtcaaggccattgccaacctgtacggccccctgatggcgctgaaccacatggtgcagcaggactatttccccaaggcccttgcacccctgctgctggcgttcgtgaccaagcccaacagcgccctggaatcctgctccttcgcccgccacagtctgctgcagacgctgtacaaggtctagactcaaagcctctcccatcccttggcctggaccagtgagctggggagggactcggatgaactgaggcgcagcctacgccattgccttggacaggactctggccacaggcagggcgggtctgtgtcccatgtgtcctgtcagtcccctgagtatgtgtgtgggtgtggcgcatgtgcaggtctgtgcctcctgtcgggatttgggttttaacgtcttctgctggcccagccctgctctgttgtggggagttggcccccaggggaaagggctgtgagctgctccgccattaaactcacctccacctgagggcgctctgctgatctccgcctgggccctgatggccgtccccacccacctgccttccggcccggctccctggcggagccagaacccagggagttgcccgcgtgctgtccttcccctctgtgttgtgattgggttgtttcctgccctgcctggggctgcttctcgtcaccaagccctggtcctgcggcagctgtcacccctaccatccataccactgtgctgaccgctcagcctgaagagcagagaatgccatgggtgggactgtgggggtcggatcgtggggttgttggcagagggcaaccctgggccccacaccgtgtggacaggcagacaccagattgtccaggagcaggagctgctgggactgcgctggccccggacctagtgggccttctcctggctgctgagatgtcgtctgtgactggcctggctggagggggagtgttgacaacccaaagctgttctccagtctggggagggagaggcagggtccccaatgtccgagctgcatctggacgctgctcttaaaggacctcctggggcaggggagcggtagggtctggactgggcagatgctgtatgacctccctgagcacccgtgactgccccatgctttcccctttgtgctctgtgtgtgtctgggctgtgcccgggggcttcacaaataaagtcgtgtggcagcttcagagactcagaaactctcactgaaagcgggatagtctcgggggccgttgtacgtggagtcccacctcggcagagcatgcggccccgcagcagtctgtggggcagtcagccctgcagaagggcccggcctcggcctcaggccactacctgggaagtggcagtcctgagtgggggcccattttcctgcctggccacacctcacccagcaccctgcctttgggctgcagctcgcttggcttctgcgttgctccttcactatggaagccacctcccttgggatcctttgctccactgccacatatgtgaggacagcccagccaaccttccttacctcctaccctacaccatgtatgtgctttgggagcccatgtcccccacaaacggcctccaagaagtccctccaaggtttcttagagggcaatattttctcattggcagtcggccacgtaggtgaccaggtggcagaggatactgctggccctgtcccctgtcttctgtgtgagttgatacggtagggggtgggtgtggggctggcattaagttctgatgccagctacaacgtggatgaactttgaaaacatgttaaatgaaataagccagacacaaaaggacaaatatgattccatttagatgaggcatctagaataagcaaattcagagacaagaaggtagaggttgccagggctaggggaagggtggaatagggagtgaggctgcaaacagattctctgggatgatgaagatgttctggaaatggagagtggtgatggttgcataacattgtgaatgtacttaatgcactgaattgtacacataaaaatggttaaaatgat

SEQ ID NO: 29391 - protein, 100 aa, Homo sapiens; identical to SEQ ID NO: 29389

SEQ ID NO: 29392 - DNA, 5057 bp, Homo sapiens
ccctgtctctactaaaaatacaaaaaaattagctggacatggtggtgggtgcctgtaatcccagctactcaggaggctgaggcaggagaatgacatgaaccttggaggcggagcttgcagtgagcccagatggcgccactgtgctccagcctgggcgactgagcgagactccgtctcaaaaaaaaaaaattctttcatttatttagttacttttagagatagagcctcccgctgttgcccaggctggagtgcagtggcagtcatagcttactgcagctttgaactcctgggctcaaatgatcctcctgcctcagcctctccagtagctgggactgactacaggcacgtgccaccacacccagctaatttttatttttatttttatttttttgagacagggttttactctgtcacccaggctagagtgcagtggtgagatcatggctcactgtagcctctgtctccggggctcaatcaatcctcccacctcagcctccccagtggctgggattactggtgcacaccaccataccctgctaattgtatttatttttagtagagatgggattttgccatgttgcccagactggtcttgagctgctgggctcaagcgatcttcccatcacagcttcccaatgtgctgggattacaggtgtgagccactgtacctggccagctttacttcttttaccagcactcctgattttataaatagtgaggcttatcaaccccatttctacccaaatcttctggtagacttgagtatagtagggcttcataggtagcagccctgtccctgtcctattatgatggtagctgttgtgatgtggcgatctctgatctagaaacccctgaggggccattgtggcctgcccagtctcccggccacggttgaaaccagacgtgcagtggggctgacccctgtgccccaccccagagtcatgccagcgtgggtggtggggcattctctgggatgaatgatctggatcccatagccatctgtgtcctgtttgaggaatgggaccctcaaacagagaacagccaagatgctcaagcaggtgtgtgcttgggccagactctgcagcctttggtttgggacttgactgccattcactgaaggggcccaggaaatgggcagctcacatggtgttgctgggtgtccagctgcggcagtttagcagaggaggacttgtaatgagatggtagcttcttataggctaagacatgatttttctgttcttttactacctcctgcaccttctagaactgttccttctctgatgctgttttcctttcttccagtgatttatctctagggtctccatagcaggggaggtagggtcagactcctgagatggctgatgtcctaccctgcccccaaccaggggccccaggagactcctttttcttactgcaactttggcctcctcagtctgcagatctccaggggagcccaccagcctagtcaacatggcctcggaagacattgccaagctggcagagacacttgccaagactcaggtggccgggggacagctgagtttcaaaggcaagagcctcaaactcaacactgcagaagatgctaaagatgtgattaaagagattgaagactttgacagcttggaggctctgcgtctggaaggcaacacagtgggcgtggaagcagccagggtcatcgccaaggccttagagaagaagtcggagttgaagcgctgccactggagtgacatgttcacgggaaggctgcggaccgagatcccaccagccctgatctcactaggggaaggactcatcacagctggggctcagctggtggagctggacttaagcgacaacgcattcgggcccgacggtgtgcaaggcttcgaggccctgctcaagagctcagcctgcttcaccctgcaggaactcaagctcaacaactgtggcatgggcattggcggcggcaagatcctggctgcagctctgaccgaatgtcaccggaaatccagtgcccaaggcaagcctctggccctgaaggtctttgtggctggcagaaaccgtctggagaatgatggcgccactgccttggcagaagcttttagggtcatcgggaccctggaggaggtccacatgccacagaatgggatcaaccaccctggcatcactgccctggcccaggctttcgctgtcaaccccctgctgcgggtcatcaacctgaatgacaacaccttcactgagaagggcgccgtggccatggccgagaccttgaagaccttgcggcaggtggaggtgattaattttggggactgcctggtgcgctccaagggtgcagttgccattgcagatgccatccgcggcggcctgcccaagctaaaggagctgaacttgtcattctgtgaaatcaagagggatgctgccctggctgttgctgaggccatggcagacaaagctgagctggagaagctggacctgaatggcaacaccctgggagaagaaggctgtgaacagcttcaggaggtgctggagggcttcaacatggccaaggtgctggcgtccctcagtgatgacgaggacgaggaggaggaggaggaaggagaagaggaagaagaggaagcagaagaagaggaggaggaagatgaggaagaggaggaagaagaggaggaggaggaggaagaagagcctcagcagcgagggcagggagagaagtcagccacgccctcacggaagattctggaccctaacactggggagccagctcccgtgctgtcctccccacctcctgcagacgtctccaccttcctggcttttccctctccagagaagctgctgcgcctagggcccaagagctccgtgctgatagcccagcagactgacacgtctgaccccgagaaggtggtctctgccttcctaaaggtgtcatctgtgttcaaggacgaagctactgtgaggatggcagtgcaggatgcagtagatgccctgatgcagaaggctttcaactcctcgtccttcaactccaacaccttcctcaccaggctgctcgtgcacatgggtctgctcaagagtgaagacaaggtcaaggccattgccaacctgtacggccccctgatggcgctgaaccacatggtgcagcaggactatttccccaaggcccttgcacccctgctgctggcgttcgtgaccaagcccaacagcgccctggaatcctgctccttcgcccgccacagtctgctgcagacgctgtacaaggtctagactcaaagcctctcccatcccttggcctggaccagtgagctggggagggactcggatgaactgaggcgcagcctacgccattgccttggacaggactctggccacaggcagggcgggtctgtgtcccatgtgtcctgtcagtcccctgagtatgtgtgtgggtgtggcgcatgtgcaggtctgtgcctcctgtcgggatttgggttttaacgtcttctgctggcccagccctgctctgttgtggggagttggcccccaggggaaagggctgtgagctgctccgccattaaactcacctccacctgagggcgctctgctgatctccgcctgggccctgatggccgtccccacccacctgccttccggcccggctccctggcggagccagaacccagggagttgcccgcgtgctgtccttcccctctgtgttgtgattgggttgtttcctgccctgcctggggctgcttctcgtcaccaagccctggtcctgcggcagctgtcacccctaccatccataccactgtgctgaccgctcagcctgaagagcagagaatgccatgggtgggactgtgggggtcggatcgtggggttgttggcagagggcaaccctgggccccacaccgtgtggacaggcagacaccagattgtccaggagcaggagctgctgggactgcgctggccccggacctagtgggccttctcctggctgctgagatgtcgtctgtgactggcctggctggagggggagtgttgacaacccaaagctgttctccagtctggggagggagaggcagggtccccaatgtccgagctgcatctggacgctgctcttaaaggacctcctggggcaggggagcggtagggtctggactgggcagatgctgtatgacctccctgagcacccgtgactgccccatgctttcccctttgtgctctgtgtgtgtctgggctgtgcccgggggcttcacaaataaagtcgtgtggcagcttcagagactcagaaactctcactgaaagcgggatagtctcgggggccgttgtacgtggagtcccacctcggcagagcatgcggccccgcagcagtctgtggggcagtcagccctgcagaagggcccggcctcggcctcaggccactacctgggaagtggcagtcctgagtgggggcccattttcctgcctggccacacctcacccagcaccctgcctttgggctgcagctcgcttggcttctgcgttgctccttcactatggaagccacctcccttgggatcctttgctccactgccacatatgtgaggacagcccagccaaccttccttacctcctaccctacaccatgtatgtgctttgggagcccatgtcccccacaaacggcctccaagaagtccctccaaggtttcttagagggcaatattttctcattggcagtcggccacgtaggtgaccaggtggcagaggatactgctggccctgtcccctgtcttctgtgtgagttgatacggtagggggtgggtgtggggctggcattaagttctgatgccagctacaacgtggatgaactttgaaaacatgttaaatgaaataagccagacacaaaaggacaaatatgattccatttagatgaggcatctagaataagcaaattcagagacaagaaggtagaggttgccagggctaggggaagggtggaatagggagtgaggctgcaaacagattctctgggatgatgaagatgttctggaaatggagagtggtgatggttgcataacattgtgaatgtacttaatgcactgaattgtacacataaaaatggttaaaatgat

SEQ ID NO: 29393 - protein, 587 aa, Homo sapiens; identical to SEQ ID NO: 4045

SEQ ID NO: 29394 - DNA, 1544 bp, Homo sapiens
ggtccggaattctccagagcctctgtgcccctacttcccaggagccagctcccgtgctgtcctccccacctcctgcagacgtctccaccttcctggcttttccctctccagagaagctgctgcgcctagggcccaagagctccgtgctgatagcccagcagactgacacgtctgaccccgagaaggtggtctctgccttcctaaaggtgtcatctgtgttcaaggacgaagctactgtgaggatggcagtgcaggatgcagtagatgccctgatgcagaaggctttcaactcctcgtccttcaactccaacaccttcctcaccaggctgctcgtgcacatgggtctgctcaagagtgaagacaaggtcaaggccattgccaacctgtacggccccctgatggcgctgaaccacatggtgcagcaggactatttccccaaggcccttgcacccctgctgctggcgttcgtgaccaagcccaacagcgccctggaatcctgctccttcgcccgccacagtctgctgcagacgctgtacaaggtctagactcaaagcctctcccatcccttggcctggaccagtgagctggggagggactcggatgaactgaggcgcagcctacgccattgccttggacaggactctggccacaggcagggcgggtctgtgtcccatgtgtcctgtcagtcccctgagtatgtgtgtgggtgtggcgcatgtgcaggtctgtgcctcctgtcgggatttgggttttaacgtcttctgctggcccagccctgctctgttgtggggagttggcccccaggggaaagggctgtgagctgctccgccattaaactcacctccacctgagggcgctctgctgatctccgcctgggccctgatggccgtccccacccacctgccttccggcccggctccctggcggagccagaacccagggagttgcccgcgtgctgtccttcccctctgtgttgtgattgggttgtttcctgccctgcctggggctgcttctcgtcaccaagccctggtcctgcggcagctgtcacccctaccatccataccactgtgctgaccgctcagcctgaagagcagagaatgccatgggtgggactgtgggggtcggatcgtggggttgttggcagagggcaaccctgggccccacaccgtgtggacaggcagacaccagattgtccaggagcaggagctgctgggactgcgctggccccggacctagtgggccttctcctggctgctgagatgtcgtctgtgactggcctggctggagggggagtgttgacaacccaaagctgttctccagtctggggagggagaggcagggtccccaatgtccgagctgcatctggacgctgctcttaaaggacctcctggggcaggggagcggtagggtctggactgggcagatgctgtatgacctccctgagcacccgtgactgccccatgctttcccctttgtgctctgtgtgtgtctgggctgtgcccgggggcttcacaaataaagtcgtgtggcagcttcagagactc

SEQ ID NO: 29395 - protein, 100 aa, Homo sapiens; identical to SEQ ID NO: 29389

SEQ ID NO: 29396 - DNA, 1596 bp, Homo sapiens
cagtgatgacgaggacgaggaggaggaggaggaaggagaagaggaagaagaggaagcagaagaagaggaggaggaagatgaggaagaggaggaagaagaggaggaggaggaggaagaagagcctcagcagcgagggcagggagagaagtcagccacgccctcacgaagctgctgcgcctagggcccaagagctccgtgctgatagcccagcagactgacacgtctgaccccgagaaggtggtctctgccttcctaaaggtgtcatctgtgttcaaggacgaagctactgtgaggatggcagtgcaggatgcagtagatgccctgatgcagaaggctttcaactcctcgtccttcaactccaacaccttcctcaccaggctgctcgtgcacatgggtctgctcaagagtgaagacaaggtcaaggccattgccaacctgtacggccccctgatggcgctgaaccacatggtgcagcaggactatttccccaaggcccttgcacccctgctgctggcgttcgtgaccaagcccaacagcgccctggaatcctgctccttcgcccgccacagtctgctgcagacgctgtacaaggtctagactcaaagcctctcccatcccttggcctggaccagtgagctggggagggactcggatgaactgaggcgcagcctacgccattgccttggacaggactctggccacaggcagggcgggtctgtgtcccatgtgtcctgtcagtcccctgagtatgtgtgtgggtgtggcgcatgtgcaggtctgtgcctcctgtcgggatttgggttttaacgtcttctgctggcccagccctgctctgttgtggggagttggcccccaggggaaagggctgtgagctgctccgccattaaactcacctccacctgagggcgctctgctgatctccgcctgggccctgatggccgtccccacccacctgccttccggcccggctccctggcggagccagaacccagggagttgcccgcgtgctgtccttcccctctgtgttgtgattgggttgtttcctgccctgcctggggctgcttctcgtcaccaagccctggtcctgcggcagctgtcacccctaccatccataccactgtgctgaccgctcagcctgaagagcagagaatgccatgggtgggactgtgggggtcggatcgtggggttgttggcagagggcaaccctgggccccacaccgtgtggacaggcagacaccagattgtccaggagcaggagctgctgggactgcgctggccccggacctagtgggccttctcctggctgctgagatgtcgtctgtgactggcctggctggagggggagtgttgacaacccaaagctgttctccagtctggggagggagaggcagggtccccaatgtccgagctgcatctggacgctgctcttaaaggacctcctggggcaggggagcggtagggtctggactgggcagatgctgtatgacctccctgagcacccgtgactgccccatgctttcccctttgtgctctgtgtgtgtctgggctgtgcccgggggcttcacaaataaagtcgtgtggcagcttcagagactc

SEQ ID NO: 29397 - protein, 100 aa, Homo sapiens; identical to SEQ ID NO: 29389

SEQ ID NO: 29398 - DNA, 4233 bp, Homo sapiens
ccctgtctctactaaaaatacaaaaaaattagctggacatggtggtgggtgcctgtaatcccagctactcaggaggctgaggcaggagaatgacatgaaccttggaggcggagcttgcagtgagcccagatggcgccactgtgctccagcctgggcgactgagcgagactccgtctcaaaaaaaaaaaattctttcatttatttagttacttttagagatagagcctcccgctgttgcccaggctggagtgcagtggcagtcatagcttactgcagctttgaactcctgggctcaaatgatcctcctgcctcagcctctccagtagctgggactgactacaggcacgtgccaccacacccagctaatttttatttttatttttatttttttgagacagggttttactctgtcacccaggctagagtgcagtggtgagatcatggctcactgtagcctctgtctccggggctcaatcaatcctcccacctcagcctccccagtggctgggattactggtgcacaccaccataccctgctaattgtatttatttttagtagagatgggattttgccatgttgcccagactggtcttgagctgctgggctcaagcgatcttcccatcacagcttcccaatgtgctgggattacaggtgtgagccactgtacctggccagctttacttcttttaccagcactcctgattttataaatagtgaggcttatcaaccccatttctacccaaatcttctggtagacttgagtatagtagggcttcataggtagcagccctgtccctgtcctattatgatggtagctgttgtgatgtggcgatctctgatctagaaacccctgaggggccattgtggcctgcccagtctcccggccacggttgaaaccagacgtgcagtggggctgacccctgtgccccaccccagagtcatgccagcgtgggtggtggggcattctctgggatgaatgatctggatcccatagccatctgtgtcctgtttgaggaatgggaccctcaaacagagaacagccaagatgctcaagcaggtgtgtgcttgggccagactctgcagcctttggtttgggacttgactgccattcactgaaggggcccaggaaatgggcagctcacatggtgttgctgggtgtccagctgcggcagtttagcagaggaggacttgtaatgagatggtagcttcttataggctaagacatgatttttctgttcttttactacctcctgcaccttctagaactgttccttctctgatgctgttttcctttcttccagtgatttatctctagggtctccatagcaggggaggtagggtcagactcctgagatggctgatgtcctaccctgcccccaaccaggggccccaggagactcctttttcttactgcaactttggcctcctcagtctgcagatctccaggggagcccaccagcctagtcaacatggcctcggaagacattgccaagctggcagagacacttgccaagactcaggtggccgggggacagctgagtttcaaaggcaagagcctcaaactcaacactgcagaagatgctaaagatgtgattaaagagattgaagactttgacagcttggaggctctgcgtctggaaggcaacacagtgggcgtggaagcagccagggtcatcgccaaggccttagagaagaagtcggagttgaagcgctgccactggagtgacatgttcacgggaaggctgcggaccgagatcccaccagccctgatctcactaggggaaggactcatcacagctggggctcagctggtggagctggacttaagcgacaacgcattcgggcccgacggtgtgcaaggcttcgaggccctgctcaagagctcagcctgcttcaccctgcaggaactcaagctcaacaactgtggcatgggcattggcggcggcaagatcctggctgcagctctgaccgaatgtcaccggaaatccagtgcccaaggcaagcctctggccctgaaggtctttgtggctggcagaaaccgtctggagaatgatggcgccactgccttggcagaagcttttagggtcatcgggaccctggaggaggtccacatgccacagaatgggatcaaccaccctggcatcactgccctggcccaggctttcgctgtcaaccccctgctgcgggtcatcaacctgaatgacaacaccttcactgagaagggcgccgtggccatggccgagaccttgaagaccttgcggcaggtggaggtgattaattttggggactgcctggtgcgctccaagggtgcagttgccattgcagatgccatccgcggcggcctgcccaagctaaaggagctgaacttgtcattctgtgaaatcaagagggatgctgccctggctgttgctgaggccatggcagacaaagctgagctggagaagctggacctgaatggcaacaccctgggagaagaaggctgtgaacagcttcaggaggtgctggagggcttcaacatggccaaggtgctggcgtccctcagtgatgacgaggacgaggaggaggaggaggaaggagaagaggaagaagaggaagcagaagaagaggaggaggaagatgaggaagaggaggaagaagaggaggaggaggaggaagaagagcctcagcagcgagggcagggagagaagtcagccacgccctcacggaagattctggaccctaacactggggagccagctcccgtgctgtcctccccacctcctgcagacgtctccaccttcctggcttttccctctccagagaagctgctgcgcctagggcccaagagctccgtgctgatagcccagcagactgacacgtctgaccccgagaaggtggtctctgccttcctaaaggtgtcatctgtgttcaaggacgaagctactgtgaggatggcagtgcaggatgcagtagatgccctgatgcagaaggctttcaactcctcgtccttcaactccaacaccttcctcaccaggctgctcgtgcacatgggtctgctcaagagtgaagacaaggtcaaggccattgccaacctgtacggccccctgatggcgctgaaccacatggtgcagcaggactatttccccaaggcccttgcacccctgctgctggcgttcgtgaccaagcccaacagcgccctggaatcctgctccttcgcccgccacagtctgctgcagacgctgtacaaggtctagactcaaagcctctcccatcccttggcctggaccagtgagctggggagggactcggatgaactgaggcgcagcctacgccattgccttggacaggactctggccacaggcagggcgggtctgtgtcccatgtgtcctgtcagtcccctgagtatgtgtgtgggtgtggcgcatgtgcaggtctgtgcctcctgtcgggatttgggttttaacgtcttctgctggcccagccctgctctgttgtggggagttggcccccaggggaaagggctgtgagctgctccgccattaaactcacctccacctgagggcgctctgctgatctccgcctgggccctgatggccgtccccacccacctgccttccggcccggctccctggcggagccagaacccagggagttgcccgcgtgctgtccttcccctctgtgttgtgattgggttgtttcctgccctgcctggggctgcttctcgtcaccaagccctggtcctgcggcagctgtcacccctaccatccataccactgtgctgaccgctcagcctgaagagcagagaatgccatgggtgggactgtgggggtcggatcgtggggttgttggcagagggcaaccctgggccccacaccgtgtggacaggcagacaccagattgtccaggagcaggagctgctgggactgcgctggccccggacctagtgggccttctcctggctgctgagatgtcgtctgtgactggcctggctggagggggagtgttgacaacccaaagctgttctccagtctggggagggagaggcagggtccccaatgtccgagctgcatctggacgctgctcttaaaggacctcctggggcaggggagcggtagggtctggactgggcagatgctgtatgacctccctgagcacccgtgactgccccatgctttcccctttgtgctctgtgtgtgtctgggctgtgcccgggggcttcacaaataaagtcgtgtggcagcttcagagactc

SEQ ID NO: 29399 - protein, 587 aa, Homo sapiens; identical to SEQ ID NO: 4045

SEQ ID NO: 29400 - DNA, 3713 bp, Homo sapiens
cctccgccatcatccgccgcggtgcggagagcaggtggtgctggaagcgcgtgaggccgggagctcgagagagctaacagactagccggctggacatctggaccgctggatccggaggtggcgaccccggcctgacccggaccctaaatccgtccccgccccagagggcggaggcgcgcgctcgattccccccacgcggcggcgccgcctgtttacggtagagtcagggtccctttcctttccccgtcacctgcctggaacaggggtgcggggcgaggagggcgtggcgcccgtgtgcgccttctgcctgccccctcggccttcttcacttagccttcgacggccgagcgccccaggggtggcggtgggagtggggttgttgagcggcgctggctcctttcacaaatggggaaactgaggcttaaagggcgtctgactcgccagagcagctcagcctgcagctgctagcagtggcgtctcatattagcattgttgtcaaccggaggcggtgcgagtccgccggggattccagatggggctcctgcgccgcccgcctatcatttgcggcctgtattcgcgcgtcgctcccgcagagccacctcccagcaggcccacgcccgcgggggccccgggctggcgccgctgtccctggaatcgatagacggtctccttctgtcacccaggctggagtgtagtggaacgatcaccgctgaactgcagcgtcggcttcctgggctcaagcgatcctcccacctcaacctcccaagtcatggggactacagatgccatcacacctggctaatttttaaatttttctgtggagacagggtctcattctgttgcccaggcttgtctcgaaccctggtctaaagtgatcttcccgcctagcctcccaaaatgttggaattacagtctgcagatctccaggggagcccaccagcctagtcaacatggcctcggaagacattgccaagctggcagagacacttgccaagactcaggtggccgggggacagctgagtttcaaaggcaagagcctcaaactcaacactgcagaagatgctaaagatgtgattaaagagattgaagactttgacagcttggaggctctgcgtctggaaggcaacacagtgggcgtggaagcagccagggtcatcgccaaggccttagagaagaagtcggagttgaagcgctgccactggagtgacatgttcacgggaaggctgcggaccgagatcccaccagccctgatctcactaggggaaggactcatcacagctggggctcagctggtggagctggacttaagcgacaacgcattcgggcccgacggtgtgcaaggcttcgaggccctgctcaagagctcagcctgcttcaccctgcaggaactcaagctcaacaactgtggcatgggcattggcggcggcaagatcctggctgcagctctgaccgaatgtcaccggaaatccagtgcccaaggcaagcctctggccctgaaggtctttgtggctggcagaaaccgtctggagaatgatggcgccactgccttggcagaagcttttagggtcatcgggaccctggaggaggtccacatgccacagaatgggatcaaccaccctggcatcactgccctggcccaggctttcgctgtcaaccccctgctgcgggtcatcaacctgaatgacaacaccttcactgagaagggcgccgtggccatggccgagaccttgaagaccttgcggcaggtggaggtgattaattttggggactgcctggtgcgctccaagggtgcagttgccattgcagatgccatccgcggcggcctgcccaagctaaaggagctgaacttgtcattctgtgaaatcaagagggatgctgccctggctgttgctgaggccatggcagacaaagctgagctggagaagctggacctgaatggcaacaccctgggagaagaaggctgtgaacagcttcaggaggtgctggagggcttcaacatggccaaggtgctggcgtccctcagtgatgacgaggacgaggaggaggaggaggaaggagaagaggaagaagaggaagcagaagaagaggaggaggaagatgaggaagaggaggaagaagaggaggaggaggaggaagaagagcctcagcagcgagggcagggagagaagtcagccacgccctcacggaagattctggaccctaacactggggagccagctcccgtgctgtcctccccacctcctgcagacgtctccaccttcctggcttttccctctccagagaagctgctgcgcctagggcccaagagctccgtgctgatagcccagcagactgacacgtctgaccccgagaaggtggtctctgccttcctaaaggtgtcatctgtgttcaaggacgaagctactgtgaggatggcagtgcaggatgcagtagatgccctgatgcagaaggctttcaactcctcgtccttcaactccaacaccttcctcaccaggctgctcgtgcacatgggtctgctcaagagtgaagacaaggtcaaggccattgccaacctgtacggccccctgatggcgctgaaccacatggtgcagcaggactatttccccaaggcccttgcacccctgctgctggcgttcgtgaccaagcccaacagcgccctggaatcctgctccttcgcccgccacagtctgctgcagacgctgtacaaggtctagactcaaagcctctcccatcccttggcctggaccagtgagctggggagggactcggatgaactgaggcgcagcctacgccattgccttggacaggactctggccacaggcagggcgggtctgtgtcccatgtgtcctgtcagtcccctgagtatgtgtgtgggtgtggcgcatgtgcaggtctgtgcctcctgtcgggatttgggttttaacgtcttctgctggcccagccctgctctgttgtggggagttggcccccaggggaaagggctgtgagctgctccgccattaaactcacctccacctgagggcgctctgctgatctccgcctgggccctgatggccgtccccacccacctgccttccggcccggctccctggcggagccagaacccagggagttgcccgcgtgctgtccttcccctctgtgttgtgattgggttgtttcctgccctgcctggggctgcttctcgtcaccaagccctggtcctgcggcagctgtcacccctaccatccataccactgtgctgaccgctcagcctgaagagcagagaatgccatgggtgggactgtgggggtcggatcgtggggttgttggcagagggcaaccctgggccccacaccgtgtggacaggcagacaccagattgtccaggagcaggagctgctgggactgcgctggccccggacctagtgggccttctcctggctgctgagatgtcgtctgtgactggcctggctggagggggagtgttgacaacccaaagctgttctccagtctggggagggagaggcagggtccccaatgtccgagctgcatctggacgctgctcttaaaggacctcctggggcaggggagcggtagggtctggactgggcagatgctgtatgacctccctgagcacccgtgactgccccatgctttcccctttgtgctctgtgtgtgtctgggctgtgcccgggggcttcacaaataaagtcgtgtggcagcttcagagactc

SEQ ID NO: 29401 - protein, 587 aa, Homo sapiens; identical to SEQ ID NO: 4045

SEQ ID NO: 29402 - DNA, 3036 bp, Homo sapiens
ggctttcaaaatcctcctcctccgccatcatccgccgcggtgcggagagcaggtggtgctggaagcgcgtgaggccgggagctcgagagagctaacagactagccggctggacatctggaccgctggatccggaggtggcgaccccggcctgacccggaccctaaatccgtccccgccccagagggcggaggcgcgcgctcgattccccccacgcggcggcgccgcctgtttacgtctgcagatctccaggggagcccaccagcctagtcaacatggcctcggaagacattgccaagctggcagagacacttgccaagactcaggtggccgggggacagctgagtttcaaaggcaagagcctcaaactcaacactgcagaagatgctaaagatgtgattaaagagattgaagactttgacagcttggaggctctgcgtctggaaggcaacacagtgggcgtggaagcagccagggtcatcgccaaggccttagagaagaagtcggagttgaagcgctgccactggagtgacatgttcacgggaaggctgcggaccgagatcccaccagccctgatctcactaggggaaggactcatcacagctggggctcagctggtggagctggacttaagcgacaacgcattcgggcccgacggtgtgcaaggcttcgaggccctgctcaagagctcagcctgcttcaccctgcaggaactcaagctcaacaactgtggcatgggcattggcggcggcaagatcctggctgcagctctgaccgaatgtcaccggaaatccagtgcccaaggcaagcctctggccctgaaggtctttgtggctggcagaaaccgtctggagaatgatggcgccactgccttggcagaagcttttagggtcatcgggaccctggaggaggtccacatgccacagaatgggatcaaccaccctggcatcactgccctggcccaggctttcgctgtcaaccccctgctgcgggtcatcaacctgaatgacaacaccttcactgagaagggcgccgtggccatggccgagaccttgaagaccttgcggcaggtggaggtgattaattttggggactgcctggtgcgctccaagggtgcagttgccattgcagatgccatccgcggcggcctgcccaagctaaaggagctgaacttgtcattctgtgaaatcaagagggatgctgccctggctgttgctgaggccatggcagacaaagctgagctggagaagctggacctgaatggcaacaccctgggagaagaaggctgtgaacagcttcaggaggtgctggagggcttcaacatggccaaggtgctggcgtccctcagtgatgacgaggacgaggaggaggaggaggaaggagaagaggaagaagaggaagcagaagaagaggaggaggaagatgaggaagaggaggaagaagaggaggaggaggaggaagaagagcctcagcagcgagggcagggagagaagtcagccacgccctcacggaagattctggaccctaacactggggagccagctcccgtgctgtcctccccacctcctgcagacgtctccaccttcctggcttttccctctccagagaagctgctgcgcctagggcccaagagctccgtgctgatagcccagcagactgacacgtctgaccccgagaaggtggtctctgccttcctaaaggtgtcatctgtgttcaaggacgaagctactgtgaggatggcagtgcaggatgcagtagatgccctgatgcagaaggctttcaactcctcgtccttcaactccaacaccttcctcaccaggctgctcgtgcacatgggtctgctcaagagtgaagacaaggtcaaggccattgccaacctgtacggccccctgatggcgctgaaccacatggtgcagcaggactatttccccaaggcccttgcacccctgctgctggcgttcgtgaccaagcccaacagcgccctggaatcctgctccttcgcccgccacagtctgctgcagacgctgtacaaggtctagactcaaagcctctcccatcccttggcctggaccagtgagctggggagggactcggatgaactgaggcgcagcctacgccattgccttggacaggactctggccacaggcagggcgggtctgtgtcccatgtgtcctgtcagtcccctgagtatgtgtgtgggtgtggcgcatgtgcaggtctgtgcctcctgtcgggatttgggttttaacgtcttctgctggcccagccctgctctgttgtggggagttggcccccaggggaaagggctgtgagctgctccgccattaaactcacctccacctgagggcgctctgctgatctccgcctgggccctgatggccgtccccacccacctgccttccggcccggctccctggcggagccagaacccagggagttgcccgcgtgctgtccttcccctctgtgttgtgattgggttgtttcctgccctgcctggggctgcttctcgtcaccaagccctggtcctgcggcagctgtcacccctaccatccataccactgtgctgaccgctcagcctgaagagcagagaatgccatgggtgggactgtgggggtcggatcgtggggttgttggcagagggcaaccctgggccccacaccgtgtggacaggcagacaccagattgtccaggagcaggagctgctgggactgcgctggccccggacctagtgggccttctcctggctgctgagatgtcgtctgtgactggcctggctggagggggagtgttgacaacccaaagctgttctccagtctggggagggagaggcagggtccccaatgtccgagctgcatctggacgctgctcttaaaggacctcctggggcaggggagcggtagggtctggactgggcagatgctgtatgacctccctgagcacccgtgactgccccatgctttcccctttgtgctctgtgtgtgtctgggctgtgcccgggggcttcacaaataaagtcgtgtggcagcttcagagactc

SEQ ID NO: 29403 - protein, 587 aa, Homo sapiens; identical to SEQ ID NO: 4045

SEQ ID NO: 29404 - DNA, 3777 bp, Homo sapiens
ccaactgttgaccaggtgtcatttccaccttgcagtccaacttctgtgggaggtggacacggggaaagaagaccaccacggaggggatggctgtatgtgtgtagaggaagtattggtagtagaactaaagattctgccagcattttgtgtccaacacagttgctacatgtactataattatctcatttgtgtgaaaattcaaggatctgcattctgctattttcatcaggctgaactgcagatgctgaggaatatggcaagaagttggggttcaaagtctgatgccaaagctagcaacccgagaaataaaaccgctgatcaccagctccccactcaggcccagcccccttttagagcccccagactccccacgcagggccctagccccctagtcttccccgtcaatgccctgttggcaatacagccatcaggttctatcagagtgagctgtttttatatgattattttcccccctgggaagacggctttgtctgtgaaagtccccccaaccaggcgccttataaacgcctaaaacagacagagttgaggagaaaggaggggaaaggaggagggagcaaacccggaggggggccctgaggttcgcagcgggcaggatgggggtatgaggccggagtcggcggctcccaggcccccagccccgtcagggcgcccccgtccccaggcgccagagccggggtccgcagccccctagcactccctggacggccgcgggcctcccacaggcctcgaagtccagagactgatcctgcgaccggaaacgcccccctgcccagggggccctgccagcgacgcccctgccagcccccgagaccccctgcgcggggtcggcaaagcatctggacaccccagaagctccggacgccgaagagagaggccccacgaaaatttcaagacacctcctgggggctgcaggggcggccaagtctccccagcgccaggtgcccccggccacacgtctgcagatctccaggggagcccaccagcctagtcaacatggcctcggaagacattgccaagctggcagagacacttgccaagactcaggtggccgggggacagctgagtttcaaaggcaagagcctcaaactcaacactgcagaagatgctaaagatgtgattaaagagattgaagactttgacagcttggaggctctgcgtctggaaggcaacacagtgggcgtggaagcagccagggtcatcgccaaggccttagagaagaagtcggagttgaagcgctgccactggagtgacatgttcacgggaaggctgcggaccgagatcccaccagccctgatctcactaggggaaggactcatcacagctggggctcagctggtggagctggacttaagcgacaacgcattcgggcccgacggtgtgcaaggcttcgaggccctgctcaagagctcagcctgcttcaccctgcaggaactcaagctcaacaactgtggcatgggcattggcggcggcaagatcctggctgcagctctgaccgaatgtcaccggaaatccagtgcccaaggcaagcctctggccctgaaggtctttgtggctggcagaaaccgtctggagaatgatggcgccactgccttggcagaagcttttagggtcatcgggaccctggaggaggtccacatgccacagaatgggatcaaccaccctggcatcactgccctggcccaggctttcgctgtcaaccccctgctgcgggtcatcaacctgaatgacaacaccttcactgagaagggcgccgtggccatggccgagaccttgaagaccttgcggcaggtggaggtgattaattttggggactgcctggtgcgctccaagggtgcagttgccattgcagatgccatccgcggcggcctgcccaagctaaaggagctgaacttgtcattctgtgaaatcaagagggatgctgccctggctgttgctgaggccatggcagacaaagctgagctggagaagctggacctgaatggcaacaccctgggagaagaaggctgtgaacagcttcaggaggtgctggagggcttcaacatggccaaggtgctggcgtccctcagtgatgacgaggacgaggaggaggaggaggaaggagaagaggaagaagaggaagcagaagaagaggaggaggaagatgaggaagaggaggaagaagaggaggaggaggaggaagaagagcctcagcagcgagggcagggagagaagtcagccacgccctcacggaagattctggaccctaacactggggagccagctcccgtgctgtcctccccacctcctgcagacgtctccaccttcctggcttttccctctccagagaagctgctgcgcctagggcccaagagctccgtgctgatagcccagcagactgacacgtctgaccccgagaaggtggtctctgccttcctaaaggtgtcatctgtgttcaaggacgaagctactgtgaggatggcagtgcaggatgcagtagatgccctgatgcagaaggctttcaactcctcgtccttcaactccaacaccttcctcaccaggctgctcgtgcacatgggtctgctcaagagtgaagacaaggtcaaggccattgccaacctgtacggccccctgatggcgctgaaccacatggtgcagcaggactatttccccaaggcccttgcacccctgctgctggcgttcgtgaccaagcccaacagcgccctggaatcctgctccttcgcccgccacagtctgctgcagacgctgtacaaggtctagactcaaagcctctcccatcccttggcctggaccagtgagctggggagggactcggatgaactgaggcgcagcctacgccattgccttggacaggactctggccacaggcagggcgggtctgtgtcccatgtgtcctgtcagtcccctgagtatgtgtgtgggtgtggcgcatgtgcaggtctgtgcctcctgtcgggatttgggttttaacgtcttctgctggcccagccctgctctgttgtggggagttggcccccaggggaaagggctgtgagctgctccgccattaaactcacctccacctgagggcgctctgctgatctccgcctgggccctgatggccgtccccacccacctgccttccggcccggctccctggcggagccagaacccagggagttgcccgcgtgctgtccttcccctctgtgttgtgattgggttgtttcctgccctgcctggggctgcttctcgtcaccaagccctggtcctgcggcagctgtcacccctaccatccataccactgtgctgaccgctcagcctgaagagcagagaatgccatgggtgggactgtgggggtcggatcgtggggttgttggcagagggcaaccctgggccccacaccgtgtggacaggcagacaccagattgtccaggagcaggagctgctgggactgcgctggccccggacctagtgggccttctcctggctgctgagatgtcgtctgtgactggcctggctggagggggagtgttgacaacccaaagctgttctccagtctggggagggagaggcagggtccccaatgtccgagctgcatctggacgctgctcttaaaggacctcctggggcaggggagcggtagggtctggactgggcagatgctgtatgacctccctgagcacccgtgactgccccatgctttcccctttgtgctctgtgtgtgtctgggctgtgcccgggggcttcacaaataaagtcgtgtggcagcttcagagactc

SEQ ID NO: 29405 - protein, 587 aa, Homo sapiens; identical to SEQ ID NO: 4045

SEQ ID NO: 29406 - DNA, 1186 bp, Homo sapiens
gtctcaaaaaaaaaagaaaaagaaaaagaaaaaaagcaaccaaaaaaacaatggctagccatttacttatgatccagattggactctagtgggccagtcctatgtggccactggcagccagtaaggattccctggcctatgtctgctggaagggcccttggagagcctggctgagggggccttcattctggccagctctgggctgtgtggcgttgggtgcctggctctctgagcctctcgcacctcccatccccacccacggtgtgcagaaggcagagggctaatgtctctcttgctgagtcgttgtgcaaattaacaaaaatgagtctggcaccaaaatggcccccacacttggaaaacaggccaagaggcatccaccgacctgctgacccctctttccccgcaggcccaacagcgccctggaatcctgctccttcgcccgccacagtctgctgcagacgctgtacaaggtctagactcaaagcctctcccatcccttggcctggaccagtgagctggggagggactcggatgaactgaggcgcagcctacgccattgccttggacaggactctggccacaggcagggcgggtctgtgtcccatgtgtcctgtcagtcccctgagtatgtgtgtgggtgtggcgcatgtgcaggtctgtgcctcctgtcgggatttgggttttaacgtcttctgctggcccagccctgctctgttgtggggagttggcccccaggggaaagggctgtgagctgctccgccattaaactcacctccacctgagggcgctctgctgatctccgcctgggccctgatggccgtccccacccacctgccttccggcccggctccctggcggagccagaacccagggagttgcccgcgtgctgtccttcccctctgtgttgtgattgggttgtttcctgccctgcctggggctgcttctcgtcaccaagctgttctccagtctggggagggagaggcagggtccccaatgtccgagctgcatctggacgctgctcttaaaggacctcctggggcaggggagcggtagggtctggactgggcagatgctgtatgacctccctgagcacccgtgactgccccatgctttcccctttgtgctctgtgtgtgtctgggctgtgcccgggggcttcacaaataaagtcgtgtggcagcttcagag

SEQ ID NO: 29407 - protein, 79 aa, Homo sapiens; identical to SEQ ID NO: 29387

SEQ ID NO: 29408 - DNA, 902 bp, Homo sapiens
cagtgatgacgaggacgaggaggaggaggaggaaggagaagaggaagaagaggaagcagaagaagaggaggaggaagatgaggaagaggaggaagaagaggaggaggaggaggaagaagagcctcagcagcgagggcagggagagaagtcagccacgccctcacgaagctgctgcgcctagggcccaagagctccgtgctgatagcccagcagactgacacgtctgaccccgagaaggtggtctctgccttcctaaaggtgtcatctgtgttcaaggacgaagctactgtgaggatggcagtgcaggatgcagtagatgccctgatgcagaaggctttcaactcctcgtccttcaactccaacaccttcctcaccaggctgctcgtgcacatgggtctgctcaagagtgaagacaaggtcaaggccattgccaacctgtacggccccctgatggcgctgaaccacatggtgcagcaggactatttccccaaggcccttgcacccctgctgctggcgttcgtgaccaagcccaacagcgccctggaatcctgctccttcgcccgccacagtctgctgcagacgctgtacaaggtctagactcaaagcctctcccatcccttggcctggaccagtgagctggggagggactcggatgaactgaggcgcagcctacgccattgccttggacaggactctggccacaggcagggcgggtctgtgtcccatgtgtcctgtcagtcccctgagtatgtgtgtgggtgtggcgcatgtgcaggtctgtgcctcctgtcgggatttgggttttaacgtcttctgctggcccagccctgctctgttgtggggagttggcccccaggggaaagggctgtgagctgctccgccattaaactcacctccacctg

SEQ ID NO: 29409 - protein, 100 aa, Homo sapiens; identical to SEQ ID NO: 29389

SEQ ID NO: 29410 - DNA, 877 bp, Homo sapiens
aggcgagcctgtgtctgcgcggtgttgggggaaccctgggtgccttggcccagccctctgccatagccagcagcctgcccctgctgcttctgccctacagatgccctgatgcagaaggctttcaactcctcgtccttcaactccaacaccttcctcaccaggctgctcgtgcacatgggtctgctcaagagtgaagacaaggtcaaggccattgccaacctgtacggccccctgatggcgctgaaccacatggtgcagcaggactatttccccaaggcccttgcacccctgctgctggcgttcgtgaccaagtgagtgtggccttgtccttctgccggtgcctgccctctcgggcttctctggccaggtctgaaggcgcccggttccgggaggcccagccccagcccagccagcctgctggccccactcaggtgcatgagaggccctcatgcctcctgggctctcagcatctgcattggagtctcaccacccttgggaggcccactcccctctgcccagctgaggacagtggggctcagggacagtgagagaggagacatgcggcgcccccattgtgcagatgaggagcactgggttggttaaggagtttcccttggtcacacgctagcaagaggctgggccagtgtccagacccatgtctgctgagcgaggtgctgcggttggtgacatctccggagtggctttttgtccacattcacagcagcgcaggccaaaggggcctggtcacaccaggctctgcagccccgggccctctcctggggacacacattgccacgggagctgccaaatgcccagcaatgtgtgaaccttggccttgttctggagggtcctggggtgtcccggggcattgatgggg

SEQ ID NO: 29411 - protein, 68 aa, Homo sapiens
MQKAFNSSSFNSNTFLTRLLVHMGLLKSEDKVKAIANLYGPLMALNHMVQQDYFPKALAPLLLAFVTK

SEQ ID NO: 29412 - DNA, 646 bp, Homo sapiens
tcatccgccgcggtgcggagagcaggtggtgctggaagcgcgtgaggccgggagctcgagagagctaacagactagccggctggacatctggaccgctggatccggaggtggcgaccccggcctgacccggaccctaaatccgtccccgccccagagggcggaggcgcgcgctcgattccccccacgcggcggcgccgcctgtttacgagacggtctccttctgtcacccaggctggagtgtagtggaacgatcaccgctgaactgcagcgtcggcttcctgggctcaagcgatcctcccacctcaacctcccaagtcatggggactacagatgccatcacacctggctaatttttaaatttttctgtggagacagggtctcattctgttgcccaggcttgtctcgaaccctggtctaaagtgatcttcccgcctagcctcccaaaatgttggaattacaggtgtgagttattgcactgggctggtttctggttaatttattttttgaaacagggtctccagaagtacagcagcaagatctcagctcactgtagcctccacctacggggctcaagtgatcctcccaccttacatcccaggtagctgggactgcaggcacctgccaccacacccagctagtttttgt

SEQ ID NO: 29413 - protein, 116 aa, Homo sapiens
QTSRLDIWTAGSGGGDPGLTRTLNPSPPQRAEARARFPPRGGAACLRDGLLLSPRLECSGTITAELQRRLPGLKRSSHLNLPSHGDYRCHHTWLIFKFFCGDRVSFCCPGLSRTLV

SEQ ID NO: 29414 - DNA, 5868 bp, Homo sapiens; identical to SEQ ID NO: 4046

SEQ ID NO: 29415 - protein, 977 aa, Homo sapiens; identical to SEQ ID NO: 4047

SEQ ID NO: 29416 - DNA, 5410 bp, Homo sapiens
aggggctggaaatgaaagtaaagcgctccagagccacatggacggagctgccggggcggcggcgccgggagcaggatgcggccgcccgtaattaaatagcatttactcttattattactaataataataacgtaatcatacctctagtcatagcataccatttatcgggctcggcgcaggcccgcggggagcgcagcccggcggagagactgatggagaggcagaaacggaaggcggacatcgagaaagggctgcagttcattcagtcgacactacccctaaagcaagaagaatatgaggcctttctgctcaagctggtgcagaatctgtttgctgagggcaatgatctgttccgggagaaggactataagcaggctctggtgcagtacatggaagggctgaacgtggccgactacgctgcctctgaccaggtggccctgccccgggagctgctgtgcaagctgcatgtcaatagggccgcctgctacttcaccatgggcctgtatgagaaggcgctggaggacagcgagaaggcgctgggcctggacagtgagagtatccgggcgttgttccgcaaggcacgcgctctcaatgaactgggacgccacaaggaggcctacgagtgcagcagccggtgttccctcgccctgccccacgatgaaagcgtgactcagcttggtcaggagctggcccagaaactggggctgcgagttcgcaaggcgtataagaggccccaggaattggaaaccttttctctgctcagtaacggcactgcggctggcgtggcagatcaggtaggatcggggctgaaccaacctgtctcagtttatccattatgagaggtttggattcactctctccgggtataaatgacctcaggcagtgggtccaggggcctccgcctccctaggaggtacctcccgtgtccacgggggcaggatgtggggacaggccatggctgctgttggcagggagtggtcattgccggggagccgccgggggcagcctcactcttgaaccctggccaggacacagtctgggcagcctggtcccacacgccttccttctgcctcctgccccacatttcctgctgtgttgccttttttctcaccagcctttctgcaggttcaggcccctgggcctcaaatgtcttcctcttccccaccctgcctttctctgtcttttcgcttttcaaagcccagctcaagggcatgcccctgccgaaacccatcctgctctccctggctcagtgactctgcttgggaggggcagccgagactgaggactctgacaaggaagagcccaactgggccctgcagccttgggcaggtccttcagtttctgcattctgaaatgcggaccatccctcaacgggaacaagggaggaaagtgcttgataacctggcacacacgacccagcaggaaatgcagtgggcagtcactgtggatagctgctgtgctgtcctgagttggggactcctcccaagggccaagacacttgtgcaccccagtcaggcctggctcatcccaggggggtgaggcagggcctggcacacgactgagacccctgcccgctgctcaggtagactttgaggctttctggaaagtgagagatgggctataagagcactgatggagcctggggtcctgccaccttgtacattaagggaaactgaggcacagagtggggaggggacggggccagtgtcacacagcgaggcagcagcaggcctccctcctccagagctttgcagcactttctttcattcattccataaggaggcccacaaaacactctcggccctgggcctgagagagctgcgtccttgccctcagggacctcccagcctgcaaagtaggcagttgatgatctgcctttgtagcactcatggtttataatcagaaattataggtcaggcatggtggctcatgcctgtaatcccagcaatttgggaggccgaggtgggtgatcacttaatttcgggagttaaagaccagcctggccaacataatgaaaccccatccctgccaaaaatacaaaaattagccgggcatggtggcatgtgcctgtagttccagctacttgggaggctgaggcaggagaatcacttgaacccaggaggcacagtttgcagtgagccgagatcgcgccattacactccagcctgagagacagaatgagactccatctgaaaaataaaagaaattattaggcctggcacataccaggtgctccaacgagaaaacattaaatgaatgaaaggtgatttgtctaagtttacccagtatgggccaagcactgagcttggggttgggtatgtgataaacaaaacaaatctgtttcctgccctcaaagagctcacagtctaggatggacattaggacattaggcagatcatttctggtttcaaactgtgatgagggctgtgaaggcagagtatggggagacctgggccattgagactgggagccctgatttagacaggattcagtgacatttaagctgagaccggaaggttgaagagttaggggcagggtgtgcaggtgaaacagcattccagaccaggtggaaggtatgtgcaaaggccctgaggcctggaggagctcagagtgtgggaggaaccaacaccaaggcagagctgggggtcctggaacaggagatagaagccagaccgcttgacccctgataagaagctcagtcttagcattgggaaggcattgaggggaggcagcattaattctattcatttattcggaaggtatttattgagcactgctttgtacccagtgtcagttcagacactgggaatagagcaccaaggtagcgtctcatcacagcaagtggagctgggctgggcaggcacagcagatgctcaaaaaatatttgttgaatgattgaatgactgcggccagggggccacagcaaatatgggctgaatgcccagctctccagggccaaggccgcaaagccttgcttagtctgcagccagatgaccacagatggtgccatacctggcaccaggccccccccagtccctgccaggctgttcacccatccctgcaatcttgctgggctcctcctgcacattcatagaggtcaggagggcatggttagggagggctctaagaagcccacagtggagaggaccagttcagaccctgcctcatgaactcagtttgcccaacatggtacagcacacatgtgagcacacacatgtgcacatgcacaaacggagtgccctaggacacatgagggcagggtggtgtcccagccagagcccctggccttccgtgagttgtgcacagacacaagtaaatgcaggctgcaggggtccctgtaggttctccaccatgagcaccatattcattcagccggctggtcatttcacatgtgcacctggaagtggggatggaccaggctgtgcccacagggagcttcttatgacctaggagccaggcagaggccctgcaagacagtgtctgtgcaagagctgtccctggcatcgtggggaacaagatgcaaggagggctgtgagttccaggaacagagagcccaaggcagccttggttggaaagggcttcagcgagccagggaagcaagactaagaggaagggagagctggagagggggaaatggcactcatgaccaggagcacagcctgcacaaaggctaagcagcaaaagagacagacaccccagatcacaagaccagttcctcctatggggctcggaatagcctgggctctgcagtggaacgtgctttggatcagatcctgagcacgctccttatctacgcaggccactccacccctcagagccttggcttccttctcttttgcaggggtccggtacctgccattttgtgggggttatagaattacaatgggtcaatgtgaaagctcccagcagggcgtctgcagaagagatagagctccatagacctttgttgccaaacagatgtcaccagaaggagtgccatgcagaagggcaggaacagtgagcctggcaggctggggtgatggcatgggcaggagggctgagaaggtgactttgtcctgcgtggcctgggagccatgggcaggatctagcagggagaatcaccgctttccctagagatgttcatctggtacctctctttccctcaaagactttatgtacttaccatgaggatagcagctctgtgatccagcgtggcggccttggtttggcagccaatctatggtgggcagacactccggagactgaagtgcacacatttgccatgtgctctatggcaggctcaggtgtgggaaggaggtgcagggtgttggtgcaggtatggatgggggagtgtacagttccaggggacagagtcaggacaggctcttgggtcagacagccctgctctgatctgtgcatagcagctttctgggctgacatttccatgccgtgggatgatacctcgcagggcgcctggaccgagggctaaaccccacagtgggtgtgagatgctggcctgggctggcgtgaggcaggatgctggatgagtctagctgctggtcctgtggctgctggtcctgggaaaggaaggctagtggtggagtctggtcctccatccggctctccgtggggacacagaaagggtggggccacccagggcctcaccagggaagcaggacttgagctggactgtgaaggactcagagaaaaaggggagggtgttcaggacagggaaggatgcaccacagcctggaggttggagtgtgggaactgttgaacgaaacagcagctctcccagcccaacttccagaaactgtgcatctaatcaacacaggccgggcacggtggctcacgccagtaatcccagcacattgggaggccaaggcgggtggatcatttgaagtcaggagtttgagatcaacctggctaacatggtgaaaccccatctctactaaaaaattcaaaaattagctgggcgcggtggctcacacctataatcccagcactctgggaggccgaggcgggtggatcacgaggtcaggatatcgagaccatcctggctaacacggtgaaaccccatctctactaaaaatacaaaaaattagccaggcgtggtggcgggtgcctgtagtcccagctagtctggaggctgaggcaggagaatggcatgaacccaggaggcggagcttacagtgagctgagatcgtgccactgcactccagcctgggctacagagtgagactccatctcaaagaaaaaaaatatatatatatattcaaaaattagctgggcatggtggcatgcttctgtaatcccagctactcaggaggccgagattagagaatcacttgaatgtgggagtcggaggttgtagtgagctgagatcacaccattgcactgcagcctgggtgaccaaacgagactccatctc

SEQ ID NO: 29417 - protein, 208 aa, Homo sapiens
MERQKRKADIEKGLQFIQSTLPLKQEEYEAFLLKLVQNLFAEGNDLFREKDYKQALVQYMEGLNVADYAASDQVALPRELLCKLHVNRAACYFTMGLYEKALEDSEKALGLDSESIRALFRKARALNELGRHKEAYECSSRCSLALPHDESVTQLGQELAQKLGLRVRKAYKRPQELETFSLLSNGTAAGVADQVGSGLNQPVSVYPL

SEQ ID NO: 29418 - DNA, 1740 bp, Homo sapiens
aattatcacaacactaatgaagcgtgggcatcgtggcctctcacttgcacgagccccttccgaggccctggaaggcatgcacccttgcaatcctgcctcagcctcccaagtagctggggttacaggctcctgccaccatgcccgactaatttttgtatttttagtagagatgaggtttcaccatgttggccatgctggtcttgaatttctgacctcaggtgatccacccacctcagcctccccaagtgctgggattataggcataagccaccacgcctggccgcatgtgagggctttaatctcccctggcactctaagtgctcctcggtgctgggtcaacagcatagtcacgtggggaggggctggtgctgggtgctgggatcggggccttcccagccacagcgccactgtggccctctccccacagggaacttctaatggattggggtccatagatgacatcgaaacaggtaatgtccccgatacgagggaacaagtggaaattggggccccgagaggtcaggggagtcgagccccctccccatcccagccctgtagatgggagggcctccgaggggttccccaccctggtactccctgaggcatgggagaaaacagtgggttgagagctacagacccactcaaggaggggagggcatctctagtctggcagagaggggtgctgcctcttagctaggtgcaacagtcccatggccttcactcctggctgcctgcacacccccacctcttccaaagccctttcccctcctcttcctcattggcttccagaaaaggttgccttttaagagtgtcccctggagagggcattgcttaccccagaagaaggaggcagcagtggtggacatttaggcattgagcctgggccaaggattgacatcataggactgagggcccctccctgctctggggctgtggccttccttgaccaccccctgagcatctgccagtgggatcagccgatggggaaggcagggctcctggcaagagctgaaagaagaagggaaagtgttggatgagcatcacggggcccgggacgcctcctccaccctcaccaagcagtgctccccttcggctcttgcccaccccatccgcagactgctacgtggaccctcgaggctccccagcccttctcccctccacgcccacgatgcccctgttccctcacgttctggacctgctggcccccctggacagcagcaggaccctccccagcaccgacagcctggatgacttctcagacggggatgtctttggcccagagctggacaccctcctggactcgctggtgagccacaccaccctccttgtgctcccctgatcccctctccccgctgtgtccccattgtcccaggggtggagggaaggccccaatgctcatgtcatgtgtctcaggaggaggcctcagtagggacttgtttggtacagaaatgaagctgcacactgggcacggtggctcacgcctgtaatcccaatactttgggaggccaaggcagcggattacttgaggtcaggaattcgagaccagcctggccaacgtggtgaaaccccctctctactaaaaatacaaaaattagccgggcatggtggcacatgcctgtggtctcagctcctcaggaggctgaggccggagaatcgcttgaacccgggaggcggaggttgcagtgagccgagatcacaccactgcactccagcctgggcagtggagcaagactccgtctc

SEQ ID NO: 29419 - protein, 194 aa, Homo sapiens
MKRGHRGLSLARAPSEALEGMHPCNPASASQVAGVTGSCHHARLIFVFLVEMRFHHVGHAGLEFLTSGDPPTSASPSAGIIGISHHAWPHVRALISPGTLSAPRCWVNSIVTWGGAGAGCWDRGLPSHSATVALSPQGTSNGLGSIDDIETGNVPDTREQVEIGAPRGQGSRAPSPSQPCRWEGLRGVPHPGTP

SEQ ID NO: 29420 - DNA, 796 bp, Homo sapiens
tggacatgcagcagacctatgacatgtggctgaaaaaacacaacccaggaaagcctggagaagggacccccatcagttctcgggaaggggagaagcagatccagatgcccacggactacgcggacatcatggtaacgcctccgccctgcatgctcggggctgcggtcggggctgtggtctgagcctcacctgggaggggcagcctggagggcccagccggccagcgctcagcctctccgaggtgggtggtccgggcagaggtgtgggggagcaggcacccatgatggctgtgctcccagatgggctaccactgctggctctgcggcaagaacagcaacagcaagaagcagtggcagcagcacatccagtccgagaagcacaaggagaaggtcttcacgtccgacagtgacgccagcggctgggccttccgcttccccatgggcgagttccggctctgcgacaggctccagaagggcaaagcctgcccagatggggacaagtgccgctgcgcccatggacaggaggagctcaacgagtggctggaccggcgcgaggtgctgaagcagaagttggccaaggctcgcaaggacatgctgctgtgcccacgggacgacgactttggcaaatacaacttcctgctgcaagaggacggggaccttgccggtgccaccccagaagcccctgctgctgctgccaccgccaccactggggagtagggccaggtgttggccgtgggtgaagtcctggggtcagggggtggggtggggccagaaggcctgatagaagggtcagggca

SEQ ID NO: 29421 - protein, 138 aa, Homo sapiens
MGYHCWLCGKNSNSKKQWQQHIQSEKHKEKVFTSDSDASGWAFRFPMGEFRLCDRLQKGKACPDGDKCRCAHGQEELNEWLDRREVLKQKLAKARKDMLLCPRDDDFGKYNFLLQEDGDLAGATPEAPAAAATATTGE

SEQ ID NO: 29422 - DNA, 2811 bp, Homo sapiens
agctgcctctgaactccctggagcaagcacctcctgctgggctgtgtgagctgcgactggttctcagtggcccctgccatggacatgcctgaggtcctcaagtccctgctggagcactctctgccttggccagagaagagaacagataaggaaaaggggaaggaaaagctggaggaggacgaggccgcagccgccagcaccatggctgtctcagcctccctcatgccacccatctgggacaagaccatcccatatgatggcgaatctttccacctggagtacatggacctggatgagttcctgctggagaatggcatccccgccagccccacccacctggcccacaacctgctgctgcctgtagcagagctagaagggaaggagtctgccagctcttccacagcatccccaccatcctcctccactgccatctttcagccctctgaaaccgtgtccagcacagaatcttccctggagaaggagagggagactcccagtcccatcgaccccaattgtgtggaagtggatgtgaacttcaatccggaccccgccgacctggtgctctccagtgtgccaggcggggagctcttcaaccctcggaagcacaagtttgctgaggaggacctgaagccccagcctatgatcaaaaaggccaagaaggtctttgtccccgacgagcagaaggatgaaaagtactggacaagacgcaagaagaacaacgtggcagctaaacggtcacgggatgcccggcgcctgaaagagaatcagatcaccatccgggcagccttcctggagaaggagaacacagccctgcggacggaggtggccgagctacgcaaggaggtgggcaagtgcaagaccatcgtgtccaagtatgagaccaaatacgggcccttgtaacccgtgccccccgcccgggcggggtactgcctgcacctcagacctctgcctgggggctccctgtaacccctcacacgcgtggagacttatgactcgtcgtgggcgcatggcggcgcacctgctgcaggagcggccacgtctcagcttcattataccatggcctgcgcacgtggcgacgtccctgaggggccagtctcctcactggtggggaacgcaagagaatctgcgtagatgggtgactcagccttagtttctattcttggatgtcccagttgaatcagaaggggacctctggagtacacacctctctcctgggcgctcagggtccctggactctccctcagtctccagcctgggctgccgagggctatctctgcagaatgagttgtgatcattgtcaccctatgtcttctcaggtagcagggcgcgtttccacttaaggtgtgtctgtcacgcacctcattctccccagacagtctttgagtaacatctgttcccatcttccttggaagcaggacacaccagctcctccgtcagtgtctgcatgggtagcaggctgcaggagtggggtctctgcacagcctgggatggggcttggggctggggcctgcagcagaagtgtgcccagcgtttctcggctcccgcaccccttttcccttatggctctgaggccatcggctgtctctgcatttcattggctgtggaggagagactcctaggatggctgctgtctgagccatgagtgccagggctgagagaggcctcttcatttcctctccaggctactcagaggccatgtgaagctcgtttgtcccactagaccaggcctctgggcctgctctttctttccacccaatgtccagtcttggatcatagatttaaaaggaaaacccctcttatctaggaggctttaacttcctggaccccaggattcaccttcctagtggtgtttagaaaatgcctccacagcccccttccaccatgggcatgagagctggggtgtgtttcttgagaagctcccttttttcttgctctgctcaccggtgtggcctgggctggagtgcactctccctgggggcagctggggcctcgcaattcttgcttcaggatctctcccatgcgagctgcccggagggtgtcagcagggcaagacacctagtctagagtcaccaaggtcacagtgccactttcacgggatagcaggctcttgggacttttacacaggcctagggtcccctcagtcttggtcccaggagatgggggccactcgtgaggctggccatgctgtggcttctcacagctgtggtctcccctgcctcacaacgactcctttctcttgtgtggcgggactcgcccttttgctgtgctcagaagattcactgaggaaactcatggaagcctctgctcatttgggtcactgggacacccctgagatgggtgtgtttatttgctcagggcgggcagcctatggtgaagaggagacagaggcgatgggcgtgcttcgtcctccgtaacactggctttatttaccgtggtggttcagagtcccaggccctgacctctaaagacttttcataacagacgttaagaccaagccgtggacctcaccccaggggaatgccacggccctttggggacctgcacacccacctctccgggggacttgacaaggggccctgaggccaagggaggtcactcctccctccaggcccctgacttttactttgtggttctctaaaaaccatgtacacactttcactctattgtaaccacacagggcagaccgtagcccattggccttatgtgcgtgtgtgcgtgcgagtgtgtcactgctggtgggccggagtgatgtggtgggagggaagccgggaatgtatccttttcagacaaaattaaatattttgaaatgag

SEQ ID NO: 29423 - protein, 273 aa, Homo sapiens
MDMPEVLKSLLEHSLPWPEKRTDKEKGKEKLEEDEAAAASTMAVSASLMPPIWDKTIPYDGESFHLEYMDLDEFLLENGIPASPTHLAHNLLLPVAELEGKESASSSTASPPSSSTAIFQPSETVSSTESSLEKERETPSPIDPNCVEVDVNFNPDPADLVLSSVPGGELFNPRKHKFAEEDLKPQPMIKKAKKVFVPDEQKDEKYWTRRKKNNVAAKRSRDARRLKENQITIRAAFLEKENTALRTEVAELRKEVGKCKTIVSKYETKYGPL

SEQ ID NO: 29424 - DNA, 6416 bp, Homo sapiens
gagcaagcacctcctgctgggctgtgtgagctgcgactggttctcagtggcccctgccatggacatgcctgaggtcctcaagtccctgctggagcactctctgccttggccagagaagagaacaggtaggagcacaggtgacctgcattgattggctgcccaggtactcgagggggcgagggggcagccacaggcacagtggcaggacaggcatctccaagccagggagggtctcagcagtggtgcgcccttggtctcagggtgcagagtgcggagaggggttcgaggaggcatgtgtcacaccggctctgggactctctcctaggcctgctggatttggggaagccatggccagtgtgtggccactgacaggtgctgtgctcatgtgggaccaggacaggacagggggtcctattgaaagaatctggctggatgctgactgcttttgaagctccctccccctgtacgctgggggtggcagaggagcggcagggactgtggatttgggcagcaggagcctgggtctgaagcagaggctttccttggtgcgcctgctgcagctcccgcttgccggagggctgaactcatggatgggatggaaactgttatgtaacaggaccacaaggctcgaagccctgcgttcctaggataccacaggcaaaacgcgcgagggaggagagaggagggcgtggactgaggggcagacctggtggccagcaccaggtgtctcccaagtcctgcctgggaaccccatggccagattagtttggcggagaatactgataaatctctctccaaatctcttctgttcccagaagtcagaggtcacccccaggtccccagggctccaactcctccttgcctttagaggggcccagctggcttttgctgcctgagtctgacttgagcacctggggtgtcctctcaggggacctttctcaggcctccctctcatcctgctgtgccagcacctgctacctagcatcaccaggtggccctggttgtccccgcaggactccttccttccacaggacgctctcagcccactcccaaaccagagccaggagacagatcccacagcccccggcctcccttcacccctctggaactgggtgtgggtttgcttgggctaagccaggaaaggagggtcagcaggttctagccccagggagacattgcccgaacggggaaggacgtactgggagcttagggcaggggctccggagctctcgcacgcagctctgggctcaggcccctccgaccacactccatgctgtcaaatggtgggacagtccaggccaccctctgagaagagtgtcacagaaggcgctcctgtggcctcctagcactggggacaccagttgctcaccatgagaagcccacctcctcagcgaagccctctgcaactcagccggagggatctgcccccatttggagtccacacccacaaacaagccacagctgacttttttggcatctctgagtggcctgtgtgggtgggcagagctgaacacatttccaaaagctaaggtagagggtcccctccttggtccaggaacccaggaagggtggtacagtccctcctggctcccccaaggtgtcccaggatgccccccagcacacacatgaagggcgaggctgccagtggggcagggaggattctcaggggcgactcggggcactgctcctcagatgaggataacaaggcctttgaagtgtggcagcagctgccggtctctggctcccagctggtctgtggggccctgcaatagccgaaaagtccccctccctcactgtggatgagcaaagtcagggcctggcacataggggaccgcccaaggtttcaggcagagctttgccgagcactggcaagctgtggccgagaattagttagtccagcatggctgggcaggtccaaggggtgtgggccagtcttgggtcacctcctgtcacttcatgtggcatctcactgagagtgagaagcatgaggtcccacaggaccgacagatgccagcagccaactgctagataaaatgaggggaagagggctgaagagccacaggactcacaatgactgcagcacattactgccccctaatctgcaatcagtttcccaaagctgcccgaatctccagaccatttataaacagaaacgtctacctgaaaagcaatagaccttgttgaaaagagggtatagccaccacacagaatgattacagaattacttgccatcagggaccatgtacttaagtagttgttgaagtggcttctcttccatctgccactgctctgactctgggtgtgaattggagaaagacaacagaggccaggtgctccagaaaacagggatgccctcaggtccgcgtgcccttgctttggtggacttcctgctgctcccgtccagtggaagggggcagttatctctttggatgactgtttacaaactccccattttctcttctttctcctgcccaatggctgtgcttcggcacacatttaggtcatgtgcagagcgtatctcacctccagtgggagggaagtgtacaggaaagtctgcggagtgtgagaaactccaggtgtgctctccccatgctctccgctccgtgcagcctctcactccactttcttttattttctctttcccccttttttttttttgagataagagtcttgctctatcgccaggctggagtgcagtggtgctatctcggctcactgcaacctctgcctcctgggttcaagcaattctcctgcctcagctacccgagtagctgggactacaggcgcccgccaccacgccaggctaatttttgtatttttagtacagatggggtttcaccatgttggccaagatggtctttatctcttgacctcatgatccgcccgcctcagcctcccgaagtgctgggattacaggtgtaaaccactgcgcctggcattttttttttttttttttgagccagtgtctcactctgttgcccaggctggagtgcagtggtgcaacgtcagctcactgtaacctccacctcccgtgttcaagcaattctcctgcctcagtctcctgagtagctaggattacaggcacccgccaccacgcccggctaatttttgtatttttagtagagacaggtttcaccatgttggccaggctggtctcaaactcctgacctccagtgatccagctgcctcagcctcccaaagtgctgggattacaggcgtgagccactgcacccagcctcattccgttttctagttcattgatgccccttgaaacccagacttggggtccctctccctcgtgctgcccctgggcctcccagcccagcccgtgtagaccttgcctctttcctgtccctggataaacagactttctccaccagagctgaccagctcccagactcccttggcttccaacgacaatggcttcttggtggccttcactctaggccatgagttcaaacaatttctcttttggcagagaaatccatttccagcaaaagggtgggtctgtagccaagccctgactcagtttcccctctatgtccctgggccctaaatcctgaaaaccactcttcctgtcttcactcccaacctgtctcccaaggatacttttccaagagttgattctgttccagactgctcactccagctcttaacgtctttctcttccagcttctggaaagacactgtgtctctaaatcatatgattagcattttataccctatacttccctctcccatggggccctggccatgcttagagacacctcctcccattttcttgccatctccggtcactcaggcctccgtttcagggagttgtgaagccggaacatacacctcaaaggctgaacaaggcctttgctttgggctgggcaggcggcatccccacgtaggggcactcctgatctagaatcctttctaggcaaggcagtgtggccctgggaagagagcagggggcttatgatcagagtcaggccacaaatcctaattctacaacccactggttgggacttgcccccctctctctccatctccagactttaaaaagcggaaaagaatatctgtgccatgagcttgttgccaagattaagtgagttatcccatgtgaaagtgtctgcaaaccgtgagatgctgtgctggttttttctgtgaaaggcaaacagcagcatggcctggcgtcgtgcgtcttccacctacatcccatttgcaacctgaccctcattcccttctttccaccttcctttgaagaactggatggtacaagttggtgtgtacacacacacacacggctgtctccttggaaacacatgctgaggctcctagaggcatggtgccatctgccctgcacccaatgggacagccccatttcataacaggcaggatctcagtaggacttgctggggcagaggcaggggtacaggagggggccttggtgtcatcctcttggtggactgagggaaatgagccgagagtgtggactcggtgcagcctgggctctcctgagcttggcctgagtgaagggccctgtgtttgcctccatgcacagcctgggaaccagagcaaaactgagaaatcgaggagtttgctttcagggacgaggatggggagagggccttctatgtgctggatatgctagctcatttaatcctcactgcctctttctaaatggtatatttcccctgttattctggtgagaaaatgaacaaagaggcactggctaccctcagggccagtctctctcttcttccttcccaccctaggtgcccagagccttcttctctacctgccccccaccccatcccttcagagaaatgtgagaaactcattcttaccaagtgccaggcattgacggcatgtcgaggagtgatccttccagatggctaggctgctgcaggacgggctcctgacttgacagccactgtctcctgagcgtgagccaggactgtattgtgtgtgcctatgtcactatctgtgcaatggctctgcaaggaaggtatgatcatccactctacgaataaggacatcgacgctcagagagaggaaaggccacacagttgttgaaggattcaaacccagttcctcctgacaccaggctcgtgtctacccatagggtgggtacccatgtgggtaccatgtctcgggtcgtagctcttcgtcacccagccactcatcacgtgcttccagagcgtttgctatgcttggagagcccggggtgaatgaaaccaactctactcttgctcccctggtgtttggattctagaggggagagagaatctgctgtgtttaggcaggaggcggtggtggtcaggaccagcctctcccagggagaggcatttgaactgaggcctggaggcctggagggtgaggaagagccagctacccgaggaactttcaggctgtgggaagagcacctgcaaaggcccttcctgggacaggaaagaaaacgggtctgaggaataaaaggccaccatggctgcagaaagcaagcaagggggagaggggtaccaggtgaggctggagagacccgaagggcgagcacctgcagagctttgacggtcataaagaggagtgacgctctcatctccctgtctgtaaggaccctcacactcactattcttggggaagtggctggtggggagaaattaggtatccccagaacaacccaagcaggaattacagtagagttaactttgaccgagcacatgctataggccaggtggtgtcctagcactgtgcctgaatggactactttacttcggacaccacggtacagagaagttcaacaatttgtccaaggtcaccaagaaatacagttaacccttgaataccacagggattaggaatgctgccccgccatgcagtagaaaatctgcatataatttttgactccccaaaagcttaaccactaatagcttattgttgatgggaagccttacagataacatcaacagtccatgaacatatattttgtatgctatatgtattagatagtatatttttcttttttttttagacggagtctcactctgtcgcccaggctggagtgtggtggcgtgatctaggctcattgcaacctccgcctcccaggttcaagcaattctcctgcctcaacctcctgagtagctgggattatgggcgcccaccaccacgcccagataatttttgtatttttagtagagacgaggtgtcaccatcttggccaggctggtcttgaatccagcctggacaactgagcaagactctgtctcaaaaaaaaaaaaaaattagccaggcaaggcagtgcacacctgaaatccgagctactctggaggctggggcaggaggattgcttgagaccagcagttcaaggctgcagtgagctatgacagcatcactgcactccagcctgggggacagagcaaaactgtctcaaa

SEQ ID NO: 29425 - protein, 33 aa, Homo sapiens
MGAHHHAQIIFVFLVETRCHHLGQAGLESSLDN

SEQ ID NO: 29426 - DNA, 4366 bp, Homo sapiens
cggcagctgcagcgggtcgcacggctccggcccatctcggggggcgggcgggggaggcgaggtgcgcgagccgagtccggggcacgatgtccgacgcgggcggcggaaagaagccgcctgtggacccgcaggcaggacccggtccggggccggggcgcgcagctggggaaaggggcctgtcggggtccttccccctggtcctgaagaagctgatggagaaccccccgcgcgaggcgcgcctcgataaggaaaaggggaaggaaaagctggaggaggacgaggccgcagccgccagcaccatggctgtctcagcctccctcatgccacccatctgggacaagaccatcccatatgatggcgaatctttccacctggagtacatggacctggatgagttcctgctggagaatggcatccccgccagccccacccacctggcccacaacctgctgctgcctgtagcagagctagaagggaaggagtctgccagctcttccacagcatccccaccatcctcctccactgccatctttcagccctctgaaaccgtgtccagcacagaatcttccctggagaaggagagggagactcccagtcccatcgaccccaattgtgtggaagtggatgtgaacttcaatccggaccccgccgacctggtgctctccagtgtgccaggcggggagctcttcaaccctcggaagcacaagtttgctgaggaggacctgaagccccagcctatgatcaaaaaggccaagaaggtctttgtccccgacgagcagaaggatgaaaagtactggacaagacgcaagaagaacaacgtggcagctaaacggtcacgggatgcccggcgcctgaaagagaatcagatcaccatccgggcagccttcctggagaaggagaacacagccctgcggacggaggtggccgagctacgcaaggaggtgggcaagtgcaagaccatcgtgtccaagtatgagaccaaatacgggcccttgtaacccgtgccccccgcccgggcggggtactgcctgcacctcagacctctgcctgggggctccctgtaacccctcacacgcgtggagacttatgactcgtcgtgggcgcatggcggcgcacctgctgcaggagcggccacgtctcagcttcattataccatggcctgcgcacgtggcgacgtccctgaggggccagtctcctcactggtggggaacgcaagagaatctgcgtagatgggtgactcagccttagtttctattcttggatgtcccagttgaatcagaaggggacctctggagtacacacctctctcctgggcgctcagggtccctggactctccctcagtctccagcctgggctgccgagggctatctctgcagaatgagttgtgatcattgtcaccctatgtcttctcaggtagcagggcgcgtttccacttaaggtgtgtctgtcacgcacctcattctccccagacagtctttgagtaacatctgttcccatcttccttggaagcaggacacaccagctcctccgtcagtgtctgcatgggtagcaggctgcaggagtggggtctctgcacagcctgggatggggcttggggctggggcctgcagcagaagtgtgcccagcgtttctcggctcccgcaccccttttcccttatggctctgaggccatcggctgtctctgcatttcattggctgtggaggagagactcctaggatggctgctgtctgagccatgagtgccagggctgagagaggcctcttcatttcctctccaggctactcagaggccatgtgaagctcgtttgtcccactagaccaggcctctgggcctgctctttctttccacccaatgtccagtcttggatcatagatttaaaaggaaaacccctcttatctaggaggctttaacttcctggaccccaggattcaccttcctagtggtgtttagaaaatgcctccacagcccccttccaccatgggcatgagagctggggtgtgtttcttgagaagctcccttttttcttgctctgctcaccggtgtggcctgggctggagtgcactctccctgggggcagctggggcctcgcaattcttgcttcaggatctctcccatgcgagctgcccggagggtgtcagcagggcaagacacctagtctagagtcaccaaggtcacagtgccactttcacgggatagcaggctcttgggacttttacacaggcctagggtcccctcagtcttggtcccaggagatgggggccactcgtgaggctggccatgctgtggcttctcacagctgtggtctcccctgcctcacaacgactcctttctcttgtgtggcgggactcgcccttttgctgtgctcagaagattcactgaggaaactcatggaagcctctgctcatttgggtcactgggacacccctgagatgggtgtgtttatttgctcagggcgggcagcctatggtgaagaggagacagaggcgatgggcgtgcttcgtcctccgtaacactggctttatttaccgtggtggttcagagtcccaggccctgacctctaaagacttttcataacagacgttaagaccaagccgtggacctcaccccaggggaatgccacggccctttggggacctgcacacccacctctccgggggacttgacaaggggccctgaggccaagggaggtcactcctccctccaggcccctgacttttactttgtggttctctaaaaaccatgtacacactttcactctattgtaaccacacagggcaggcgcatccagcatgtcagtgtcctgccccgggcagctctccctcccgggcacgctccctctggcctggtggatcaccaagagggcggttctcattttgttattagtggaagagccttgagcttaaaagctcttcattttctttgccggaaagtatatggtttgtgtttttgcagttttatttttttaaggatggacactaaatctctggtgtccatgttccgagcccggtggctgggatggtggctcgatgtgtctcctctttatcccgccctctgcctgtttggtgccctcccttctttcccccaggcagtgggtatcgggttctttcccaaagtgcttacttggaaagagtgtggctgctggactcttttcgaaatgcccctctgagtcaggagcctggtggggacaagatggaggatgtccacagaggctgacctgtgggggaaaagaagtgctcaggtaaggttgtctcctctcctgtcctaaaaaaatccatgcttgcaggagagggttggtgcctgctcagtttctgtcgagggaatgggagtctcctcggctccctcctgggccctctgcttcttggaggccgaccgctggagactgcggctcctgtgcttggatctttgacatctgtcagtcactggaggctagagaagttgactttaccttggctttctgtgggttcccgatgggcttggaagtgccgtctacttcctaagcatcctgtctaaagctttgtggcaccctcagtgcaacctcagaacagacaaatcatgaatgagctggaactttgcaagaatattcatattataaatgtctcatctgatggaggaacgtgtgcatttagagagagggagagttttcaaggtttatggcaactttgtggaggacctgggtaactcttacccttggccaaaggaagaggttttcctgtctggcttctgaggttggagggggcacttagcagtgaaccttaagtctgggtacatgtaaccctgctgaggggctgtgcaggccgctcctacggtcctttggcctgaggcagggcgggaggcatgcaagccagtgggggaaaacccctctgaagctgggcagccctctacctgggccccgggagccgtgctccttggaacgcaaagggccgaggagcatctggttttcatggcaaagctctactccagagctcctttaacatctgctaattaagtgcaataaatttttctagaaaatggcaaagatgacttccaggtggatattgctctcttacggtgttggggatgccagaacaccacttggttttatttttctaagtgcatgtgatgtgatagagtgtgtggggctctgtgtccttccctgggagctggcattccagcgggcccctctctttacctttgttgggggaaggaggcaagagagaaattccttcttcccagccagagagggcagaagcagaccgtagcccattggccttatgtgcgtgtgtgcgtgcgagtgtgtcactgctggtgggccggagtgatgtggtgggagggaagccgggaatgtatccttttcagacaaaattaaatattttgaaatgagaatg

SEQ ID NO: 29427 - protein, 303 aa, Homo sapiens; identical to SEQ ID NO: 4049

SEQ ID NO: 29428 - DNA, 581 bp, Homo sapiens
tggcccacaacctgctgctgcctgtagcagagctagaagggaaggagtctgccagctcttccacagcatccccaccatcctcctccactgccatctttcagccctctgaaaccccgtgctccttggaacgcaaagggccgaggagcatctggttttcatggcaaagctctactccagagctcctttaacatctgctaattaagtgcaataaatttttctagaaaatggcaaagatgacttccaggtggatattgctctcttacggtgttggggatgccagaacaccacttggttttatttttctaagtgcatgtgatgtgatagagtgtgtggggctctgtgtccttccctgggagctggcattccagcgggcccctctctttacctttgttgggggaaggaggcaagagagaaattccttcttcccagccagagagggcagaagcagaccgtagcccattggccttatgtgcgtgtgtgcgtgcgagtgtgtcactgctggtgggccggagtgatgtggtgggagggaagccgggaatgtatccttttcagacaaaattaaatattttgaaatgagaatg

SEQ ID NO: 29429 - protein, 76 aa, Homo sapiens [sequence omitted]

SEQ ID NO: 29430 - DNA, 1246 bp, Homo sapiens
ccctgcctcacaacgactcctttctcttgtgtggcgggactcgcccttttgctgtgctcagaagattcactgaggaaactcatggaagcctctgctcatttgggtcactgggacacccctgagatgggtgtgtttatttgctcagggcgggcagcctatggtgaagaggagacagaggcgatgggcgtgcttcgtcctccgtaacactggctttatttaccgtggtggttcagagtcccaggccctgacctctaaagacttttcataacagacgttaagaccaagccgtggacctcaccccaggggaatgccacggccctttggggacctgcacacccacctctccgggggacttgacaaggggccctgaggccaagggaggtcactcctccctccaggcccctgacttttactttgtggttctctaaaaaccatgtacacactttcactctattgtaaccacacagggcaggcgcatccagcatgtcagtgtcctgccccgggcagctctccctcccgggcacgctccctctggcctggtggatcaccaagagggcggttctcattttgttattagtggaagagccttgagcttaaaagctcttcattttctttgccggaaagtatatggtttgtgtttttgcagttttatttttttaaggatggacactaaatctctggtgtccatgttccgagcccggtggctgggatggtggctcgatgtgtctcctctttatcccgccctctgcctgtttggtgccctcccttctttcccccaggcagtgggtatcgggttctttcccaaagtgcttacttggaaagagtgtggctgctggactcttttcgaaatgcccctctgagtcaggagcctggtggggacaagatggaggatgtccacagaggctgacctgtgggggaaaagaagtgctcaggtaaggttgtctcctctcctgtcctaaaaaaatccatgcttgcaggagagggttggtgcctgctcagtttctgtcgagggaatgggagtctcctcggctccctcctgggcccttctctttacctttgttgggggaaggaggcaagagagaaattccttcttcccagccagagagggcagaagcagaccgtagcccattggccttatgtgcgtgtgtgcgtgcgagtgtgtcactgctggtgggccggagtgatgtggtgggagggaagccgggaatgtatccttttcagacaaaattaaatattttgaaatgag

SEQ ID NO: 29431 - protein, 87 aa, Homo sapiens
MLAGEGWCLLSFCRGNGSLLGSLLGPSLYLCWGKEAREKFLLPSQRGQKQTVAHWPYVRVCVRVCHCWWAGVMWWEGSRECILFRQN

SEQ ID NO: 29432 - DNA, 287 bp, Homo sapiens
ggccctgcctgaagcctggataggaagctgggattttctcttcaatacgcagtaagtttcttgccccgtggttgccttatctgtagctaggggcaaagacaataagagagctttctcggccgggtgcagtggctcatgcctgtaatccacaatgaacatacctattaaaacagctaaaatgaaagagactgtacacaccaaatgctggtgaagatgtgcaggaattagtaactttatatactgctgatgagaatgtaaaatggtacaaccattttggaaaataatgt

SEQ ID NO: 29433 - protein, 33 aa, Homo sapiens
KRLYTPNAGEDVQELVTLYTADENVKWYNHFGK

SEQ ID NO: 29434 - DNA, 219 bp, Homo sapiens
gggggctccaggccatagcatgggccctgcctgaagcctggataggaagctgggattttctcttcaatacgcagtaagtttcttgccccgtggttgccttatctgtagctaggggcaaagacaataagagagctttctcggccgggttgcagtgagccgagatcacaccattgcactctagcctggtgacagagtgagactccgtctcaaaaaaaaaaa

SEQ ID NO: 29435 - DNA, 4687 bp, Homo sapiens
gcaacccggccccaggtggtccccggccctcacggagcgcccctgggagaacacctcacacgacgcgcacaagttcagagtggtatgggaatgaaggaaaggagtgcggcgcggcgctgtgacagggaggggaagacggggagccggacgcacgaccggcgagcacagaagggcacaggagctgctccgcgagataccagcgagctgaggcgcggggctggctgggaagtagtcccggccgggccctggccccgcccctgcagggcggagggacgcatcacgcaggggtggggaagccggatccgtgcgcagggttgctaagggtgaaacttttcattgactttgctcacttcgggccggggcgcgggaaggtgcgggttgttggctgaggcaagccgtggctcgggcgacgcggggccaggagggcaggaccgtctgccggcgacagcccataccgtctgccgttgcgcgacacgaaccaccctccgatccgccatccccgcgtcgtcgccgctagtccgcccgcccgccctcgggccccccgctgccgagcccgacctcctaagagctgaaagaaattattgagagtcatagtccatagccccctgcttcgtcccccaaccctcaacgacgaaaaggacttcggtcccctggcccggcgacgcccgggaaggaaaggagagcgacctccgccccgcgctcaggccaccctggagggagaagccgccccgcggccggtagagcgccccgccgccgcggagacccgaagccgcctggagcccaaggctgtacacgtgccctgtgctgattctctgcctaggaaaggaccatgcagctagagatcaaagtggccctgaacttcatcatctcctacttgtacaacaagctgccccggcgccgggcagacctgtttggggaggagctagagcggcttttgaaaaagaaatatgaaggccactggtaccctgagaagccactgaaaggctctggcttccgctgtgttcacattggggagatggtggaccccgtggtggagctggccgccaagcggagtggcctggcggtggaagatgtgcgggccaatgtgcctgaggagctgagtgtctggattgatccctttgaggtgtcctaccagattggtgagaagggagctgtgaaagtgctgtacctggatgacagtgagggttgcggtgccccagagctggacaaggagatcaagagcagcttcaaccctgacgcccaggtgttcgtgcccattggcagccaggacagctccctgtccaactccccatcgccatcctttggccagtcacccagccctaccttcattccccgctccgctcagcccatcaccttcaccaccgcctccttcgctgccaccaaatttggctccactaagatgaagaaggggggcggggcagcaagtggtgggggtgtagccagcagtggggcgggtggccagcagccaccacagcagcctcgcatggcccgctcacccaccaacagcctgctgaagcacaagagcctctctctgtctatgcattcactgaacttcatcacggccaacccggcccctcagtcccagctctcacccaatgccaaggagttcgtgtacaacggtggtggctcacccagcctcttctttgatgcggccgatggccagggcagcggcaccccaggcccgtttggaggcagtggggctggcacctgcaacagcagcagctttgacatggcccaggtatttggaggtggtgccaacagcctcttcctggagaagacaccctttgtggaaggcctcagctacaacctgaacaccatgcagtatcccagccagcagttccagcccgtggtgctggccaactgaccatctacctgcccgtggggccaggagcacccaagaccacagaaaagagaaaggaaaggccaaaaaaaagaggaaaagaaaaatgtacaaaaagattttcgatcttctcactcttacttctagaaaaaagatccagcccaggcacggaatgggagggccctgcaaagcacccaagtgtgtttcactcaccccttaccgctcgcccaccggcctgtgatttatttggttggtttgggttttatatttctttttcttttttttttttcttacatgtagttttctatataacatctttaatgagtggcttcctgtgctaagaatggtccagatgtgaactgctgctccctgctcctcccttcctccttcacactcctagtttaggattgatgtgtccaagctcatagggaagaaagagctgcagctggagcctgaccctccctggaacagggagaggctggcccgtgtcactgcctctgtcacccagctatcctcgcactcaaagccatccaacctcagcaggccttctcgggccctgccacctgaataggtctgaccccagtccccactccctttcaggctgggccacagggagttgctggctggccacttgacaccctccccctggagctgatgtctgtgactacagggagattagcacttcgtctagtgaaactcctttcatctctgtcctatggccccaccccaccattccctctaggcccagaccatcatcatggccctggccattgatgtgtatgggctttctttccctcatgcagccccttcttccccaggctggatgttgtgggtagggaggggtgtgtgtgtgtgtatttggtttgctgtccttttttaaaggattccaagccatgtgaaacttcccttctggatgtgattctgggtcgcaagtccttatttatatgtgaggctggggaatgggctgggggtattggcagtccttttgcagggcagtgtgtgtggtggggtgacaccgctgtggcttagcccaagacactcccagaggaaaacactgcagaaggaactggtttgcagactgtggaaggatctgcagttttgtttttgaccaaaaaaataataataagttagctctgaagggcagagggaatacccaagcccctgatgcctatgagaagtccctggacttcaaccctcctgttgtttggccttagcccagagggagctgctcacctgagcacccttgggggtgggcagagaggcagggtgggattttagagttagtgtctgtgcgggggcagccctgagcctggagttgagactttggggtctcttagtttggaggtgttgagtgcatttgtgcccctgcctggttgagagcttcttggtacctcttgccaccccttctcactgccctgacccaaccccactggaccttgatgctgcgaggagtggtgtcctgacggactcagcactcccgcctgatgtattggatcataggagagcacttgctctcctgcctctgccaggagagggcttgttcctccaactctaggaggccaggcaagcatggacaggagccaagggagcagggtcattaactttttcttctttgcaaagtgggcacttggcatcagggtcccaatcaccagaaagcaccaaagcccctggcaccccacccactccatcctacccagggaccccaagtaggcaactgttatggcagtgggtccagcccaggccagcactgccagcctcctctccctgcagtaggcaccagctctacctcccccggcaggcaatgtcctggcttctcagcccagcaccatctgttcccctagacttctcaggggccagcccagtctgggccaccctttgtttccctcatcctcggctcccacacaggtgacagacccagcagatagcttctctctgggaaaggttggatgctgccttacatccccttctagccctcctcccatccacacacacaggcacccacccacaccaggtcggcttgtttctcacatgtagggagagaggggagaccaacccctttgtgtcttttgaaatacgaagaaaaatgtgtgttcaggagcatgactccagtgctgcgctcttgggcccagttcagtctgtcttgtctcaaatctaggcatttttgcttcaattttattttttttaagaatacaaaaacagaaatctgcactaatttacctggtttcgtaggaaaacttttttttattttttacattttttggtgtccgtttgtattgaataatttgctacatttgtaaaatgtaagaggtatataatatatgtatatttctaacgtaaaaaacataatttttttcttttcaagattttttcttaaaaagatgagagaaacatattttttcaggaaaaacaaactttaaaaaaaaaagaggagaaataaaaccttttctcccctttccccatcctctatctatccctctttcccaggaacaaatcaaaaggtggattatcttctgaagaatggaaactgttagtccagaatgatgtgtttttctcaatgcagtgagttatagattctctagttttctccctagggatgggaagggggcattgaggcaagcctggagaggagcccggggagcagggtcatgaacttttttctttagtgaaggaggaatacaatcaagggttttgtattcagaatgttgtgcaatattttggaatgggacattggtgtgtttagagattttagtttaaaaacaaaacaaaaagattgatcaaatctgtacagtttctattgttccagatttttttaagtttgtattaaaagcatgatacataatagccttc

SEQ ID NO: 29436 - protein, 344 aa, Homo sapiens; identical to SEQ ID NO: 4051

SEQ ID NO: 29437 - DNA, 1168 bp, Homo sapiens
gaatgggctgggggtattggcagtccttttgcagggcagtgtgtgtggtggggtgacaccgctgtggcttagcccaagacactcccagaggaaaacactgcagaaggaactggtttgcagactgtggaaggatctgcagttttgtttttgaccaaaaaaataataataagttagctctgaagggcagagggaatacccaagcccctgatgcctatgagaagtccctggacttcaaccctcctgttgtttggccttagcccagagggagctgctcacctgagcacccttgggggtgggcagagaggcagggtgggattttagagttagtgtctgtgcgggggcagccctgagcctggagttgagactttggggtctcttagtttggaggtgttgagtgcatttgtgcccctgcctggttgagagcttcttggtacctcttgccaccccttctcactgccctgacccaaccccactggaccttgatgctgcgaggagtggtgtcctgacggactcagcactcccgcctgatgtattggatcataggagagcacttgctctcctgcctctgccaggagagggcttgttcctccaactctaggaggccaggcaagcatggacaggagccaagggagcagggtcattaactttttcttctttgcaaagtgggcacttggcatcagggtcccaatcaccagaaagcaccaaagcccctggcaccccacccactccatcctacccagggaccccaagtaggcaactgttatggcagtgggtccagcccaggccagcactgccagcctcctctccctgcagtaggcaccagctctacctcccccggcaggcaatgtcctggcttctcagcccagcaccatctgttcccctagacttctcaggggccagcccagtctgggccaccctttgtttccctcatcctcggctcccacacaggtgacagagcccggggagcagggtcatgaacttttttctttagtgaaggaggaatacaatcaagggttttgtattcagaatgttgtgcaatattttggaatgggacattggtgtgtttagagattttagtttaaaaacaaaacaaaaagattgatcaaatctgtacagtttctattgttccagatttttttaagtttgtattaaaagcatgatacataat

SEQ ID NO: 29438 - protein, 46 aa, Homo sapiens [sequence omitted]

SEQ ID NO: 29439 - DNA, 1206 bp, Homo sapiens
ccagagggagctgctcacctgagcacccttgggggtgggcagagaggcagggtgggattttagagttagtgtctgtgcgggggcagccctgagcctggagttgagactttggggtctcttagtttggaggtgttgagtgcatttgtgcccctgcctggttgagagcttcttggtacctcttgccaccccttctcactgccctgacccaaccccactggaccttgatgctgcgaggagtggtgtcctgacggactcagcactcccgcctgatgtattggatcataggagagcacttgctctcctgcctctgccaggagagggcttgttcctccaactctaggaggccaggcaagcatggacaggagccaagggagcagggtcattaactttttcttctttgcaaagtgggcacttggcatcagggtcccaatcaccagaaagcaccaaagcccctggcaccccacccactccatcctacccagggaccccaagtaggcaactgttatggcagtgggtccagcccaggccagcactgccagcctcctctccctgcagtaggcaccagctctacctcccccggcaggcaatgtcctggcttctcagcccagcaccatctgttcccctagacttctcaggggccagcccagtctgggccaccctttgtttccctcatcctcggctcccacacaggtgacagacccagcagatagcttctctctgggaaaggttggatgctgccttacatccccttctagccctcctcccatccacacacacaggcacccacccacaccaggtcggcttgtttctcacatgtagggagagaggggagaccaacccctttgtgtcttttgaaatacgaagaaaaatgtgtgttcaggagcatgactccagtgctgcgctcttgggcccagttcagtctgtcttgtctcaaatctaggcatttttgcttcaattttattttttttaagaatacaaaaacagaaatctgcactaatttacctggtttcgtaggaaaacttttttttattttttacattttttggtgtccggttttgtattcagaatgttgtgcaatattttggaatgggacattggtgtgtttagagattttagtttaaaaacaaaacaaaaagattgatcaaatctgtacagtttctattgttccagatttttttaagtttgtattaaaagcatgatacataa

SEQ ID NO: 29440 - protein, 78 aa, Homo sapiens
MTPVLRSWAQFSLSCLKSRHFCFNFIFFKNTKTEICTNLPGFVGKLFFIFYIFWCPVLYSECCAIFWNGTLVCLEILV

SEQ ID NO: 29441 - DNA, 1092 bp, Homo sapiens
ggcaggaacaatgggggttaaaggtcggacggaagttcccgaagcttccggtggccggcttagttaggagctatggctaaacatcatcctgatttgatcttttgccgcaagcaggctggtgttgccatcggaagactgtgtgaaaaatgtgatggcaagtgtgtgatttgtgactcctatgtgcgtccctgcactctggtgcgcatatgtgatgagtgtaactatggatcttaccaggggcgctgtgtgatctgtggaggacctggggtctctgatgcctattattgtaaggagtgcaccatccaggagaaggacagagatggctgcccaaagattgtcaatctggggagctctaagacagacctcttctatgaacgcaaaaaatacggcttcaagaagaggtgattggtgggtggccccttcctccccccaacatcagtctgctgcagctgccagaaaacatgcctactactaccagcagaaagggagcagagcccagagcatcaccaggagtgcctgctagtgtactggcagcttgccaccccctcctctcccttcacccagacacgtggtagggatggaaaaggattcttcacagagcactctggcacaccatatcggagaaaacttgatagattagttaatggtttttcttgaattcgagaagcaaagatctgttctccatattggtatgttctccctcaaccaagatcttctaaaaagaaataatattttagtcttctgcttgaggaactgactgtgaagcgacgcccagtgaaaaacatgttcttgcagcagctctggtggcagctgtccttgaggaacctttggtgtgtggtgggaagctatcagaacaagaaatgtaggcatttcccgttttttttggggggggggtgggggggcagggctctgccctcttgaaaggcatttacttgtttaacacttgtccagctacagtggggtacagtagctggctattcacaggcatcatcatagcccactagtctcatattattttccttttgagaaattggaaactctttctgttgctattatattaataaagttggtgtttattttctggtagtcacc

SEQ ID NO: 29442 - protein, 110 aa, Homo sapiens; identical to SEQ ID NO: 4053

SEQ ID NO: 29443 - DNA, 692 bp, Homo sapiens
gctgcccaaagattgtcaatctggggagctctaagacagacctcttctatgaacgcaaaaaatacggcttcaagaagaggtgattggtgggtggccccttcctccccccaacatcagtctgctgcagctgccagaaaacatgcctactactaccagcagaaagggagcagagcccagagcatcaccaggagtgcctgctagtgtactggcagcttgccaccccctcctctcccttcacccagacacgtggtagggatggaaaaggattcttcacagagcactctggcacaccatatcggagaaaacttgatagattagttaatggtttttcttgaattcgagaagcaaagatctgttctccatattggtatgttctccctcaaccaagatcttctaaaaagaaataatattttagtcttctgcttgaggaactttggtgtgtggtgggaagctatcagaacaagaaatgtaggcatttcccgttttttttggggggggggtgggggggcagggctctgccctcttgaaaggcatttacttgtttaacacttgtccagctacagtggggtacagtagctggctattcacaggcatcatcatagcccactagtctcatattattttccttttgagaaattggaaactctttctgttgctattatattaataaagttggtgtttattttctggta

SEQ ID NO: 29444 - protein, 74 aa, Homo sapiens
MVFLEFEKQRSVLHIGMFSLNQDLLKRNNILVFCLRNFGVWWEAIRTRNVGISRFFWGGGGGAGLCPLERHLLV

SEQ ID NO: 29445 - DNA, 895 bp, Homo sapiens
gcttatagaccagaagtaattaacaaacacctactatgtgctagacaccctacaggggatacctctggatgacttacagggacagcaccaaaatacaagtaccatgcttgcaccgcatgtcaggcactgtatcatgacctaaagaaaaggagaggcaaatagacaaaccaaagtcctgcctctaatgaagtgtaatctagctagtagactagatttggattttcggacagcagaatgtgacttgatagttgaaggtaaatgcaaatcagagttgaggacaagagaaaggtccaaatcattatgtttttggtacttcaggacctttctcatctccctaaacaacagaagattcaatggtgtactcactttttttttttgagcaggagaatcgcttgaacccaggaggcggaggctgtggtgagccgagatggcgccactgcactccagcctggacaacaagagtgaaactccatctcaaaaaataaataaataaataaataaataaaaggacaacatagtgaaataaggacactacaaggtttagttgaacagcctgggcttgtcagaggaactacaaaatgggcatcataataataatccctatttcacaaacttattgtgaggaacaaggtgtgataacatctataaaagacctattcttcgctcatgggaatatgaagaattacgcatcttttgccttattctgaattagaattaaattagataactaggtaccatcattaacctagtgagactgtatcatacttccttttgttttttgaagaaaacaagctgattcatagttttctcccacaaagaaccctgctgccaatactaaccgaaaaaaatggggtaaatcttgcctgtagcactagtctataagctctctctcctg

SEQ ID NO: 29446 - protein, 45 aa, Homo sapiens [sequence omitted]

SEQ ID NO: 29447 - DNA, 855 bp, Homo sapiens
gagatggggtctcttgctctgtggcccaggctggggtgcagtggcatgatcatgtgcaaggctcatgcactccagcctgggtgacagagaccctgtctgtttataagtcctgtacagcccatgttgtgtcatagccacttaaatctatcattaagcactatttgggtgtatatcgtgacaaagttgaatttgggacaattcaagttgacttcagctttaagcaggtaacagatgcctttggtttaatattgcagaaatgattgtggacctgcatcgtgattttttttgtcccttgacactgtgtagtggcagtggctactttctattcaactctgagccaaatgccaggagagagagcttatagactagtgctacaggcaagatttaccccatttttttcggttagtattggcagcagggttctttgtgggagaaaactatgaatcagcttgttttcttcaaaaaacaaaaggaagtatgatacagtctcactaggttaatgatggtacctagttatctaatttaattctaattcagaataaggcaaaagatgcgtaattcttcatattcccatgagcgaagaataggtcttttatagatgttatcacaccttgttcctcacaataagtttgtgaaatagggattattattatgatgcccattttgtagttcctctgacaagcccaggctgttcaactaaaccttgtagtgtccttatttcactatgttgtccttttatttatttatttatttatttattttttgagatggagtttcactcttgttgtccaggctggagtgcagtggcgccatctcggctcaccacagcctccgcctcctgggttcaagcgattc

SEQ ID NO: 29448 - protein, 35 aa, Homo sapiens
MLCHSHLNLSLSTIWVYIVTKLNLGQFKLTSALSR

SEQ ID NO: 29449 - DNA, 2775 bp, Homo sapiens
ggcgccgtgtgggacgtcactttaatgcgacctcatctttgtcagtgcacaaaatggcgccctacagcctactggtgactcggctgcagaaagctctgggtgtgcggcagtaccatgtggcctcagtcctgtgccaacgggccaaggtggcgatgagccactttgagcccaacgagtacatccattatgacctgctagagaagaacattaacattgttcgcaaacgactgaaccggccgctgacactctcggagaagattgtgtatggacacctggatgaccccgccagccaggaaattgagcgaggcaagtcgtacctgcggctgcggccggaccgtgtggccatgcaggatgcgacggcccagatggccatgctccagttcatcagcagcgggctgtccaaggtggctgtgccatccaccatccactgtgaccatctgattgaagcccaggttgggggcgagaaagacctgcgccgggccaaggacatcaaccaggaagtttataatttcctggcaactgcaggtgccaaatatggcgtgggcttctggaagcctggatctggaatcattcaccagattattctggaaaactatgcgtaccctggtgttcttctgattggcactgactcccacacccccaatggtggcggccttgggggcatctgcattggagttgggggtgccgatgctgtggatgtcatggctgggatcccctgggagctgaagtgccccaaggtgattggcgtgaagctgacgggctctctctccggttggtcctcacccaaagatgtgatcctgaaggtggcaggcatcctcacggtgaaaggtggcacaggtgcaatcgtggaataccacgggcctggtgtagactccatctcctgcactggcatggcgacaatctgcaacatgggtgcagaaattggggccaccacttccgtgttcccttacaaccacaggatgaagaagtacctgagcaagaccggccgggaagacattgccaatctagctgatgaattcaaggatcacttggtgcctgaccctggctgccattatgaccaactaattgaaattaacctcagtgagctgaagccacacatcaatgggcccttcacccctgacctggctcaccctgtggcagaagtgggcaaggtggcagagaaggaaggatggcctctggacatccgagtgggtctaattggtagctgcaccaattcaagctatgaagatatggggcgctcagcagctgtggccaagcaggcactggcccatggcctcaagtgcaagtcccagttcaccatcactccaggttccgagcagatccgcgccaccattgagcgggacggctatgcacagatcttgagggatctgggtggcattgtcctggccaatgcttgtggcccctgcattggccagtgggacaggaaggacatcaagaagggggagaagaacacaatcgtcacctcctacaacaggaacttcacgggccgcaacgacgcaaaccccgagacccatgcctttgtcacgtccccagagattgtcacagccctggccattgcgggaaccctcaagttcaacccagagaccgactacctgacgggcacggatggcaagaagttcaggctggaggctccggatgcagatgagcttcccaaaggggagtttgacccagggcaggacacctaccagcacccacccaaggacagcagcgggcagcatgtggacgtgagccccaccagccagcgcctgcagctcctggagccttttgacaagtgggatggcaaggacctggaggacctgcagatcctcatcaaggtcaaagggaagtgtaccactgaccacatctcagctgctggcccctggctcaagttccgtgggcacttggataacatctccaacaacctgctcattggtgccatcaacattgaaaacggcaaggccaactccgtgcgcaatgccgtcactcaggagtttggccccgtccctgacactgcccgctactacaagaaacatggcatcaggtgggtggtgatcggagacgagaactacggcgagggctcgagccgggagcatgcagctctggagcctcgccaccttgggggccgggccatcatcaccaagagctttgccaggatccacgagaccaacctgaagaaacagggcctgctgcctctgaccttcgctgacccggctgactacaacaagattcaccctgtggacaagctgaccattcagggcctgaaggacttcacccctggcaagcccctgaagtgcatcatcaagcaccccaacgggacccaggagaccatcctcctgaaccacaccttcaacgagacgcagattgagtggttccgcgctggcagtgccctcaacagaatgaaggaactgcaacagtgagggcagtgcctccccgccccgccgctggcgtcaagttcagctccacgtgtgccatcagtggatccgatccgtccagccatggcttcctattccaagatggtgtgaccagacatgcttcctgctccccgcttagcccacggagtgactgtggttgtggtgggggggttcttaaaataactttttagcccccgtcttcctattttgagtttggttcagatcttaagcagctccatgcaactgtatttatttttgatgacaagactcccatctaaagtttttctcctgcctgatcatttcattggtggctgaaggattctagagaaccttttgttcttgcaaggaaaacaagaatccaaaaccagtgactgttctgtgagtg

SEQ ID NO: 29450 - protein, 780 aa, Homo sapiens; identical to SEQ ID NO: 4055

SEQ ID NO: 29451 - DNA, 3015 bp, Homo sapiens
ggcgccgtgtgggacgtcactttaatgcgacctcatctttgtcagtgcacaaaatggcgccctacagcctactggtgactcggctgcagaaagctctgggtgtgcggcagtaccatgtggcctcagtcctgtgccaacgggccaaggtggcgatgagccactttgagcccaacgagtacatccattatgacctgctagagaagaacattaacattgttcgcaaacgactgaaccggccgctgacactctcggagaagattgtgtatggacacctggatgaccccgccagccaggaaattgagcgaggcaagtcgtacctgcggctgcggccggaccgtgtggccatgcaggatgcgacggcccagatggccatgctccagttcatcagcagcgggctgtccaaggtggctgtgccatccaccatccactgtgaccatctgattgaagcccaggttgggggcgagaaagacctgcgccgggccaaggacatcaaccaggaagtttataatttcctggcaactgcaggtgccaaatatggcgtgggcttctggaagcctggatctggaatcattcaccagattattctggaaaactatgcgtaccctggtgttcttctgattggcactgactcccacacccccaatggtggcggccttgggggcatctgcattggagttgggggtgccgatgctgtggatgtcatggctgggatcccctgggagctgaagtgccccaaggtgattggcgtgaagctgacgggctctctctccggttggtcctcacccaaagatgtgatcctgaaggtggcaggcatcctcacggtgaaaggtggcacaggtgcaatcgtggaataccacgggcctggtgtagactccatctcctgcactggcatggcgacaatctgcaacatgggtgcagaaattggggccaccacttccgtgttcccttacaaccacaggatgaagaagtacctgagcaagaccggccgggaagacattgccaatctagctgatgaattcaaggatcacttggtgcctgaccctggctgccattatgaccaactaattgaaattaacctcagtgagctgaagccacacatcaatgggcccttcacccctgacctggctcaccctgtggcagaagtgggcaaggtggcagagaaggaaggatggcctctggacatccgagtgggtctaattggtagctgcaccaattcaagctatgaagatatggggcgctcagcagctgtggccaagcaggcactggcccatggcctcaagtgcaagtcccagttcaccatcactccaggttccgagcagatccgcgccaccattgagcgggacggctatgcacagatcttgagggatctgggtggcattgtcctggccaatgcttgtggcccctgcattggccagtgggacaggaaggacatcaagaagggggagaagaacacaatcgtcacctcctacaacaggaacttcacgggccgcaacgacgcaaaccccgagacccatgcctttgtcacgtccccagagattgtcacagccctggccattgcgggaaccctcaagttcaacccagagaccgactacctgacgggcacggatggcaagaagttcaggctggaggctccggatgcagatgagcttcccaaaggggagtttgacccagggcaggacacctaccagcacccacccaaggacagcagcgggcagcatgtggacgtgagccccaccagccagcgcctgcagctcctggagccttttgacaagtgggatggcaaggacctggaggacctgcagatcctcatcaaggtcaaagggaagtgtaccactgaccacatctcagctgctggcccctggctcaagttccgtgggcacttggataacatctccaacaacctgctcattggtgccatcaacattgaaaacggcaaggccaactccgtgcgcaatgccgtcactcaggagtttggccccgtccctgacactgcccgctactacaagaaacatggcatcaggtgggtggtgatcggagacgagaactacggcgagggctcgagccgggagcatgcagctctggagcctcgccaccttgggggccgggccatcatcaccaagagctttgccaggatccacgagaccaacctgaagaaacagggcctgctgcctctgaccttcgctgacccggctgactacaacaagattcaccctgtggacaagctgaccattcagggcctgaaggacttcacccctggcaagcccctgaagtgcatcatcaagcaccccaacgggacccaggagaccatcctcctgaaccacaccttcaacgagacgcagattgagtggttccgcgctggcagtgccctcaacagaatgaaggaactgcaacagtgagggcagtgcctccccgccccgccgctggcgtcaagttcagctccacgtgtgccatcagtggatccgatccgtccagccatggcttcctattccaagatggtgtgaccagacatgcttcctgctccccgcttagcccacggagtgactgtggttgtggtgggggggttcttaaaataactttttagcccccgtcttcctattttgagtttggttcagatcttaagcagctccatgcaactgtatttatttttgatgacaagactcccatctaaagtttttctcctgcctgatcatttcattggtggctgaaggattctagagaaccttttgttcttgcaaggaaaacaagaatccaaaaccagtgactgttctgtgagtgattggtgtctgtgccgtttgttgtcaagtccagggtccaggaagggtcttttcagtcaaggtcagtggaggcccaacagccacagccacagatggatccatcactgcagtgaaggaggagcagggcctagatggtggaggagcggggcaagctggtgggcactcctggccttgcctcactgtccagctcgagacactatctccttagcatcggcctcagctgctgttgtcttcacagccg

SEQ ID NO: 29452 - protein, 780 aa, Homo sapiens; identical to SEQ ID NO: 4055

SEQ ID NO: 29453 - DNA, 455 bp, Homo sapiens
aacgggccaaggtggcgatgagccactttgagcccaacgagtacatccattatgacctgctagagaagaacattaacattgttcgcaaacggtaaggctggctcaccctgtggcagaagtgggcaaggtggcagagaaggaaggatggcctctggacatccgagtggacgccctggcatgccagtcactggcatctgctgctgctgggtacagtgtggctgtgaagagcatggagcctggagccagatggcctgggcttgaatcctggctctgccacctaacagccactaacagctgagtgaccctgagcaaactacttcactgtctatgtgtgggttccccatctgtaaaacaggagtcatgatcgtactgacacctttgaaggtggtgttgggcctactgctgctatcaccaatgagaaaaataaataaaaaataaagttgtctggagaagtg

SEQ ID NO: 29454 - protein, 38 aa, Homo sapiens
MASGHPSGRPGMPVTGICCCWVQCGCEEHGAWSQMAWA

SEQ ID NO: 29455 - DNA, 996 bp, Homo sapiens
aaactatgcgtaccctggtgttcttctgattggcactgactcccacacccccaatggtggcggccttgggggcctcctggagccttttgacaagtgggatggcaaggacctggaggacctgcagatcctcatcaaggtcaaagggaagtgtaccactgaccacatctcagctgctggcccctggctcaagttccgtgggcacttggataacatctccaacaacctgctcattggtgccatcaacattgaaaacggcaaggccaactccgtgcgcaatgccgtcactcaggagtttggccccgtccctgacactgcccgctactacaagaaacatggcatcaggtgggtggtgatcggagacgagaactacggcgagggctcgagccgggagcatgcagctctggagcctcgccaccttgggggccgggccatcatcaccaagagctttgccaggatccacgagaccaacctgaagaaacagggcctgctgcctctgaccttcgctgacccggctgactacaacaagattcaccctgtggacaagctgaccattcagggcctgaaggacttcacccctggcaagcccctgaagtgcatcatcaagcaccccaacgggacccaggagaccatcctcctgaaccacaccttcaacgagacgcagattgagtggttccgcgctggcagtgccctcaacagaatgaaggaactgcaacagtgagggcagtgcctccccgccccgccgctggcgtcaagttcagctccacgtgtgccatcagtggatccgatccgtccagccatggcttcctattccaagatggtgtgaccagacatgcttcctgctccccgcttagcccacggagtgactgtggttgtggtgggggggttcttaaaataactttttagcccccgtcttcctattttgagtttggttcagatcttaagcagctccatgcaactgtatttatttttgatgacaagactcccatctaaagtttt

SEQ ID NO: 29456 - protein, 99 aa, Homo sapiens
MVAALGASWSLLTSGMARTWRTCRSSSRSKGSVPLTTSQLLAPGSSSVGTWITSPTTCSLVPSTLKTARPTPCAMPSLRSLAPSLTLPATTRNMASGGW

SEQ ID NO: 29457 - DNA, 1097 bp, Homo sapiens
aaactatgcgtaccctggtgttcttctgattggcactgactcccacacccccaatggtggcggccttgggggcctcctggagccttttgacaagtgggatggcaaggacctggaggacctgcagatcctcatcaaggtcaaagggaagtgtaccactgaccacatctcagctgctggcccctggctcaagttccgtgggcacttggataacatctccaacaacctgctcattggtgccatcaacattgaaaacggcaaggccaactccgtgcgcaatgccgtcactcaggagtttggccccgtccctgacactgcccgctactacaagaaacatggcatcaggtgggtggtgatcggagacgagaactacggcgagggctcgagccgggagcatgcagctctggagcctcgccaccttgggggccgggccatcatcaccaagagctttgccaggatccacgagaccaacctgaagaaacagggcctgctgcctctgaccttcgctgacccggctgactacaacaagattcaccctgtggacaagctgaccattcagggcctgaaggacttcacccctggcaagcccctgaagtgcatcatcaagcaccccaacgggacccaggagaccatcctcctgaaccacaccttcaacgagacgcagattgagtggttccgcgctggcagtgccctcaacagaatgaaggaactgcaacagtgagggcagtgcctccccgccccgccgctggcgtcaagttcagctccacgtgtgccatcagtggatccgatccgtccagccatggcttcctattccaagatggtgtgaccagacatgcttcctgctccccgcttagcccacggagtgactgtggttgtggtgggggggttcttaaaataactttttagcccccgtcttcctattttgagtttggttcagatcttaagcagctccatgcaactgtatttatttttgatgacaagactcccatctaaagtttttctcctgcctgatcatttcattggtggctgaaggattctagagaaccttttgttcttgcaaggaaaacaagaatccaaaaccagtgactgttctgtgagtg

SEQ ID NO: 29458 - protein, 99 aa, Homo sapiens; identical to SEQ ID NO: 29456

SEQ ID NO: 29459 - DNA, 1337 bp, Homo sapiens
aaactatgcgtaccctggtgttcttctgattggcactgactcccacacccccaatggtggcggccttgggggcctcctggagccttttgacaagtgggatggcaaggacctggaggacctgcagatcctcatcaaggtcaaagggaagtgtaccactgaccacatctcagctgctggcccctggctcaagttccgtgggcacttggataacatctccaacaacctgctcattggtgccatcaacattgaaaacggcaaggccaactccgtgcgcaatgccgtcactcaggagtttggccccgtccctgacactgcccgctactacaagaaacatggcatcaggtgggtggtgatcggagacgagaactacggcgagggctcgagccgggagcatgcagctctggagcctcgccaccttgggggccgggccatcatcaccaagagctttgccaggatccacgagaccaacctgaagaaacagggcctgctgcctctgaccttcgctgacccggctgactacaacaagattcaccctgtggacaagctgaccattcagggcctgaaggacttcacccctggcaagcccctgaagtgcatcatcaagcaccccaacgggacccaggagaccatcctcctgaaccacaccttcaacgagacgcagattgagtggttccgcgctggcagtgccctcaacagaatgaaggaactgcaacagtgagggcagtgcctccccgccccgccgctggcgtcaagttcagctccacgtgtgccatcagtggatccgatccgtccagccatggcttcctattccaagatggtgtgaccagacatgcttcctgctccccgcttagcccacggagtgactgtggttgtggtgggggggttcttaaaataactttttagcccccgtcttcctattttgagtttggttcagatcttaagcagctccatgcaactgtatttatttttgatgacaagactcccatctaaagtttttctcctgcctgatcatttcattggtggctgaaggattctagagaaccttttgttcttgcaaggaaaacaagaatccaaaaccagtgactgttctgtgagtgattggtgtctgtgccgtttgttgtcaagtccagggtccaggaagggtcttttcagtcaaggtcagtggaggcccaacagccacagccacagatggatccatcactgcagtgaaggaggagcagggcctagatggtggaggagcggggcaagctggtgggcactcctggccttgcctcactgtccagctcgagacactatctccttagcatcggcctcagctgctgttgtcttcacagccg

SEQ ID NO: 29460 - protein, 99 aa, Homo sapiens; identical to SEQ ID NO: 29456

SEQ ID NO: 29461 - DNA, 750 bp, Homo sapiens
caatgcccgggcagtgactatggggccctggtctgctccctttcactaggggtgcccctagcaagtgtgcgctggtgctgaggtctgcgaggccttcctgctgcacattcattgtcagggacggggccaaactcctgagtgacggcattgcgcacggagttggccttgccgttttcaatgttgatggcaccaatgagcaggttgttggagatgttatccaagtgcccacggaacttgagccaggggccagcagctgagatgtggtcagtggtacacttccctttgaccttgggtggtaagtagagaggacagaggtcagggcatggccctggaggggtggatgacaagccctccagaggcaggcagcaggccccggggcccaggaggggtgacagaggggtgagaggcaggcaagtcttcagacacgtgttctgtggtcctggtgcttccaccctaaggccacatgggctcaggccaggccttcatcccctcaaaggcctctggctgctcagtctcccttatggggcagaggccgcccaaagttgggacaggtcaatgttcgctcacccttcaggcctcagctgcaagatcagccacagacctcatgctggacacaggagcccaggacatgcctgggtcctggctgatgactgattagtctcttctgtcacaggggtgcctggagaccccttaataagcagcataaataaatatctgacacagattggaggcctctggccacaccaaaaa

SEQ ID NO: 29462 - protein, 64 aa, Homo sapiens
MGSGQAFIPSKASGCSVSLMGQRPPKVGTGQCSLTLQASAARSATDLMLDTGAQDMPGSWLMTD

SEQ ID NO: 29463 - DNA, 4318 bp, Homo sapiens
cacgtggcgcgggtgcggggcgtggagtggcgtggcgtggagtggcgtggcgtggcggggtctcgcggcgcgggcgcgcacccggagctgtggacggagagtgcctccctctggcctcagtttcctcatgttgtagtagcggagcatggcccggaccgggcccccgagaccgccccgtgcaacctcaccgccagcctgggggcctcagcgactgggacgggaccaaggggctcggggattctccctgcccccggccctggtgcgtgactgaccctcctgttcccagagcccccagcgcaggccgggatgttcgtcctggtggaaatggtggacaccgtccggatccccccttggcagtttgagaggaagctcaacgactccattgccgaggagctgaacaagaagttggccaacaaggtcgtgtacaacgtgggactctgcatttgtctgtttgatatcaccaaactggaggatgcctatgtattccctggggatggcgcatcacacaccaaagtctctctaggcttcttcgatgacattctcatccccccagagtcactgcagcagccagccaagttcgacgaagcggagcaggtgtgggtgtgggagtacgagacggaggaaggagcacacgacctctacatggacaccggcgaggagatccgcttccgggtggtggacgagagctttgttgacacgtcccccacagggcccagctcagcagatgccaccacttccagtgaggagctgccaaagaaggaggctccgtacacgcttgtgggatccatcagtgagccaggcctgggccttctctcctggtggaccagcaactagccctggggctggacagtggaccctaccagcctgcgggaaggtggtatggccggctgtgaagacaacagcagctgaggccgatgctaaggagatagtgtctcgagctggacagtgaggcaaggccaggagtgcccaccagcttgccccgctcctccaccatctaggccctgctcctccttcactgcagtgatggatccatctgtggctgtggctgttgggcctccactgaccttgactgaaaagacccttcctggaccctggacttgacaacaaacggcacagacaccaatcactcacagaacagtcactggttttggattcttgttttccttgcaagaacaaaaggttctctagaatccttcagccaccaatgaaatgatcaggcaggagaaaaactttagatgggagtcttgtcatcaaaaataaatacagttgcatggagctgcttaagatctgaaccaaactcaaaataggaagacgggggctaaaaagttattttaagaacccccccaccacaaccacagtcactccgtgggctaagcggggagcaggaagcatgtctggtcacaccatcttggaataggaagccatggctggacggatcggatccactgatggcacacgtggagctgaacttgacgccagcggcggggcggggaggcactgccctcactgttgcagttccttcattctgttgagggcactgccagcgcggaaccactcaatctgcgtctcgttgaaggtgtggttcaggaggatggtctcctgggtcccgttggggtgcttgatgatgcacttcaggggctgcaaggagaaggtgggtgtgggtggaagtggtgggtactgtgtgcccttggccccgcaggggggtcagggagacagggcactgcctggggacctaagaggtcagcaggcaaaccaaatcctaggccagtctgtgcctgatggcccaggtcagacccaggtggcacctacaggggattcctggggcccagagggtcctgcagtgggtgggctgtcccctgagtgccaggtcctggtgagtaaagggaggttggggaggtgtgagggccccgggttgactccaacccccaactctgagaagccactttgctttctctgtggggccacctggagaactgggggcctttccagctggaatgaagcctcctgggagaagctaccctggggccagtgcaggaggggaaacaaggtggctgcccctcaccccaccacctcagggggacccgggcccctaaccttgccaggggtgaagtccttcaggccctgaatggtcagcttgtccacagggtgaatcttgttgtagtcagccgggtcagcgaaggtcagaggcagcaggccctgtttcttcaggttggtctctggaaagcaggcggcattcggtcatcgggggcctgactagcctggagagcttcattttctgaacccatctggggctctgggagatgcccctaatcctgctgcctgggacaatgcccgggcagtgactatggggccctggtctgctccctttcactaggggtgcccctagcaagtgtgcgctggtgctgaggtctgcgaggccttcctgctgcacattcatgatcagaaagaaccccctggcacatgtcctagatctcagcggctcagatctacaagcctggaagcagggcctgcgggaagccgggaagctgagcgtcggatgtgcactgtgtgagcctaagaaggggcaagaggctgacgggcctgtgggctgcagtggacacagcctagaaccaggcccaactcagccacgggcagggagagtgaccttgatcactagggatgggatgaggatggcctgggtacagactccagctcaccgtggatcctggcaaagctcttggtgatgatggcccggcccccaaggtggcgaggctccagagctgcatgctcccggctcgagccctcgccgtagttctcgtctccgatcaccacccacctgatgccatgtttctgtcaggcaagcgggggtaaggttataaggcagaggagggcaccgtcctcacctgtctggccctacctgcctggcctcacccacctggcgcctgggcatcctgaggctcccggtaaaggggctggaggggcccttcctcgcctgctgcctaagggcaagtgaagcctgcgtgaatgagacccaaacgaggccccgaggggacagaggcacgtggttgtttgcagtggcaaagaagacagaagccacccattggtgcttggcagaggcaggtgtgtgtggagggaggttgggtgagacagggacggcctccgggccccacacaagatgcatctgtgaagctcaaggcgcccccttcctgggagcaccctctgccccacccagccaccagggggtgccagagtcctttcacccggctgggccaggacttgggttcagccctggttctgtttgtttctcaaagcagaaaaagtccaatcacctcagaccctctctgcctgctcactgtgaggccccgtgtagccccctctctgagcttttggcctctgacttcctgagtcggcccccttccttgtctttgtctagggccagatatcctaagatatctctcactaactcctcctggtgcagggacccggctgtaccaccggacctgggcctcatgccttctcagccacagggaggggctgcaggcctctcctcccttccacagcagtcccctttgggcttggtcggcctccttcccagtttccactcccctaatgtcctccctgcacctgccttgcaggccccttcaggagtgaccactggcattgcccctatcaactctgacccaccttgtagtagcgggcagtgtcagggacggggccaaactcctgagtgacggcattgcgcacggagttggccttgccgttttcaatgttgatggcaccaatgagcaggttgttggagatgttatccaagtgcccacggaacttgagccaggggccagcagctgagatgtggtcagtggtacacttccctttgaccttgggtggtaagtagagaggacagaggtcagggcatggccctggaggggtggatgacaagccctccagaggcaggcagcaggccccggggcccaggaggggtgacagaggggtgagaggcaggcaagtcttcagacacgtgttctgtggtcctggtgcttccaccctaaggccacatgggctcaggccaggccttcatcccctcaaaggcctctggctgctcagtctcccttatggggcagaggccgcccaaagttgggacaggtcaatgttcgctcacccttcaggcctcagctgcaagatcagccacagacctcatgctggacacaggagcccaggacatgcctgggtcctggctgatgactgattagtctcttctgtcacaggggtgcctggagaccccttaataagcagcataaataaatatctgacacagattggaggcctctggccacaccaaaaa

SEQ ID NO: 29464 - protein, 175 aa, Homo sapiens; identical to SEQ ID NO: 4061

SEQ ID NO: 29465 - DNA, 4664 bp, Homo sapiens
gtgcgtgatacgagcggcggcacgtggcgcgggtgcggggcgtggagtggcgtggcgtggagtggcgtggcgtggcggggtctcgcggcgcgggcgcgcacccggagctgtggacggagagtgcctccctctggcctcagtttcctcatgttgtagtagcggagcatggcccggaccgggcccccgagaccgccccgtgcaacctcaccgccagcctgggggcctcagcgactgggacgggaccaaggggctcggggattctccctgcccccggccctggtgcgtgactgaccctcctgttcccagagcccccagcgcaggccgggatgttcgtcctggtggaaatggtggacaccgtccggatccccccttggcagtttgagaggaagctcaacgactccattgccgaggagctgaacaagaagttggccaacaaggtactgggcccacggctcgcgggcaggccttggcgtgggagagcgagcgccgcccactggccgcaggcccggcctcggtcatgccaagccctggccgtgggcaagcagcttaatgtctcagaacttttcttcaccgtgaaaggagatattgaaggggatcaaaagaaaatgggcttgaaaaagggagttgtaactggaagtgttagattccacaattctaaattactttgcaattgcaggtcgtgtacaacgtgggactctgcatttgtctgtttgatatcaccaaactggaggatgcctatgtattccctggggatggcgcatcacacaccaaagtccattttcgctgcgtggtgtttcatccattcctagatgagattctcattgggaagatcaaaggctgcagcccagaaggagtgcacgtctctctaggcttcttcgatgacattctcatccccccagagtcactgcagcagccagccaagttcgacgaagcggagcaggtgtgggtgtgggagtacgagacggaggaaggagcacacgacctctacatggacaccggcgaggagatccgcttccgggtggtggacgagagctttgttgacacgtcccccacagggcccagctcagcagatgccaccacttccagtgaggagctgccaaagaaggaggctccgtacacgcttgtgggatccatcagtgagccaggcctgggccttctctcctggtggaccagcaactagccctggggctggacagtggaccctaccagcctgcgggaaggtggtatggccggctgtgaagacaacagcagctgaggccgatgctaaggagatagtgtctcgagctggacagtgaggcaaggccaggagtgcccaccagcttgccccgctcctccaccatctaggccctgctcctccttcactgcagtgatggatccatctgtggctgtggctgttgggcctccactgaccttgactgaaaagacccttcctggaccctggacttgacaacaaacggcacagacaccaatcactcacagaacagtcactggttttggattcttgttttccttgcaagaacaaaaggttctctagaatccttcagccaccaatgaaatgatcaggcaggagaaaaactttagatgggagtcttgtcatcaaaaataaatacagttgcatggagctgcttaagatctgaaccaaactcaaaataggaagacgggggctaaaaagttattttaagaacccccccaccacaaccacagtcactccgtgggctaagcggggagcaggaagcatgtctggtcacaccatcttggaataggaagccatggctggacggatcggatccactgatggcacacgtggagctgaacttgacgccagcggcggggcggggaggcactgccctcactgttgcagttccttcattctgttgagggcactgccagcgcggaaccactcaatctgcgtctcgttgaaggtgtggttcaggaggatggtctcctgggtcccgttggggtgcttgatgatgcacttcaggggctgcaaggagaaggtgggtgtgggtggaagtggtgggtactgtgtgcccttggccccgcaggggggtcagggagacagggcactgcctggggacctaagaggtcagcaggcaaaccaaatcctaggccagtctgtgcctgatggcccaggtcagacccaggtggcacctacaggggattcctggggcccagagggtcctgcagtgggtgggctgtcccctgagtgccaggtcctggtgagtaaagggaggttggggaggtgtgagggccccgggttgactccaacccccaactctgagaagccactttgctttctctgtggggccacctggagaactgggggcctttccagctggaatgaagcctcctgggagaagctaccctggggccagtgcaggaggggaaacaaggtggctgcccctcaccccaccacctcagggggacccgggcccctaaccttgccaggggtgaagtccttcaggccctgaatggtcagcttgtccacagggtgaatcttgttgtagtcagccgggtcagcgaaggtcagaggcagcaggccctgtttcttcaggttggtctctggaaagcaggcggcattcggtcatcgggggcctgactagcctggagagcttcattttctgaacccatctggggctctgggagatgcccctaatcctgctgcctgggacaatgcccgggcagtgactatggggccctggtctgctccctttcactaggggtgcccctagcaagtgtgcgctggtgctgaggtctgcgaggccttcctgctgcacattcatgatcagaaagaaccccctggcacatgtcctagatctcagcggctcagatctacaagcctggaagcagggcctgcgggaagccgggaagctgagcgtcggatgtgcactgtgtgagcctaagaaggggcaagaggctgacgggcctgtgggctgcagtggacacagcctagaaccaggcccaactcagccacgggcagggagagtgaccttgatcactagggatgggatgaggatggcctgggtacagactccagctcaccgtggatcctggcaaagctcttggtgatgatggcccggcccccaaggtggcgaggctccagagctgcatgctcccggctcgagccctcgccgtagttctcgtctccgatcaccacccacctgatgccatgtttctgtcaggcaagcgggggtaaggttataaggcagaggagggcaccgtcctcacctgtctggccctacctgcctggcctcacccacctggcgcctgggcatcctgaggctcccggtaaaggggctggaggggcccttcctcgcctgctgcctaagggcaagtgaagcctgcgtgaatgagacccaaacgaggccccgaggggacagaggcacgtggttgtttgcagtggcaaagaagacagaagccacccattggtgcttggcagaggcaggtgtgtgtggagggaggttgggtgagacagggacggcctccgggccccacacaagatgcatctgtgaagctcaaggcgcccccttcctgggagcaccctctgccccacccagccaccagggggtgccagagtcctttcacccggctgggccaggacttgggttcagccctggttctgtttgtttctcaaagcagaaaaagtccaatcacctcagaccctctctgcctgctcactgtgaggccccgtgtagccccctctctgagcttttggcctctgacttcctgagtcggcccccttccttgtctttgtctagggccagatatcctaagatatctctcactaactcctcctggtgcagggacccggctgtaccaccggacctgggcctcatgccttctcagccacagggaggggctgcaggcctctcctcccttccacagcagtcccctttgggcttggtcggcctccttcccagtttccactcccctaatgtcctccctgcacctgccttgcaggccccttcaggagtgaccactggcattgcccctatcaactctgacccaccttgtagtagcgggcagtgtcagggacggggccaaactcctgagtgacggcattgcgcacggagttggccttgccgttttcaatgttgatggcaccaatgagcaggttgttggagatgttatccaagtgcccacggaacttgagccaggggccagcagctgagatgtggtcagtggtacacttccctttgaccttgggtggtaagtagagaggacagaggtcagggcatggccctggaggggtggatgacaagccctccagaggcaggcagcaggccccggggcccaggaggggtgacagaggggtgagaggcaggcaagtcttcagacacgtgttctgtggtcctggtgcttccaccctaaggccacatgggctcaggccaggccttcatcccctcaaaggcctctggctgctcagtctcccttatggggcagaggccgcccaaagttgggacaggtcaatgttcgctcacccttcaggcctcagctgcaagatcagccacagacctcatgctggacacaggagcccaggacatgcctgggtcctggctgatgactgattagtctcttctgtcacaggggtgcctggagaccccttaataagcagcataaataaatatctgacacagattggaggcctctggccacaccaaaaa

SEQ ID NO: 29466 - protein, 160 aa, Homo sapiens
MFVLVEMVDTVRIPPWQFERKLNDSIAEELNKKLANKVLGPRLAGRPWRGRASAAHWPQARPRSCQALAVGKQLNVSELFFTVKGDIEGDQKKMGLKKGVVTGSVRFHNSKLLCNCRSCTTWDSAFVCLISPNWRMPMYSLGMAHHTPKSIFAAWCFIHS

SEQ ID NO: 29467 - DNA, 4147 bp, Homo sapiens
aagcgcgagcggctgtgcgcggtgcgtgagcccccagcgcaggccgggatgttcgtcctggtggaaatggtggacaccgtccggatccccccttggcagtttgagaggaagctcaacgactccattgccgaggagctgaacaagaagttggccaacaaggtcgtgtacaacgtgggactctgcatttgtctgtttgatatcaccaaactggaggatgcctatgtattccctggggatggcgcatcacacaccaaagtccattttcgctgcgtggtgtttcatccattcctagatgagattctcattgggaagatcaaaggctgcagcccagaaggagtgcacgtctctctaggcttcttcgatgacattctcatccccccagagtcactgcagcagccagccaagttcgacgaagcggagcaggtgtgggtgtgggagtacgagacggaggaaggagcacacgacctctacatggacaccggcgaggagatccgcttccgggtggtggacgagagctttgttgacacgtcccccacagggcccagctcagcagatgccaccacttccagtgaggagctgccaaagaaggaggctccgtacacgcttgtgggatccatcagtgagccaggcctgggccttctctcctggtggaccagcaactagccctggggctggacagtggaccctaccagcctgcgggaaggtggtatggccggctgtgaagacaacagcagctgaggccgatgctaaggagatagtgtctcgagctggacagtgaggcaaggccaggagtgcccaccagcttgccccgctcctccaccatctaggccctgctcctccttcactgcagtgatggatccatctgtggctgtggctgttgggcctccactgaccttgactgaaaagacccttcctggaccctggacttgacaacaaacggcacagacaccaatcactcacagaacagtcactggttttggattcttgttttccttgcaagaacaaaaggttctctagaatccttcagccaccaatgaaatgatcaggcaggagaaaaactttagatgggagtcttgtcatcaaaaataaatacagttgcatggagctgcttaagatctgaaccaaactcaaaataggaagacgggggctaaaaagttattttaagaacccccccaccacaaccacagtcactccgtgggctaagcggggagcaggaagcatgtctggtcacaccatcttggaataggaagccatggctggacggatcggatccactgatggcacacgtggagctgaacttgacgccagcggcggggcggggaggcactgccctcactgttgcagttccttcattctgttgagggcactgccagcgcggaaccactcaatctgcgtctcgttgaaggtgtggttcaggaggatggtctcctgggtcccgttggggtgcttgatgatgcacttcaggggctgcaaggagaaggtgggtgtgggtggaagtggtgggtactgtgtgcccttggccccgcaggggggtcagggagacagggcactgcctggggacctaagaggtcagcaggcaaaccaaatcctaggccagtctgtgcctgatggcccaggtcagacccaggtggcacctacaggggattcctggggcccagagggtcctgcagtgggtgggctgtcccctgagtgccaggtcctggtgagtaaagggaggttggggaggtgtgagggccccgggttgactccaacccccaactctgagaagccactttgctttctctgtggggccacctggagaactgggggcctttccagctggaatgaagcctcctgggagaagctaccctggggccagtgcaggaggggaaacaaggtggctgcccctcaccccaccacctcagggggacccgggcccctaaccttgccaggggtgaagtccttcaggccctgaatggtcagcttgtccacagggtgaatcttgttgtagtcagccgggtcagcgaaggtcagaggcagcaggccctgtttcttcaggttggtctctggaaagcaggcggcattcggtcatcgggggcctgactagcctggagagcttcattttctgaacccatctggggctctgggagatgcccctaatcctgctgcctgggacaatgcccgggcagtgactatggggccctggtctgctccctttcactaggggtgcccctagcaagtgtgcgctggtgctgaggtctgcgaggccttcctgctgcacattcatgatcagaaagaaccccctggcacatgtcctagatctcagcggctcagatctacaagcctggaagcagggcctgcgggaagccgggaagctgagcgtcggatgtgcactgtgtgagcctaagaaggggcaagaggctgacgggcctgtgggctgcagtggacacagcctagaaccaggcccaactcagccacgggcagggagagtgaccttgatcactagggatgggatgaggatggcctgggtacagactccagctcaccgtggatcctggcaaagctcttggtgatgatggcccggcccccaaggtggcgaggctccagagctgcatgctcccggctcgagccctcgccgtagttctcgtctccgatcaccacccacctgatgccatgtttctgtcaggcaagcgggggtaaggttataaggcagaggagggcaccgtcctcacctgtctggccctacctgcctggcctcacccacctggcgcctgggcatcctgaggctcccggtaaaggggctggaggggcccttcctcgcctgctgcctaagggcaagtgaagcctgcgtgaatgagacccaaacgaggccccgaggggacagaggcacgtggttgtttgcagtggcaaagaagacagaagccacccattggtgcttggcagaggcaggtgtgtgtggagggaggttgggtgagacagggacggcctccgggccccacacaagatgcatctgtgaagctcaaggcgcccccttcctgggagcaccctctgccccacccagccaccagggggtgccagagtcctttcacccggctgggccaggacttgggttcagccctggttctgtttgtttctcaaagcagaaaaagtccaatcacctcagaccctctctgcctgctcactgtgaggccccgtgtagccccctctctgagcttttggcctctgacttcctgagtcggcccccttccttgtctttgtctagggccagatatcctaagatatctctcactaactcctcctggtgcagggacccggctgtaccaccggacctgggcctcatgccttctcagccacagggaggggctgcaggcctctcctcccttccacagcagtcccctttgggcttggtcggcctccttcccagtttccactcccctaatgtcctccctgcacctgccttgcaggccccttcaggagtgaccactggcattgcccctatcaactctgacccaccttgtagtagcgggcagtgtcagggacggggccaaactcctgagtgacggcattgcgcacggagttggccttgccgttttcaatgttgatggcaccaatgagcaggttgttggagatgttatccaagtgcccacggaacttgagccaggggccagcagctgagatgtggtcagtggtacacttccctttgaccttgggtggtaagtagagaggacagaggtcagggcatggccctggaggggtggatgacaagccctccagaggcaggcagcaggccccggggcccaggaggggtgacagaggggtgagaggcaggcaagtcttcagacacgtgttctgtggtcctggtgcttccaccctaaggccacatgggctcaggccaggccttcatcccctcaaaggcctctggctgctcagtctcccttatggggcagaggccgcccaaagttgggacaggtcaatgttcgctcacccttcaggcctcagctgcaagatcagccacagacctcatgctggacacaggagcccaggacatgcctgggtcctggctgatgactgattagtctcttctgtcacaggggtgcctggagaccccttaataagcagcataaataaatatctgacacagattggaggcctctggccacaccaaaaa

SEQ ID NO: 29468 - protein, 204 aa, Homo sapiens; identical to SEQ ID NO: 4057

SEQ ID NO: 29469 - DNA, 4465 bp, Homo sapiens
cgcgcaagcgcgagcggctgtgcgcggtgcgtggtgcgtggtgcgtgatacgagcggcggcacgtggcgcgggtgcggggcgtggagtggcgtggcgtggagtggcgtggcgtggcggggtctcgcggcgcgggcgcgcacccggagctgtggacggagagtgcctccctctggcctcagtttcctcatgttgtagtagcggagcatggcccggaccgggcccccgagaccgccccgtgcaacctcaccgccagcctgggggcctcagcgactgggacgggaccaaggggctcggggattctccctgcccccggccctggtgcgtgactgaccctcctgttcccagagcccccagcgcaggccgggatgttcgtcctggtggaaatggtggacaccgtccggatccccccttggcagtttgagaggaagctcaacgactccattgccgaggagctgaacaagaagttggccaacaaggtcgtgtacaacgtgggactctgcatttgtctgtttgatatcaccaaactggaggatgcctatgtattccctggggatggcgcatcacacaccaaagtccattttcgctgcgtggtgtttcatccattcctagatgagattctcattgggaagatcaaaggctgcagcccagaaggagtgcacgtctctctaggcttcttcgatgacattctcatccccccagagtcactgcagcagccagccaagttcgacgaagcggagcaggtgtgggtgtgggagtacgagacggaggaaggagcacacgacctctacatggacaccggcgaggagatccgcttccgggtggtggacgagagctttgttgacacgtcccccacagggcccagctcagcagatgccaccacttccagtgaggagctgccaaagaaggaggctccgtacacgcttgtgggatccatcagtgagccaggcctgggccttctctcctggtggaccagcaactagccctggggctggacagtggaccctaccagcctgcgggaaggtggtatggccggctgtgaagacaacagcagctgaggccgatgctaaggagatagtgtctcgagctggacagtgaggcaaggccaggagtgcccaccagcttgccccgctcctccaccatctaggccctgctcctccttcactgcagtgatggatccatctgtggctgtggctgttgggcctccactgaccttgactgaaaagacccttcctggaccctggacttgacaacaaacggcacagacaccaatcactcacagaacagtcactggttttggattcttgttttccttgcaagaacaaaaggttctctagaatccttcagccaccaatgaaatgatcaggcaggagaaaaactttagatgggagtcttgtcatcaaaaataaatacagttgcatggagctgcttaagatctgaaccaaactcaaaataggaagacgggggctaaaaagttattttaagaacccccccaccacaaccacagtcactccgtgggctaagcggggagcaggaagcatgtctggtcacaccatcttggaataggaagccatggctggacggatcggatccactgatggcacacgtggagctgaacttgacgccagcggcggggcggggaggcactgccctcactgttgcagttccttcattctgttgagggcactgccagcgcggaaccactcaatctgcgtctcgttgaaggtgtggttcaggaggatggtctcctgggtcccgttggggtgcttgatgatgcacttcaggggctgcaaggagaaggtgggtgtgggtggaagtggtgggtactgtgtgcccttggccccgcaggggggtcagggagacagggcactgcctggggacctaagaggtcagcaggcaaaccaaatcctaggccagtctgtgcctgatggcccaggtcagacccaggtggcacctacaggggattcctggggcccagagggtcctgcagtgggtgggctgtcccctgagtgccaggtcctggtgagtaaagggaggttggggaggtgtgagggccccgggttgactccaacccccaactctgagaagccactttgctttctctgtggggccacctggagaactgggggcctttccagctggaatgaagcctcctgggagaagctaccctggggccagtgcaggaggggaaacaaggtggctgcccctcaccccaccacctcagggggacccgggcccctaaccttgccaggggtgaagtccttcaggccctgaatggtcagcttgtccacagggtgaatcttgttgtagtcagccgggtcagcgaaggtcagaggcagcaggccctgtttcttcaggttggtctctggaaagcaggcggcattcggtcatcgggggcctgactagcctggagagcttcattttctgaacccatctggggctctgggagatgcccctaatcctgctgcctgggacaatgcccgggcagtgactatggggccctggtctgctccctttcactaggggtgcccctagcaagtgtgcgctggtgctgaggtctgcgaggccttcctgctgcacattcatgatcagaaagaaccccctggcacatgtcctagatctcagcggctcagatctacaagcctggaagcagggcctgcgggaagccgggaagctgagcgtcggatgtgcactgtgtgagcctaagaaggggcaagaggctgacgggcctgtgggctgcagtggacacagcctagaaccaggcccaactcagccacgggcagggagagtgaccttgatcactagggatgggatgaggatggcctgggtacagactccagctcaccgtggatcctggcaaagctcttggtgatgatggcccggcccccaaggtggcgaggctccagagctgcatgctcccggctcgagccctcgccgtagttctcgtctccgatcaccacccacctgatgccatgtttctgtcaggcaagcgggggtaaggttataaggcagaggagggcaccgtcctcacctgtctggccctacctgcctggcctcacccacctggcgcctgggcatcctgaggctcccggtaaaggggctggaggggcccttcctcgcctgctgcctaagggcaagtgaagcctgcgtgaatgagacccaaacgaggccccgaggggacagaggcacgtggttgtttgcagtggcaaagaagacagaagccacccattggtgcttggcagaggcaggtgtgtgtggagggaggttgggtgagacagggacggcctccgggccccacacaagatgcatctgtgaagctcaaggcgcccccttcctgggagcaccctctgccccacccagccaccagggggtgccagagtcctttcacccggctgggccaggacttgggttcagccctggttctgtttgtttctcaaagcagaaaaagtccaatcacctcagaccctctctgcctgctcactgtgaggccccgtgtagccccctctctgagcttttggcctctgacttcctgagtcggcccccttccttgtctttgtctagggccagatatcctaagatatctctcactaactcctcctggtgcagggacccggctgtaccaccggacctgggcctcatgccttctcagccacagggaggggctgcaggcctctcctcccttccacagcagtcccctttgggcttggtcggcctccttcccagtttccactcccctaatgtcctccctgcacctgccttgcaggccccttcaggagtgaccactggcattgcccctatcaactctgacccaccttgtagtagcgggcagtgtcagggacggggccaaactcctgagtgacggcattgcgcacggagttggccttgccgttttcaatgttgatggcaccaatgagcaggttgttggagatgttatccaagtgcccacggaacttgagccaggggccagcagctgagatgtggtcagtggtacacttccctttgaccttgggtggtaagtagagaggacagaggtcagggcatggccctggaggggtggatgacaagccctccagaggcaggcagcaggccccggggcccaggaggggtgacagaggggtgagaggcaggcaagtcttcagacacgtgttctgtggtcctggtgcttccaccctaaggccacatgggctcaggccaggccttcatcccctcaaaggcctctggctgctcagtctcccttatggggcagaggccgcccaaagttgggacaggtcaatgttcgctcacccttcaggcctcagctgcaagatcagccacagacctcatgctggacacaggagcccaggacatgcctgggtcctggctgatgactgattagtctcttctgtcacaggggtgcctggagaccccttaataagcagcataaataaatatctgacacagattggaggcctctggccacaccaaaaa

SEQ ID NO: 29470 - protein, 204 aa, Homo sapiens; identical to SEQ ID NO: 4057

SEQ ID NO: 29471 - DNA, 532 bp, Homo sapiens
cttgccaggggtgaagtccttcaggccctgaatggtcagcttgtccacagggtgaatcttgttgtagtcagccgggtcagcgaaggtcagaggcagcaggccctgtttcttcaggttggtctctggaaagcaggcggcattcggtcatcgggggcctgactagcctggagagcttcattttctgaacccatctggggctctgggagatgcccctaatcctgctgcctgggacaatgcccgggcagtgactatggggccctggtctgctccctttcactaggggtgcccctagcaagtgtgcgctggtgctgaggtctgcgaggccttcctgctgcacattcatgatcagaaagaaccccctggcacatctgcaagatcagccacagacctcatgctggacacaggagcccaggacatgcctgggtcctggctgatgactgattagtctcttctgtcacaggggtgcctggagaccccttaataagcagcataaataaatatctgacacagattggaggcctctggccacacc

SEQ ID NO: 29472 - protein, 30 aa, Homo sapiens
MIRKNPLAHLQDQPQTSCWTQEPRTCLGPG

SEQ ID NO: 29473 - DNA, 1331 bp, Homo sapiens
ggtgagtaaagggaggttggggaggtgtgagggccccgggttgactccaacccccaactctgagaagccactttgctttctctgtggggccacctggagaactgggggcctttccagctggaatgaagcctcctgggagaagctaccctggggccagtgcaggaggggaaacaaggtggctgcccctcaccccaccacctcagggggacccgggcccctaaccttgccaggggtgaagtccttcaggccctgaatggtcagcttgtccacagggtgaatcttgttgtagtcagccgggtcagcgaaggtcagaggcagcaggccctgtttcttcaggttggtctctggaaagcaggcggcattcggtcatcgggggcctgactagcctggagagcttcattttctgaacccatctggggctctgggagatgcccctaatcctgctgcctgggacaatgcccgggcagtgactatggggccctggtctgctccctttcactaggggtgcccctagcaagtgtgcgctggtgctgaggtctgcgaggccttcctgctgcacattcatgatcagaaagaaccccctggcacatgtcctagatctcagcggctcagatctacaagcctggaagcagggcctgcgggaagccgggaagctgagcgtcggatgtgcactgtgtgagcctaagaaggggcaagaggctgacgggcctgtgggctgcagtggacacagcctagaaccaggcccaactcagccacgggcagggagagtgaccttgatcactagggatgggatgaggatggcctgggtacagactccagctcaccgtggatcctggcaaagctcttggtgatgatggcccggcccccaaggtggcgaggctccagagctgcatgctcccggctcgagccctcgccgtagttctcgtctccgatcaccacccacctgatgccatgtttctgtcaggcaagcgggggtaaggttataaggcagaggagggcaccgtcctcacctgtctggccctacctgcctggcctcacccacctggccccggggcccaggaggggtgacagaggggtgagaggcctctggctgctcagtctcccttatggggcagaggccgcccaaagttgggacaggtcaatgttcgctcacccttcaggcctcagctgcaagatcagccacagacctcatgctggacacaggagcccaggacatgcctgggtcctggctgatgactgattagtctcttctgtcacaggggtgcctggagaccccttaataagcagcataaataaatatctgacacagattggaggcctctggccacacc

SEQ ID NO: 29474 - protein, 97 aa, Homo sapiens
MPCFCQASGGKVIRQRRAPSSPVWPYLPGLTHLAPGPRRGDRGVRGLWLLSLPYGAEAAQSWDRSMFAHPSGLSCKISHRPHAGHRSPGHAWVLADD

SEQ ID NO: 29475 - DNA, 1300 bp, Homo sapiens
cacgtggcgcgggtgcggggcgtggagtggcgtggcgtggagtggcgtggcgtggcggggtctcgcggcgcgggcgcgcacccggagctgtggacggagagtgcctccctctggcctcagtttcctcatgttgtagtagcggagcatggcccggaccgggcccccgagaccgccccgtgcaacctcaccgccagcctgggggcctcagcgactgggacgggaccaaggggctcggggattctccctgcccccggccctggtgcgtgactgaccctcctgttcccagagcccccagcgcaggccgggatgttcgtcctggtggaaatggtggacaccgtccggatccccccttggcagtttgagaggaagctcaacgactccattgccgaggagctgaacaagaagttggccaacaaggtcgtgtacaacgtgggactctgcatttgtctgtttgatatcaccaaactggaggatgcctatgtattccctggggatggcgcatcacacaccaaagtctctctaggcttcttcgatgacattctcatccccccagagtcactgcagcagccagccaagttcgacgaagcggagcaggtgtgggtgtgggagtacgagacggaggaaggagcacacgacctctacatggacaccggcgaggagatccgcttccgggtggtggacgagagctttgttgacacgtcccccacagggcccagctcagcagatgccaccacttccagtgaggagctgccaaagaaggaggctccgtacacgcttgtgggatccatcagtgagccaggcctgggccttctctcctggtggaccagcaactagccctggggctggacagtggaccctaccagcctgcgggaaggtggtatggccggctgtgaagacaacagcagctgaggccgatgctaaggagatagtgtctcgagctggacagtgaggcaaggccaggagtgcccaccagcttgccccgctcctccaccatctaggccctgctcctccttcactgcagtgatggatccatctgtggctgtggctgttgggcctccactgaccttgactgaaaagacccttcctggaccctggacttgacaacaaacggcacagacaccaatcactcacagaacagtcactggttttggattcttgttttccttgcaagaacaaaaggttctctagaatccttcagccaccaatgaaatgatcaggcaggagaaaaactttagatgggagtcttgtcatcaaaaataaatacagttgcatggagctgcttaagatctgaaccaaactc

SEQ ID NO: 29476 - protein, 175 aa, Homo sapiens; identical to SEQ ID NO: 4061

SEQ ID NO: 29477 - DNA, 1646 bp, Homo sapiens
gtgcgtgatacgagcggcggcacgtggcgcgggtgcggggcgtggagtggcgtggcgtggagtggcgtggcgtggcggggtctcgcggcgcgggcgcgcacccggagctgtggacggagagtgcctccctctggcctcagtttcctcatgttgtagtagcggagcatggcccggaccgggcccccgagaccgccccgtgcaacctcaccgccagcctgggggcctcagcgactgggacgggaccaaggggctcggggattctccctgcccccggccctggtgcgtgactgaccctcctgttcccagagcccccagcgcaggccgggatgttcgtcctggtggaaatggtggacaccgtccggatccccccttggcagtttgagaggaagctcaacgactccattgccgaggagctgaacaagaagttggccaacaaggtactgggcccacggctcgcgggcaggccttggcgtgggagagcgagcgccgcccactggccgcaggcccggcctcggtcatgccaagccctggccgtgggcaagcagcttaatgtctcagaacttttcttcaccgtgaaaggagatattgaaggggatcaaaagaaaatgggcttgaaaaagggagttgtaactggaagtgttagattccacaattctaaattactttgcaattgcaggtcgtgtacaacgtgggactctgcatttgtctgtttgatatcaccaaactggaggatgcctatgtattccctggggatggcgcatcacacaccaaagtccattttcgctgcgtggtgtttcatccattcctagatgagattctcattgggaagatcaaaggctgcagcccagaaggagtgcacgtctctctaggcttcttcgatgacattctcatccccccagagtcactgcagcagccagccaagttcgacgaagcggagcaggtgtgggtgtgggagtacgagacggaggaaggagcacacgacctctacatggacaccggcgaggagatccgcttccgggtggtggacgagagctttgttgacacgtcccccacagggcccagctcagcagatgccaccacttccagtgaggagctgccaaagaaggaggctccgtacacgcttgtgggatccatcagtgagccaggcctgggccttctctcctggtggaccagcaactagccctggggctggacagtggaccctaccagcctgcgggaaggtggtatggccggctgtgaagacaacagcagctgaggccgatgctaaggagatagtgtctcgagctggacagtgaggcaaggccaggagtgcccaccagcttgccccgctcctccaccatctaggccctgctcctccttcactgcagtgatggatccatctgtggctgtggctgttgggcctccactgaccttgactgaaaagacccttcctggaccctggacttgacaacaaacggcacagacaccaatcactcacagaacagtcactggttttggattcttgttttccttgcaagaacaaaaggttctctagaatccttcagccaccaatgaaatgatcaggcaggagaaaaactttagatgggagtcttgtcatcaaaaataaatacagttgcatggagctgcttaagatctgaaccaaactc

SEQ ID NO: 29478 - protein, 160 aa, Homo sapiens; identical to SEQ ID NO: 29466

SEQ ID NO: 29479 - DNA, 1127 bp, Homo sapiens
gcgcgagcggctgtgcgcggtgcgtgagcccccagcgcaggccgggatgttcgtcctggtggaaatggtggacaccgtccggatccccccttggcagtttgagaggaagctcaacgactccattgccgaggagctgaacaagaagttggccaacaaggtcgtgtacaacgtgggactctgcatttgtctgtttgatatcaccaaactggaggatgcctatgtattccctggggatggcgcatcacacaccaaagtccattttcgctgcgtggtgtttcatccattcctagatgagattctcattgggaagatcaaaggctgcagcccagaaggagtgcacgtctctctaggcttcttcgatgacattctcatccccccagagtcactgcagcagccagccaagttcgacgaagcggagcaggtgtgggtgtgggagtacgagacggaggaaggagcacacgacctctacatggacaccggcgaggagatccgcttccgggtggtggacgagagctttgttgacacgtcccccacagggcccagctcagcagatgccaccacttccagtgaggagctgccaaagaaggaggctccgtacacgcttgtgggatccatcagtgagccaggcctgggccttctctcctggtggaccagcaactagccctggggctggacagtggaccctaccagcctgcgggaaggtggtatggccggctgtgaagacaacagcagctgaggccgatgctaaggagatagtgtctcgagctggacagtgaggcaaggccaggagtgcccaccagcttgccccgctcctccaccatctaggccctgctcctccttcactgcagtgatggatccatctgtggctgtggctgttgggcctccactgaccttgactgaaaagacccttcctggaccctggacttgacaacaaacggcacagacaccaatcactcacagaacagtcactggttttggattcttgttttccttgcaagaacaaaaggttctctagaatccttcagccaccaatgaaatgatcaggcaggagaaaaactttagatgggagtcttgtcatcaaaaataaatacagttgcatggagctgcttaagatctgaaccaaactc

SEQ ID NO: 29480 - protein, 204 aa, Homo sapiens; identical to SEQ ID NO: 4057

SEQ ID NO: 29481 - DNA, 1447 bp, Homo sapiens
cgcgcaagcgcgagcggctgtgcgcggtgcgtggtgcgtggtgcgtgatacgagcggcggcacgtggcgcgggtgcggggcgtggagtggcgtggcgtggagtggcgtggcgtggcggggtctcgcggcgcgggcgcgcacccggagctgtggacggagagtgcctccctctggcctcagtttcctcatgttgtagtagcggagcatggcccggaccgggcccccgagaccgccccgtgcaacctcaccgccagcctgggggcctcagcgactgggacgggaccaaggggctcggggattctccctgcccccggccctggtgcgtgactgaccctcctgttcccagagcccccagcgcaggccgggatgttcgtcctggtggaaatggtggacaccgtccggatccccccttggcagtttgagaggaagctcaacgactccattgccgaggagctgaacaagaagttggccaacaaggtcgtgtacaacgtgggactctgcatttgtctgtttgatatcaccaaactggaggatgcctatgtattccctggggatggcgcatcacacaccaaagtccattttcgctgcgtggtgtttcatccattcctagatgagattctcattgggaagatcaaaggctgcagcccagaaggagtgcacgtctctctaggcttcttcgatgacattctcatccccccagagtcactgcagcagccagccaagttcgacgaagcggagcaggtgtgggtgtgggagtacgagacggaggaaggagcacacgacctctacatggacaccggcgaggagatccgcttccgggtggtggacgagagctttgttgacacgtcccccacagggcccagctcagcagatgccaccacttccagtgaggagctgccaaagaaggaggctccgtacacgcttgtgggatccatcagtgagccaggcctgggccttctctcctggtggaccagcaactagccctggggctggacagtggaccctaccagcctgcgggaaggtggtatggccggctgtgaagacaacagcagctgaggccgatgctaaggagatagtgtctcgagctggacagtgaggcaaggccaggagtgcccaccagcttgccccgctcctccaccatctaggccctgctcctccttcactgcagtgatggatccatctgtggctgtggctgttgggcctccactgaccttgactgaaaagacccttcctggaccctggacttgacaacaaacggcacagacaccaatcactcacagaacagtcactggttttggattcttgttttccttgcaagaacaaaaggttctctagaatccttcagccaccaatgaaatgatcaggcaggagaaaaactttagatgggagtcttgtcatcaaaaataaatacagttgcatggagctgcttaagatctgaaccaaactc

SEQ ID NO: 29482 - protein, 204 aa, Homo sapiens; identical to SEQ ID NO: 4057

SEQ ID NO: 29483 - DNA, 920 bp, Homo sapiens
gcgcgagcggctgtgcgcggtgcgtggtgcgtggtgcgtgatacgagcggcggcacgtggcgcgggtgcggggcgtggagtggcgtggcgtggagtggcgtggcgtggcggggtctcgcggcgcgggcgcgcacccggagctgtggacggagagtgcctccctctggcctcagtttcctcatgttgtagtagcggagcatggcccggaccgggcccccgagaccgccccgtgcaacctcaccgccagcctgggggcctcagcgactgggacgggaccaaggggctcggggattctccctgcccccggccctggtgcgtgactgaccctcctgttcccagagcccccagcgcaggccgggatgttcgtcctggtggaaatggtggacaccgtccggatccccccttggcagtttgagaggaagctcaacgactccattgccgaggagctgaacaagaagttggccaacaaggtcgtgtacaacgtgggactctgcatttgtctgtttgatatcaccaaactggaggatgcctatgtattccctggggatggcgcatcacacaccaaagtccattttcgctgcgtggtgtttcatccattcctagatgagattctcattgggaagatcaaaggctgcagcccagaaggagtgcacggtaacagtggccctgacgcctcagacaagacttgggaacactgtgggggcaggagtctctctaggcttcttcgatgacattctcatccccccagagtcactgcagcagccagccaagttcgacgaagcggagcaggtgtgggtgtgggagtacgagacggaggaaggagcacacgacctctacatggacaccggcgaggagatccgcttccgggtggtggacgagagctttgttgacacgtcccccacagggcccagctcagcaga

SEQ ID NO: 29484 - protein, 123 aa, Homo sapiens; identical to SEQ ID NO: 4059

SEQ ID NO: 29485 - DNA, 1919 bp, Homo sapiens
gcagtcgcgcaagcgcgagcggctgtgcgcggtgcgtgagcccccagcgcaggccgggatgttcgtcctggtggaaatggtggacaccgtccggatccccccttggcagtttgagaggaagctcaacgactccattgccgaggagctgaacaagaagttggccaacaaggtcgtgtacaacgtgggactctgcatttgtctgtttgatatcaccaaactggaggatgcctatgtattccctggggatggcgcatcacacaccaaaggtgggtatcttctgtccctggggcattgggcttcttggggctcagttttctgtagccaaaggtcaagccaaatccaggttcagtggtgcgtgcctgtaaggctgagggcggaaggatctcttgagccacagagttcaaggccagcctgggcaacatagcaagaccctgtctttaaatacataaataaaatatgaaaaaattttaaaaggctaaagtcaaagagatggccagagggtggtgggagtcctggaggctgggagacgtggggcctcatcctgaatcggccaggaattgacccggtgacagcggcagacttctcttctctgggcctctgttccctcatctgtgaggcctgggatgtggactagttggttttcaaggcctcttcagctctgacttcatagctctgtgtctgtgcccttttggtctcattgctactgagccctgcaccttgtccattcctcgggcttcccgctgcctgtggagagcagacggaagggggatcagcaggctggctgggggtgggggacttggatagtaggacacagtaggtaagagtgtggcctcaagattaaaagctgagctctgcttcttactagctgtgtgtcctggctgaatatgtcattgctctgtgcctctgcttccttatctgtcagttgcagttcaggatgtcaactgcagtttaggatagattttatattctaagaccattgtgaggattaaggagttaatacatgaaagctcttaggacagagccttggcacctaacgagcactcagtgacttatcagcgtggattgtttctccctattctgtcggtcagttgggtggttttcctctcatctggctggcctggggctggacaatctaggacggtctcacattctgaaggttggcagactggttggttactgggggcctgggctgggctggcccatctctgccccacatggtctcatctttcagtaggccaggctgggcttggcggttttaaggttccaaagttcagtgcgtaagtacttctcaagcctctgcttccatcccgttggctagggtgaggggatggagaaatagacttcacctctgggtgggagaaactgcagtcacattgcaaaagggtgtgcatccaggaatggaaggtgatcaccagatcctggaaggagggaggagtagagagaggaccaccctgagaggagccaggaccaccagtcaagggaggtgatgagccccaggagaggggcattcttcattctcatgtctggaccaaaccagtgtataggagatggtgagaggcccattgagacggttcaggctcccagagcgcaggcgccaagcctgccatcccttgggcactcagagcgcaattctcagcctgccccaggcctccctccgcctgagtcagaatcttgggggatgggtccaaatacttttttttttttttaagacagagtcttgctctgttgcccaggttggagtgcagaagtgtgatcttggctcactgcaacctccacctcccagcatcaagcaattctcctgcctcactactcaggaggctgaggcaggagaatggagtgaacccaggaggcggagcttgcagtgaaccgagatcgcaccactgcactccagcctgggcaacagagtgaaactccgtctc

SEQ ID NO: 29486 - protein, 121 aa, Homo sapiens
MFVLVEMVDTVRIPPWQFERKLNDSIAEELNKKLANKVVYNVGLCICLFDITKLEDAYVFPGDGASHTKGGYLLSLGHWASWGSVFCSQRSSQIQVQWCVPVRLRAEGSLEPQSSRPAWAT

SEQ ID NO: 29487 - DNA, 555 bp, Homo sapiens
gtgcgcggtgcgtggtgcgtggtgcgtgatacgagcggcggcacgtggcgcgggtgcggggcgtggagtggcgtggcgtggagtggcgtggcgtggcggggtctcgcggcgcgggcgcgcacccggagctgtggacggagagtgcctccctctggcctcagtttcctcatgttgtagtagcggagcatggcccggaccgggcccccgagaccgccccgtgcaacctcaccgccagcctgggggcctcagcgactgggacgggaccaaggggctcggggattctccctgcccccggccctggtgcgtgactgaccctcctgttcccagagcccccagcgcaggccgggatgttcgtcctggtggaaatggtggacaccgtccggatccccccttggcagtttgagaggaagctcaacgactccattgccgaggagctgaacaagaagttggccaacaaggtcgtgtacaacgtgggactctgcatttgtctgtttgatatcaccaaactggaggatgcctatgtattccctggggatggcgcatcacacaccaaag

SEQ ID NO: 29488 - protein, 68 aa, Homo sapiens
MFVLVEMVDTVRIPPWQFERKLNDSIAEELNKKLANKVVYNVGLCICLFDITKLEDAYVFPGDGASHT

SEQ ID NO: 29489 - DNA, 343 bp, Homo sapiens
aatttttttattttttatttttgtaggaatggtgtctcactatgttgcccacgctggtctcgaactcttgagctcaagtgatcttccctcctcggcctcccaaagtgctggcattagaggtgtgagccattgtgcccggccaggaatcttctttgtgtgggatcatgggactatattaccaggaacgtggcgctgtctcaggttcttcctcccctgcattcctcagcagctgccctcactgggcagggcaaattataccgtggcccgaccataaaagccactttccaaaaaaagaagctttaaggcccccgagagacgcagctgagcctctcacctggcagtg

SEQ ID NO: 29490 - protein, 81 aa, Homo sapiens
MVSHYVAHAGLELLSSSDLPSSASQSAGIRGVSHCARPGIFFVWDHGTILPGTWRCLRFFLPCIPQQLPSLGRANYTVARP

SEQ ID NO: 29491 - DNA, 2608 bp, Homo sapiens
tcagcagctgccctcactgggcagggcaaattataccgtggcccgaccataaaagccactttccaaaaaaagaagctttaaggcccccgagagacgcagctgagcctctcacctggcagtgcctgactcaggaggtgatgtctgggccatgagccacagagcctggtgtccctttaagcagggagtacaaattctcatccctccctcctgctctccctgacgtcagctggaaggcgtgtgagtgagtgaggggctgaggtaccgcccgcgcgagcacacacagacacacacacacacacacacacacacacacacacacatcttccagacccatcccctgcctgccagctccacgagccagagagagacagagcgcggacgccgcaggaggcagtgcctggaccccagctgcccaggagagacggagcccgtggctggtgaggccgcagagcagggccaggccgggccctgcccgcaaggacgaccaaacccctcaccggcccctgggccccagagcccaccaggctctcctgctggccccaccatgacttcagagtcgacgtcacccccagttgtgcccccgctccactcccccaagtccccagtctggcccaccttccccttccacagggagggcagcagggtctgggagcggggtggtgtcccacctcgggacctacccagccctctgcccaccaagcggaccaggacctattcagcgacagcccgggcctcagctggccccgtgttcaagggcgtctgtaagcagttctcacgctcacagggccatggcttcatcacccccgagaacgggtccgaggacatcttcgtacatgtgtctgacatcgagggggagtacgtgccagtggagggcgacgaggtgacctacaagatgtgccctatccctcccaagaaccagaagttccaggccgtggaggtggtgctcactcagctggccccccacactccccacgagacgtggtctggccaggtcgtgggctcctaggctgagtggttcacaggccagctggccgggggttggggagccacacagggtgaacgggcagcagccggctccatgccccactgccctggctgatgagtccttcggtggcctcagtgtgcacgtctgtctgtccgtctgtgcttgtggctatgagcgtgtgcctccacccaccccacgacccgtgactactgtgcaagctggccaggaggtaggtggagggcaaggccaccagacctggcttcgcgctgtccactgcctctctcctcccctccctgccgcagacacgcaggacccgctcgccctcctgcttacccgtccccacggtgactgagctgcgagagcctgcgctgggctcactccctggcctccgcccctgagctgtcccgtgtcagtccctggcccggagccaggctctctgtgctacttacatctccctcccttggctgaggtcccccgccacagcctggacccttccctcagaagcctggccgatgggtgcttttggggagcctctcacctggcagtggcgctgggctccttcccctgggctgtactgagccgagcccaggggtttgcagagggtgggggtccatctctccagcttggctgcagacctcctttaccctgactcacaagccccactgatgctctgggccatgcccggctgacggctgctgtggatgccgcgagggacggacacacgtccggggcacccacgaggagggcccccagcctgggagactggccctgcggcctccacgtcaaactctcttcccaaagccctaacagaccagtggccgaggtgtggctcttattgcatccatccctgaagatgtgtggctgttgctgtcacctggagtccttttggggccaagatgtgtgtgcacccggggtcgtggccattcactcccaggcaggggtgagggtggcctggcccaggaggccaggaaggagggccctgtctgcctccacctctgggtgcaccccctgcctaccaccctcccttctagagagcacatcgcctgaccggggagaagtggggccgtggttcgagggagggctggccaggggtgggacccttatgagactcagtctgtgagtaaaactgggggctcaaatgcccaggatgaggggatcagtgactgtctaggaggatcccttgccttgtaggtgccccaagaccgcagggtagaaatcagccgggatgcctgcatcccacccccggccccagggcccaccacataaaatctgggagcccagagctgctgaggtgtggtcagctcccctaaaatgggcacggcccagcctgtcccatgaggaataaaggcccctggcccccttgagagagggcttgttggtgagggctgactcctgggggcccccaaggctcccctcctgtggggaggccaccttttaaggcaccactagcagtcaggatatggtggcatcagccctggggcctcctgggtggcaggggggcagcagctctcctccccactcacaggccctgcagtgctcatttggaattcctcccaagacccctggccacccagaccccccattcttcctaacactggcaataaaccctcaactgtgacccac

SEQ ID NO: 29492 - protein, 153 aa, Homo sapiens; identical to SEQ ID NO: 4065

SEQ ID NO: 29493 - DNA, 2777 bp, Homo sapiens
tcagcagctgccctcactgggcagggcaaattataccgtggcccgaccataaaagccactttccaaaaaaagaagctttaaggcccccgagagacgcagctgagcctctcacctggcagtgcctgactcaggaggtgatgtctgggccatgagccacagagcctggtgtccctttaagcagggagtacaaattctcatccctccctcctgctctccctgacgtcagctggaaggcgtgtgagtgagtgaggggctgaggtaccgcccgcgcgagcacacacagacacacacacacacacacacacacacacacacacacatcttccagacccatcccctgcctgccagctccacgagccagagagagacagagcgcggacgccgcaggaggcagtgcctggaccccagctgcccaggagagacggagcccgtggctggtgaggccgcagagcagggccaggccgggccctgcccgcaaggacgaccaaacccctcaccggcccctgggccccagagcccaccaggctctcctgctggccccaccatgacttcagagtcgacgtcacccccagttgtgcccccgctccactcccccaagtccccagtctggcccaccttccccttccacagggagggcagcagggtctgggagcggggtggtgtcccacctcgggacctacccagccctctgcccaccaagcggaccaggacctattcagcgacagcccgggcctcagctggccccgtgttcaagggcgtctgtaagcagttctcacgctcacagggccatggcttcatcacccccgagaacgggtccgaggacatcttcgtacatgtgtctgacatcgagggggagtacgtgccagtggagggcgacgaggtgacctacaagatgtgccctatccctcccaagaaccagaagttccaggccgtggaggtggtgctcactcagctggccccccacactccccacgagacgtggtctggccaggtcgtgggctcctaggctgagtggttcacaggccagctggccgggggttggggagccacacagggtgaacgggcagcagccggctccatgccccactgccctggctgatgagtccttcggtggcctcagtgtgcacgtctgtctgtccgtctgtgcttgtggctatgagcgtgtgcctccacccaccccacgacccgtgactactgtgcaagctggccaggaggtaggtggagggcaaggccaccagacctggcttcgcgctgtccactgcctctctcctcccctccctgccgcagacacgcaggacccgctcgccctcctgcttacccgtccccacggtgactgagctgcgagagcctgcgctgggctcactccctggcctccgcccctgagctgtcccgtgtcagtccctggcccggagccaggctctctgtgctacttacatctccctcccttggctgaggtcccccgccacagcctggacccttccctcagaagcctggccgatgggtgcttttggggagcctctcagcctctggcaggggaggaggactgacacggaggcacacaggcctctcactgccgaggccagccttccttcctgctctgctctctcagtgccatggagaggcaggaagaggggcctgagggcggaaggggtttggggctcccatttcgccggccagtccctcctcctcagcctggcagtggcgctgggctccttcccctgggctgtactgagccgagcccaggggtttgcagagggtgggggtccatctctccagcttggctgcagacctcctttaccctgactcacaagccccactgatgctctgggccatgcccggctgacggctgctgtggatgccgcgagggacggacacacgtccggggcacccacgaggagggcccccagcctgggagactggccctgcggcctccacgtcaaactctcttcccaaagccctaacagaccagtggccgaggtgtggctcttattgcatccatccctgaagatgtgtggctgttgctgtcacctggagtccttttggggccaagatgtgtgtgcacccggggtcgtggccattcactcccaggcaggggtgagggtggcctggcccaggaggccaggaaggagggccctgtctgcctccacctctgggtgcaccccctgcctaccaccctcccttctagagagcacatcgcctgaccggggagaagtggggccgtggttcgagggagggctggccaggggtgggacccttatgagactcagtctgtgagtaaaactgggggctcaaatgcccaggatgaggggatcagtgactgtctaggaggatcccttgccttgtaggtgccccaagaccgcagggtagaaatcagccgggatgcctgcatcccacccccggccccagggcccaccacataaaatctgggagcccagagctgctgaggtgtggtcagctcccctaaaatgggcacggcccagcctgtcccatgaggaataaaggcccctggcccccttgagagagggcttgttggtgagggctgactcctgggggcccccaaggctcccctcctgtggggaggccaccttttaaggcaccactagcagtcaggatatggtggcatcagccctggggcctcctgggtggcaggggggcagcagctctcctccccactcacaggccctgcagtgctcatttggaattcctcccaagacccctggccacccagaccccccattcttcctaacactggcaataaaccctcaactgtgacccac

SEQ ID NO: 29494 - protein, 153 aa, Homo sapiens; identical to SEQ ID NO: 4065

SEQ ID NO: 29495 - DNA, 2576 bp, Homo sapiens
ggggtagttaggattggtcttaggcaaagaacccttcccccccaatacacgtgctgagaagttatcccttcctgtccacccaggttcccagtcccagctctacccatttgccttgtaacctggaaaagcatctttactaacgtgtgcctcagtttccttatgtgtaaggtgggggtaatagcagttcccatcccatgggctgtcatgagcactggatgaggtggcacatggaccccacctggcatggagttggggagccacaccctaactccccaccccagagccttctcaagtatttttggctcttgtttgctcccttctggcactggaggagcatgaaccttcctgatctgtgcgccctgccctggcccagagctggtgtaaataaatgcttaacccagctcatcttccagaaccctgaagcggggatgagtacttcccttccttagatgaggacactgaggccagagggtgagtaaccagctcgaggtcacagtgccggtccctgctgaggctggccttgcacatggggctgtctagtgaccagccttgttctccagagaagggaggtgcagccagcctcggccatgtggaaacatttcttcagagcctggggcagtcttagtggtagccctgggcctacagagtggacgctggtggggactctggcctccctggggcccacctacctgctggaaagccaggccaaggctggcagggggctcacatcccttatctctgcttttccatgagagggaagcaggcaggggtcattcattacttctctgtcctttagtccaggaaataggctcagagaggtcaggtgacttgcccatggtcacacagctgaggagtacagtagccaagcctggctacttgccttcagatctcaggctagggggtgtctggctttatatctgacatcctccctgggccacttctccaagctccatgctgctgaccactgcctgcctttccgccccagtcctacccggctctgactacagggccataccagccaccccactcctgtgctccagaatcctcagcgcctcttggtcccccaggatgtggtcagacttcccagcccggtctcgagaccctctgtcagctgaatgtcctgctggctggtttagatgttcagctgcccctcagactgggcatagctgctcccctttgtggccctctgagatggagatcctgggggctggcggggagaatgtccccctgctccacgtttgcggagctgctgccagagttcctgctcagagggacggggccggcctgggcactacctagtccccagcccagccgcgtctttgcatgctgggtgctctgccatgcctggcatcctgctgccctctgtgaatgcccacagccacctcctcacaggtctcctgctctcagctcccatgctcatttctgagtatttgctttgttgagctggttacagataacaggatcgagccctgccctgaggtggacactgatgtgggatccagattgccccgtctcctcgcccttcctactcgtgtctctcctctgaggtctccttcagaagacccagcccacagccccattggcagccccatcccttctggatttaggccctggctctgccaccagggctaggtgaccttgaccaaggcacaacccctctctgagccttagtttgcgcatctgcacagttgggggtcctacccacctagaatgctcagcacgctcacgtggactgtgtgcccagccagggcctggcacacagcaggtcctctgagctgccatccgctccctcccctctgcagaaagagaagatccgggagaagttcgtggaagccctgaaaacagagtttgctggcaaagggctgaggttctctcgaggaggcatgatcagctttgacgtcttccccgagggctgggacaagcgctactgcctggatagcctggaccaggacagcttcgacaccatccacttctttgggaacgagactagccctggtgggaacgactttgagatctttgccgacccccggactgttggccacagcgtggtgtctcctcaggacacggtgcagcgatgccgggagattttcttcccagagacagctcatgaggcgtgaccggggcccacatctgtgtgtcgtgacttctgaagagtttggcctaggcctaaagagaggtcctggtgttggatagatgccagggcccctcctctggcccaggacgcctgctgcaagcccacccagatggggccagagtctgtgtggacaaccgtccccagccagtctgctcctagtggcactggcttcgtcctcccagggcccagagtgttccccatgctccacctggtggcccaggccacagctgctgcttgtatttcggtacagaagaggtttctttctgcaccaggaggaggcgtgctcaagtatcggtacgagatctagcctgccctgcctgcctgccctgggcgatgaggtacggtggggaaggtgcctattttagagaactttgtcacagtattaaagttcccagaacaaagtaggtgtcagctgtgtctgaatggataattggccccagtc

SEQ ID NO: 29496 - protein, 77 aa, Homo sapiens
MISFDVFPEGWDKRYCLDSLDQDSFDTIHFFGNETSPGGNDFEIFADPRTVGHSVVSPQDTVQRCREIFFPETAHEA

SEQ ID NO: 29497 - DNA, 478 bp, Homo sapiens
ctggagatacttgggcccctgattttttgcggggagtgtggattcttgtcccctttgaagtcctaggcctaaagagaggtcctggtgttggatagatgccagggcccctcctctggcccaggacgcctgctgcaagcccacccagatggggccagagtctgtgtggacaaccgtccccagccagtctgctcctagtggcactggcttcgtcctcccagggcccagagtgttccccatgctccacctggtggcccaggccacagctgctgcttgtatttcggtacagaagaggtttctttctgcaccaggaggaggcgtgctcaagtatcggtacgagatctagcctgccctgcctgcctgccctgggcgatgaggtacggtggggaaggtgcctattttagagaactttgtcacagtattaaagttcccagaacaaagtaggtgtcagctgtgtctgaatggataattggccccagtc

SEQ ID NO: 29498 - protein, 101 aa, Homo sapiens
MPGPLLWPRTPAASPPRWGQSLCGQPSPASLLLVALASSSQGPECSPCSTWWPRPQLLLVFRYRRGFFLHQEEACSSIGTRSSLPCLPALGDEVRWGRCLF

SEQ ID NO: 29499 - DNA, 2064 bp, Homo sapiens
ttgatccccacaatcacactttagagtaggcgtgatcatcccatttaacagaggatgactctgaagttatccaggaaatcgactggacctcagagcccctggtctcagcccagtcaaagtgggtgcctccagttcctcaagccagaaacttcctcgaatttttccttttccccacctcttgtttattccatcagcaaaccccaaaatatctccctgtcccctctgtctccatctccaccacgccatcatagtccaggtaaccacgtgccacccagaccccgcaacagcctctgggctgtgctccctgtgcctcccacctcccacccactccaactgcttcgcctggcagtcagagctgaaacctccaactctcccatgcagccagccttgagaacccagtgcgatggcagctatagaacagaagggagcccctctgcagaggggcaggggagcacagagtggaaatgatgccctctgccagagagtactgcatggcttccagaggaggaagctgaatcttggaggatgagtggcagggaagccagggaagggcggttctgacagaaggacctgcatggatgcctgtgtgcagaggcccacaggtgtgactggcttctttggaagaaaaccaagctgcagagggagaaaggctggagaagcaggttgtagcctcagattgaacaaatggcctttgaatgtgaaaccaagggtgtaggcttcctctctctttacttgcccgtggggtcacagacgtggtctcacactctttcttcctcctgtcctctatgtgaccctgaagtcattgagaagtttgattatgtgtttgccgagaacgggacggtgcagtataagcacggacgactgctctccaagcagaccatccagaaccacctgggggaggagctgctgcaggacttgatcaacttctgcctcagctacatggccctgctcaggctgcccaagaagcggtgaggtcccaccagcctggtctccagaacctggggcctgagggaggagaagtgtgggtccctcagagggaacctggagatacttgggcccctgattttttgcggggagtgtggattcttgtcccctttgaagtcctaggaggctggggtcccaggtggggctagatttgaattcagggccgttctggttctctctggctccccgccctccctcaccaccagtggaaccttcatcgagttccggaatggcatgctgaacatctcgcccatcggccggagctgcaccctggaggagaggatcgagttctccgaactggacaagaaagagaagatccgggagaagttcgtggaagccctgaaaacagagtttgctggcaaagggctgaggttctctcgaggaggcatgatcagctttgacgtcttccccgagggctgggacaagcgctactgcctggatagcctggaccaggacagcttcgacaccatccacttctttgggaacgagactagccctggtgggaacgactttgagatctttgccgacccccggactgttggccacagcgtggtgtctcctcaggacacggtgcagcgatgccgggagattttcttcccagagacagctcatgaggcgtgaccggggcccacatctgtgtgtcgtgacttctgaagagtttggcctaggcctaaagagaggtcctggtgttggatagatgccagggcccctcctctggcccaggacgcctgctgcaagcccacccagatggggccagagtctgtgtggacaaccgtccccagccagtctgctcctagtggcactggcttcgtcctcccagggcccagagtgttccccatgctccacctggtggcccaggccacagctgctgcttgtatttcggtacagaagaggtttctttctgcaccaggaggaggcgtgctcaagtatcggtacgagatctagcctgccctgcctgcctgccctgggcgatgaggtacggtggggaaggtgcctattttagagaactttgtcacagtattaaagttcccagaacaaagtaggtgtcagctgtgtctgaatggataattggccccagtc

SEQ ID NO: 29500 - protein, 128 aa, Homo sapiens
MLNISPIGRSCTLEERIEFSELDKKEKIREKFVEALKTEFAGKGLRFSRGGMISFDVFPEGWDKRYCLDSLDQDSFDTIHFFGNETSPGGNDFEIFADPRTVGHSVVSPQDTVQRCREIFFPETAHEA

SEQ ID NO: 29501 - DNA, 1322 bp, Homo sapiens
gacgggaccctcacgccggctcgccaggctctagtctcaaactcctgggtcaagtgatctttctgccttggcctcgcaaagtgttgggattgcagacctgagccacagtgtccaacctgtctaatttttggtgtctaagctttgtactgcttcagatccagaaaattgaccctgaggtggccgccttcctgcagaagctacgaagtagagtgcagatcggtgtggtgggcggctctgactactgtaagatcgctgagcagctgggtgacggggatgaagtcattgagaagtttgattatgtgtttgccgagaacgggacggtgcagtataagcacggacgactgctctccaagcagaccatccagaaccacctgggggaggagctgctgcaggacttgatcaacttctgcctcagctacatggccctgctcaggctgcccaagaagcgtggaaccttcatcgagttccggaatggcatgctgaacatctcgcccatcggccggagctgcaccctggaggagaggatcgagttctccgaactggacaagaaagagaagatccgggagaagttcgtggaagccctgaaaacagagtttgctggcaaagggctgaggttctctcgaggaggcatgatcagctttgacgtcttccccgagggctgggacaagcgctactgcctggatagcctggaccaggacagcttcgacaccatccacttctttgggaacgagactagccctggtgggaacgactttgagatctttgccgacccccggactgttggccacagcgtggtgtctcctcaggacacggtgcagcgatgccgggagattttcttcccagagacagctcatgaggcgtgaccggggcccacatctgtgtgtcgtgacttctgaagagtttggcctaggcctaaagagaggtcctggtgttggatagatgccagggcccctcctctggcccaggacgcctgctgcaagcccacccagatggggccagagtctgtgtggacaaccgtccccagccagtctgctcctagtggcactggcttcgtcctcccagggcccagagtgttccccatgctccacctggtggcccaggccacagctgctgcttgtatttcggtacagaagaggtttctttctgcaccaggaggaggcgtgctcaagtatcggtacgagatctagcctgccctgcctgcctgccctgggcgatgaggtacggtggggaaggtgcctattttagagaactttgtcacagtattaaagttcccagaacaaagtaggtgtcagctgtgtctgaatggataattggccccagtc

SEQ ID NO: 29502 - protein, 147 aa, Homo sapiens
MALLRLPKKRGTFIEFRNGMLNISPIGRSCTLEERIEFSELDKKEKIREKFVEALKTEFAGKGLRFSRGGMISFDVFPEGWDKRYCLDSLDQDSFDTIHFFGNETSPGGNDFEIFADPRTVGHSVVSPQDTVQRCREIFFPETAHEA

SEQ ID NO: 29503 - DNA, 1019 bp, Homo sapiens
cagcccgcaggaaggagcgcgtcctctgcctgtttgacgtggacgggaccctcacgccggctcgccagtcattgagaagtttgattatgtgtttgccgagaacgggacggtgcagtataagcacggacgactgctctccaagcagtggaaccttcatcgagttccggaatggcatgctgaacatctcgcccatcggccggagctgcaccctggaggagaggatcgagttctccgaactggacaagaaagagaagatccgggagaagttcgtggaagccctgaaaacagagtttgctggcaaagggctgaggttctctcgaggaggcatgatcagctttgacgtcttccccgagggctgggacaagcgctactgcctggatagcctggaccaggacagcttcgacaccatccacttctttgggaacgagactagccctggtgggaacgactttgagatctttgccgacccccggactgttggccacagcgtggtgtctcctcaggacacggtgcagcgatgccgggagattttcttcccagagacagctcatgaggcgtgaccggggcccacatctgtgtgtcgtgacttctgaagagtttggcctaggcctaaagagaggtcctggtgttggatagatgccagggcccctcctctggcccaggacgcctgctgcaagcccacccagatggggccagagtctgtgtggacaaccgtccccagccagtctgctcctagtggcactggcttcgtcctcccagggcccagagtgttccccatgctccacctggtggcccaggccacagctgctgcttgtatttcggtacagaagaggtttctttctgcaccaggaggaggcgtgctcaagtatcggtacgagatctagcctgccctgcctgcctgccctgggcgatgaggtacggtggggaaggtgcctattttagagaactttgtcacagtattaaagttcccagaacaaagtaggtgtcagctgtgtctgaatggataattggccccagtc

SEQ ID NO: 29504 - protein, 157 aa, Homo sapiens
MCLPRTGRCSISTDDCSPSSGTFIEFRNGMLNISPIGRSCTLEERIEFSELDKKEKIREKFVEALKTEFAGKGLRFSRGGMISFDVFPEGWDKRYCLDSLDQDSFDTIHFFGNETSPGGNDFEIFADPRTVGHSVVSPQDTVQRCREIFFPETAHEA

SEQ ID NO: 29505 - DNA, 1191 bp, Homo sapiens
cttcgggactccgccccgcgcgcggacctgcagccatggcagtcaccgcccaggcagcccgcaggaaggagcgcgtcctctgcctgtttgacgtggacgggaccctcacgccggctcgccagaaaattgaccctgaggtggccgccttcctgcagaagctacgaagtagagtgcagatcggtgtggtgggcggctctgactactgtaagatcgctgagcagctgggtgacggggatgaagtcattgagaagtttgattatgtgtttgccgagaacgggacggtgcagtataagcacggacgactgctctccaagcagtggaaccttcatcgagttccggaatggcatgctgaacatctcgcccatcggccggagctgcaccctggaggagaggatcgagttctccgaactggacaagaaagagaagatccgggagaagttcgtggaagccctgaaaacagagtttgctggcaaagggctgaggttctctcgaggaggcatgatcagctttgacgtcttccccgagggctgggacaagcgctactgcctggatagcctggaccaggacagcttcgacaccatccacttctttgggaacgagactagccctggtgggaacgactttgagatctttgccgacccccggactgttggccacagcgtggtgtctcctcaggacacggtgcagcgatgccgggagattttcttcccagagacagctcatgaggcgtgaccggggcccacatctgtgtgtcgtgacttctgaagagtttggcctaggcctaaagagaggtcctggtgttggatagatgccagggcccctcctctggcccaggacgcctgctgcaagcccacccagatggggccagagtctgtgtggacaaccgtccccagccagtctgctcctagtggcactggcttcgtcctcccagggcccagagtgttccccatgctccacctggtggcccaggccacagctgctgcttgtatttcggtacagaagaggtttctttctgcaccaggaggaggcgtgctcaagtatcggtacgagatctagcctgccctgcctgcctgccctgggcgatgaggtacggtggggaaggtgcctattttagagaactttgtcacagtattaaagttcccagaacaaagtaggtgtcagctgtgtctgaatggataattggccccagtc

SEQ ID NO: 29506 - protein, 165 aa, Homo sapiens
MKSLRSLIMCLPRTGRCSISTDDCSPSSGTFIEFRNGMLNISPIGRSCTLEERIEFSELDKKEKIREKFVEALKTEFAGKGLRFSRGGMISFDVFPEGWDKRYCLDSLDQDSFDTIHFFGNETSPGGNDFEIFADPRTVGHSVVSPQDTVQRCREIFFPETAHEA

SEQ ID NO: 29507 - DNA, 1225 bp, Homo sapiens
cgttgcatcttcgggactccgccccgcgcgcggacctgcagccatggcagtcaccgcccaggcagcccgcaggaaggagcgcgtcctctgcctgtttgacgtggacgggaccctcacgccggctcgccagaaaattgaccctgaggtggccgccttcctgcagaagctacgaagtagagtgcagatcggtgtggtgggcggctctgactactgtaagatcgctgagcagctgggtgacggggatgaagtcattgagaagtttgattatgtgtttgccgagaacgggacggtgcagtataagcacggacgactgctctccaagcagaccatccagaaccacctgggggaggagctgctgcaggacttgatcaacttctgcctcagctacatggccctgctcaggctgcccaagaagcgtggaaccttcatcgagttccggaatggcatgctgaacatctcgcccatcggccggagctgcaccctggaggagaggatcgagttctccgaactggacaagaaagagaagatccgggagaagttcgtggaagccctgaaaacagagtttgctggcaaagggctgaggttctctcgaggaggcatgatcagctttgacgtcttccccgagggctgggacaagcgctactgcctggatagcctggaccaggacagcttcgacaccatccacttctttgggaacgagactagccctgacacggtgcagcgatgccgggagattttcttcccagagacagctcatgaggcgtgaccggggcccacatctgtgtgtcgtgacttctgaagagtttggcctaggcctaaagagaggtcctggtgttggatagatgccagggcccctcctctggcccaggacgcctgctgcaagcccacccagatggggccagagtctgtgtggacaaccgtccccagccagtctgctcctagtggcactggcttcgtcctcccagggcccagagtgttccccatgctccacctggtggcccaggccacagctgctgcttgtatttcggtacagaagaggtttctttctgcaccaggaggaggcgtgctcaagtatcggtacgagatctagcctgccctgcctgcctgccctgggcgatgaggtacggtggggaaggtgcctattttagagaactttgtcacagtattaaagttcccagaacaaagtaggtgtcagctgtgtctgaatggataattggccccagtc

SEQ ID NO: 29508 - protein, 240 aa, Homo sapiens
MAVTAQAARRKERVLCLFDVDGTLTPARQKIDPEVAAFLQKLRSRVQIGVVGGSDYCKIAEQLGDGDEVIEKFDYVFAENGTVQYKHGRLLSKQTIQNHLGEELLQDLINFCLSYMALLRLPKKRGTFIEFRNGMLNISPIGRSCTLEERIEFSELDKKEKIREKFVEALKTEFAGKGLRFSRGGMISFDVFPEGWDKRYCLDSLDQDSFDTIHFFGNETSPDTVQRCREIFFPETAHEA

SEQ ID NO: 29509 - DNA, 1237 bp, Homo sapiens
cgttgcatcttcgggactccgccccgcgcgcggacctgcagccatggcagtcaccgcccaggcagcccgcaggaaggagcgcgtcctctgcctgtttgacgtggacgggaccctcacgccggctcgccagaaaattgaccctgaggtggccgccttcctgcagaagctacgaagtagagtgcagatcggtgtggtgggcggctctgactactgtaagatcgctgagcagctgggtgacggggatgaagtcattgagaagtttgattatgtgtttgccgagaacgggacggtgcagtataagcacggacgactgctctccaagcagaccatccagaaccacctgggggaggagctgctgcaggacttgatcaacttctgcctcagctacatggccctgctcaggctgcccaagaagcgtggaaccttcatcgagttccggaatggcatgctgaacatctcgcccatcggccggagctgcaccctggaggagaggatcgagttctccgaactggacaagaaagagaagatccgggagaagttcgtggaagccctctttgacgtcttccccgagggctgggacaagcgctactgcctggatagcctggaccaggacagcttcgacaccatccacttctttgggaacgagactagccctggtgggaacgactttgagatctttgccgacccccggactgttggccacagcgtggtgtctcctcaggacacggtgcagcgatgccgggagattttcttcccagagacagctcatgaggcgtgaccggggcccacatctgtgtgtcgtgacttctgaagagtttggcctaggcctaaagagaggtcctggtgttggatagatgccagggcccctcctctggcccaggacgcctgctgcaagcccacccagatggggccagagtctgtgtggacaaccgtccccagccagtctgctcctagtggcactggcttcgtcctcccagggcccagagtgttccccatgctccacctggtggcccaggccacagctgctgcttgtatttcggtacagaagaggtttctttctgcaccaggaggaggcgtgctcaagtatcggtacgagatctagcctgccctgcctgcctgccctgggcgatgaggtacggtggggaaggtgcctattttagagaactttgtcacagtattaaagttcccagaacaaagtaggtgtcagctgtgtctgaatggataattggccccagtc

SEQ ID NO: 29510 - protein, 244 aa, Homo sapiens
MAVTAQAARRKERVLCLFDVDGTLTPARQKIDPEVAAFLQKLRSRVQIGVVGGSDYCKIAEQLGDGDEVIEKFDYVFAENGTVQYKHGRLLSKQTIQNHLGEELLQDLINFCLSYMALLRLPKKRGTFIEFRNGMLNISPIGRSCTLEERIEFSELDKKEKIREKFVEALFDVFPEGWDKRYCLDSLDQDSFDTIHFFGNETSPGGNDFEIFADPRTVGHSVVSPQDTVQRCREIFFPETAHEA

SEQ ID NO: 29511 - DNA, 1310 bp, Homo sapiens
atccctgagctgcttctgccgttgcatcttcgggactccgccccgcgcgcggacctgcagccatggcagtcaccgcccaggcagcccgcaggaaggagcgcgtcctctgcctgtttgacgtggacgggaccctcacgccggctcgccagaaaattgaccctgaggtggccgccttcctgcagaagctacgaagtagagtgcagatcggtgtggtgggcggctctgactactgtaagatcgctgagcagctgggtgacggggatgaagtcattgagaagtttgattatgtgtttgccgagaacgggacggtgcagtataagcacggacgactgctctccaagcagaccatccagaaccacctgggggaggagctgctgcaggacttgatcaacttctgcctcagctacatggccctgctcaggctgcccaagaagcgtggaaccttcatcgagttccggaatggcatgctgaacatctcgcccatcggccggagctgcaccctggaggagaggatcgagttctccgaactggacaagaaagagaagatccgggagaagttcgtggaagccctgaaaacagagtttgctggcaaagggctgaggttctctcgaggaggcatgatcagctttgacgtcttccccgagggctgggacaagcgctactgcctggatagcctggaccaggacagcttcgacaccatccacttctttgggaacgagactagccctggtgggaacgactttgagatctttgccgacccccggactgttggccacagcgtggtgtctcctcaggacacggtgcagcgatgccgggagattttcttcccagagacagctcatgaggcgtgaccggggcccacatctgtgtgtcgtgacttctgaagagtttggcctaggcctaaagagaggtcctggtgttggatagatgccagggcccctcctctggcccaggacgcctgctgcaagcccacccagatggggccagagtctgtgtggacaaccgtccccagccagtctgctcctagtggcactggcttcgtcctcccagggcccagagtgttccccatgctccacctggtggcccaggccacagctgctgcttgtatttcggtacagaagaggtttctttctgcaccaggaggaggcgtgctcaagtatcggtacgagatctagcctgccctgcctgcctgccctgggcgatgaggtacggtggggaaggtgcctattttagagaactttgtcacagtattaaagttcccagaacaaagtaggtgtcagctgtgtctgaatggataattggccccagtc

SEQ ID NO: 29512 - protein, 262 aa, Homo sapiens
MAVTAQAARRKERVLCLFDVDGTLTPARQKIDPEVAAFLQKLRSRVQIGVVGGSDYCKIAEQLGDGDEVIEKFDYVFAENGTVQYKHGRLLSKQTIQNHLGEELLQDLINFCLSYMALLRLPKKRGTFIEFRNGMLNISPIGRSCTLEERIEFSELDKKEKIREKFVEALKTEFAGKGLRFSRGGMISFDVFPEGWDKRYCLDSLDQDSFDTIHFFGNETSPGGNDFEIFADPRTVGHSVVSPQDTVQRCREIFFPETAHEA

SEQ ID NO: 29513 - DNA, 1283 bp, Homo sapiens
atccctgagctgcttctgccgttgcatcttcgggactccgccccgcgcgcggacctgcagccatggcagtcaccgcccaggcagcccgcaggaaggagcgcgtcctctgcctgtttgacgtggacgggaccctcacgccggctcgccagaaaattgaccctgaggtggccgccttcctgcagaagctacgaagtagagtgcagatcggtgtggtgggcggctctgactactgtaagatcgctgagcagctgggtgacggggatgaagtcattgagaagtttgattatgtgtttgccgagaacgggacggtgcagtataagcacggacgactgctctccaagcagaccatccagaaccacctgggggaggagctgctgcaggacttgatcaacttctgcctcagctacatggccctgctcaggctgcccaagaagcgtggaaccttcatcgagttccggaatggcatgctgaacatctcgcccatcggccggagctgcaccctggaggagaggatcgagttctccgaactggacaagaaagagaagatccgggagaagttcgtggaagccctgaaaacagagtttgctggcaaagggctgaggttctctcgaggaggcatgatcagctttgacgtcttccccgagggctgggacaagcgctactgcctggatagcctggaccaggacagcttcgacaccatccacttctttgggaacgagactagccctggtgggaacgactttgagatctttgccgacccccggactgttggccacagcgtggtgtctcctcaggacacggtgcagcgatgccgggagattttcttcccagagacagctcatgaggcgtgaccggggcccacatctgtgtgtcgtgacttctgaagagtttggcctaggcctaaagagaggtcctggtgttggatagatgccagggcccctcctctggcccaggacgcctgctgcaagcccacccagatggggccagagtctgtgtggacaaccgtccccagccagtctgctcctagtggcactggcttcgtcctcccagggcccagagtgttccccatgctccacctggtggcccaggccacagctgctgcttgtatttcggtacagaagaggtttctttctgcaccaggaggaggcgtgctcaagtatcggtacgagatctagcctgccctgcctgcctgccctgggcgatgaggtacggtggggaaggtgcctattttagagaactttgtcacagtattaaagttcccagaacaaagtaggtgtcagctg

SEQ ID NO: 29514 - protein, 262 aa, Homo sapiens; identical to SEQ ID NO: 29512

SEQ ID NO: 29515 - DNA, 2541 bp, Homo sapiens
ggggtagttaggattggtcttaggcaaagaacccttcccccccaatacacgtgctgagaagttatcccttcctgtccacccaggttcccagtcccagctctacccatttgccttgtaacctggaaaagcatctttactaacgtgtgcctcagtttccttatgtgtaaggtgggggtaatagcagttcccatcccatgggctgtcatgagcactggatgaggtggcacatggaccccacctggcatggagttggggagccacaccctaactccccaccccagagccttctcaagtatttttggctcttgtttgctcccttctggcactggaggagcatgaaccttcctgatctgtgcgccctgccctggcccagagctggtgtaaataaatgcttaacccagctcatcttccagaaccctgaagcggggatgagtacttcccttccttagatgaggacactgaggccagagggtgagtaaccagctcgaggtcacagtgccggtccctgctgaggctggccttgcacatggggctgtctagtgaccagccttgttctccagagaagggaggtgcagccagcctcggccatgtggaaacatttcttcagagcctggggcagtcttagtggtagccctgggcctacagagtggacgctggtggggactctggcctccctggggcccacctacctgctggaaagccaggccaaggctggcagggggctcacatcccttatctctgcttttccatgagagggaagcaggcaggggtcattcattacttctctgtcctttagtccaggaaataggctcagagaggtcaggtgacttgcccatggtcacacagctgaggagtacagtagccaagcctggctacttgccttcagatctcaggctagggggtgtctggctttatatctgacatcctccctgggccacttctccaagctccatgctgctgaccactgcctgcctttccgccccagtcctacccggctctgactacagggccataccagccaccccactcctgtgctccagaatcctcagcgcctcttggtcccccaggatgtggtcagacttcccagcccggtctcgagaccctctgtcagctgaatgtcctgctggctggtttagatgttcagctgcccctcagactgggcatagctgctcccctttgtggccctctgagatggagatcctgggggctggcggggagaatgtccccctgctccacgtttgcggagctgctgccagagttcctgctcagagggacggggccggcctgggcactacctagtccccagcccagccgcgtctttgcatgctgggtgctctgccatgcctggcatcctgctgccctctgtgaatgcccacagccacctcctcacaggtctcctgctctcagctcccatgctcatttctgagtatttgctttgttgagctggttacagataacaggatcgagccctgccctgaggtggacactgatgtgggatccagattgccccgtctcctcgcccttcctactcgtgtctctcctctgaggtctccttcagaagacccagcccacagccccattggcagccccatcccttctggatttaggccctggctctgccaccagggctaggtgaccttgaccaaggcacaacccctctctgagccttagtttgcgcatctgcacagttgggggtcctacccacctagaatgctcagcacgctcacgtggactgtgtgcccagccagggcctggcacacagcaggtcctctgagctgccatccgctccctcccctctgcagaaagagaagatccgggagaagttcgtggaagccctgaaaacagagtttgctggcaaagggctgaggttctctcgaggaggcatgatcagctttgacgtcttccccgagggctgggacaagcgctactgcctggatagcctggaccaggacagcttcgacaccatccacttctttgggaacgagactagccctggtgggaacgactttgagatctttgccgacccccggactgttggccacagcgtggtgtctcctcaggacacggtgcagcgatgccgggagattttcttcccagagacagctcatgaggcgtgaccggggcccacatctgtgtgtcgtgacttctgaagagtttggcctaggcctaaagagaggtcctggtgttggatagatgccagggcccctcctctggcccaggacgcctgctgcaagcccacccagatggggccagagtctgtgtggacaaccgtccccagccagtctgctcctagtggcactggcttcgtcctcccagggcccagagtgttccccatgctccacctggtggcccaggccacagctgctgcttgtatttcggtacagaagaggtttctttctgcaccaggaggaggcgtgctcaagtatcggtacgagatctagcctgccctgcctgcctgccctgggcgatgaggtacggtggggaaggtgcctattttagagaactttgtcacagtattaaagttcccagaacaaagtaggt

SEQ ID NO: 29516 - protein, 77 aa, Homo sapiens; identical to SEQ ID NO: 29496

SEQ ID NO: 29517 - DNA, 2029 bp, Homo sapiens
ttgatccccacaatcacactttagagtaggcgtgatcatcccatttaacagaggatgactctgaagttatccaggaaatcgactggacctcagagcccctggtctcagcccagtcaaagtgggtgcctccagttcctcaagccagaaacttcctcgaatttttccttttccccacctcttgtttattccatcagcaaaccccaaaatatctccctgtcccctctgtctccatctccaccacgccatcatagtccaggtaaccacgtgccacccagaccccgcaacagcctctgggctgtgctccctgtgcctcccacctcccacccactccaactgcttcgcctggcagtcagagctgaaacctccaactctcccatgcagccagccttgagaacccagtgcgatggcagctatagaacagaagggagcccctctgcagaggggcaggggagcacagagtggaaatgatgccctctgccagagagtactgcatggcttccagaggaggaagctgaatcttggaggatgagtggcagggaagccagggaagggcggttctgacagaaggacctgcatggatgcctgtgtgcagaggcccacaggtgtgactggcttctttggaagaaaaccaagctgcagagggagaaaggctggagaagcaggttgtagcctcagattgaacaaatggcctttgaatgtgaaaccaagggtgtaggcttcctctctctttacttgcccgtggggtcacagacgtggtctcacactctttcttcctcctgtcctctatgtgaccctgaagtcattgagaagtttgattatgtgtttgccgagaacgggacggtgcagtataagcacggacgactgctctccaagcagaccatccagaaccacctgggggaggagctgctgcaggacttgatcaacttctgcctcagctacatggccctgctcaggctgcccaagaagcggtgaggtcccaccagcctggtctccagaacctggggcctgagggaggagaagtgtgggtccctcagagggaacctggagatacttgggcccctgattttttgcggggagtgtggattcttgtcccctttgaagtcctaggaggctggggtcccaggtggggctagatttgaattcagggccgttctggttctctctggctccccgccctccctcaccaccagtggaaccttcatcgagttccggaatggcatgctgaacatctcgcccatcggccggagctgcaccctggaggagaggatcgagttctccgaactggacaagaaagagaagatccgggagaagttcgtggaagccctgaaaacagagtttgctggcaaagggctgaggttctctcgaggaggcatgatcagctttgacgtcttccccgagggctgggacaagcgctactgcctggatagcctggaccaggacagcttcgacaccatccacttctttgggaacgagactagccctggtgggaacgactttgagatctttgccgacccccggactgttggccacagcgtggtgtctcctcaggacacggtgcagcgatgccgggagattttcttcccagagacagctcatgaggcgtgaccggggcccacatctgtgtgtcgtgacttctgaagagtttggcctaggcctaaagagaggtcctggtgttggatagatgccagggcccctcctctggcccaggacgcctgctgcaagcccacccagatggggccagagtctgtgtggacaaccgtccccagccagtctgctcctagtggcactggcttcgtcctcccagggcccagagtgttccccatgctccacctggtggcccaggccacagctgctgcttgtatttcggtacagaagaggtttctttctgcaccaggaggaggcgtgctcaagtatcggtacgagatctagcctgccctgcctgcctgccctgggcgatgaggtacggtggggaaggtgcctattttagagaactttgtcacagtattaaagttcccagaacaaagtaggt

SEQ ID NO: 29518 - protein, 128 aa, Homo sapiens; identical to SEQ ID NO: 29500

SEQ ID NO: 29519 - DNA, 1287 bp, Homo sapiens
gacgggaccctcacgccggctcgccaggctctagtctcaaactcctgggtcaagtgatctttctgccttggcctcgcaaagtgttgggattgcagacctgagccacagtgtccaacctgtctaatttttggtgtctaagctttgtactgcttcagatccagaaaattgaccctgaggtggccgccttcctgcagaagctacgaagtagagtgcagatcggtgtggtgggcggctctgactactgtaagatcgctgagcagctgggtgacggggatgaagtcattgagaagtttgattatgtgtttgccgagaacgggacggtgcagtataagcacggacgactgctctccaagcagaccatccagaaccacctgggggaggagctgctgcaggacttgatcaacttctgcctcagctacatggccctgctcaggctgcccaagaagcgtggaaccttcatcgagttccggaatggcatgctgaacatctcgcccatcggccggagctgcaccctggaggagaggatcgagttctccgaactggacaagaaagagaagatccgggagaagttcgtggaagccctgaaaacagagtttgctggcaaagggctgaggttctctcgaggaggcatgatcagctttgacgtcttccccgagggctgggacaagcgctactgcctggatagcctggaccaggacagcttcgacaccatccacttctttgggaacgagactagccctggtgggaacgactttgagatctttgccgacccccggactgttggccacagcgtggtgtctcctcaggacacggtgcagcgatgccgggagattttcttcccagagacagctcatgaggcgtgaccggggcccacatctgtgtgtcgtgacttctgaagagtttggcctaggcctaaagagaggtcctggtgttggatagatgccagggcccctcctctggcccaggacgcctgctgcaagcccacccagatggggccagagtctgtgtggacaaccgtccccagccagtctgctcctagtggcactggcttcgtcctcccagggcccagagtgttccccatgctccacctggtggcccaggccacagctgctgcttgtatttcggtacagaagaggtttctttctgcaccaggaggaggcgtgctcaagtatcggtacgagatctagcctgccctgcctgcctgccctgggcgatgaggtacggtggggaaggtgcctattttagagaactttgtcacagtattaaagttcccagaacaaagtaggt

SEQ ID NO: 29520 - protein, 147 aa, Homo sapiens; identical to SEQ ID NO: 29502

SEQ ID NO: 29521 - DNA, 984 bp, Homo sapiens
cagcccgcaggaaggagcgcgtcctctgcctgtttgacgtggacgggaccctcacgccggctcgccagtcattgagaagtttgattatgtgtttgccgagaacgggacggtgcagtataagcacggacgactgctctccaagcagtggaaccttcatcgagttccggaatggcatgctgaacatctcgcccatcggccggagctgcaccctggaggagaggatcgagttctccgaactggacaagaaagagaagatccgggagaagttcgtggaagccctgaaaacagagtttgctggcaaagggctgaggttctctcgaggaggcatgatcagctttgacgtcttccccgagggctgggacaagcgctactgcctggatagcctggaccaggacagcttcgacaccatccacttctttgggaacgagactagccctggtgggaacgactttgagatctttgccgacccccggactgttggccacagcgtggtgtctcctcaggacacggtgcagcgatgccgggagattttcttcccagagacagctcatgaggcgtgaccggggcccacatctgtgtgtcgtgacttctgaagagtttggcctaggcctaaagagaggtcctggtgttggatagatgccagggcccctcctctggcccaggacgcctgctgcaagcccacccagatggggccagagtctgtgtggacaaccgtccccagccagtctgctcctagtggcactggcttcgtcctcccagggcccagagtgttccccatgctccacctggtggcccaggccacagctgctgcttgtatttcggtacagaagaggtttctttctgcaccaggaggaggcgtgctcaagtatcggtacgagatctagcctgccctgcctgcctgccctgggcgatgaggtacggtggggaaggtgcctattttagagaactttgtcacagtattaaagttcccagaacaaagtaggt

SEQ ID NO: 29522 - protein, 157 aa, Homo sapiens; identical to SEQ ID NO: 29504

SEQ ID NO: 29523 - DNA, 1156 bp, Homo sapiens
cttcgggactccgccccgcgcgcggacctgcagccatggcagtcaccgcccaggcagcccgcaggaaggagcgcgtcctctgcctgtttgacgtggacgggaccctcacgccggctcgccagaaaattgaccctgaggtggccgccttcctgcagaagctacgaagtagagtgcagatcggtgtggtgggcggctctgactactgtaagatcgctgagcagctgggtgacggggatgaagtcattgagaagtttgattatgtgtttgccgagaacgggacggtgcagtataagcacggacgactgctctccaagcagtggaaccttcatcgagttccggaatggcatgctgaacatctcgcccatcggccggagctgcaccctggaggagaggatcgagttctccgaactggacaagaaagagaagatccgggagaagttcgtggaagccctgaaaacagagtttgctggcaaagggctgaggttctctcgaggaggcatgatcagctttgacgtcttccccgagggctgggacaagcgctactgcctggatagcctggaccaggacagcttcgacaccatccacttctttgggaacgagactagccctggtgggaacgactttgagatctttgccgacccccggactgttggccacagcgtggtgtctcctcaggacacggtgcagcgatgccgggagattttcttcccagagacagctcatgaggcgtgaccggggcccacatctgtgtgtcgtgacttctgaagagtttggcctaggcctaaagagaggtcctggtgttggatagatgccagggcccctcctctggcccaggacgcctgctgcaagcccacccagatggggccagagtctgtgtggacaaccgtccccagccagtctgctcctagtggcactggcttcgtcctcccagggcccagagtgttccccatgctccacctggtggcccaggccacagctgctgcttgtatttcggtacagaagaggtttctttctgcaccaggaggaggcgtgctcaagtatcggtacgagatctagcctgccctgcctgcctgccctgggcgatgaggtacggtggggaaggtgcctattttagagaactttgtcacagtattaaagttcccagaacaaagtaggt

SEQ ID NO: 29524 - protein, 165 aa, Homo sapiens; identical to SEQ ID NO: 29506

SEQ ID NO: 29525 - DNA, 1201 bp, Homo sapiens
cgttgcatcttcgggactccgccccgcgcgcggacctgcagccatggcagtcaccgcccaggcagcccgcaggaaggagcgcgtcctctgcctgtttgacgtggacgggaccctcacgccggctcgccagaaaattgaccctgaggtggccgccttcctgcagaagctacgaagtagagtgcagatcggtgtggtgggcggctctgactactgtaagatcgctgagcagctgggtgacggggatgaagtcattgagaagtttgattatgtgtttgccgagaacgggacggtgcagtataagcacggacgactgctctccaagcagaccatccagaaccacctgggggaggagctgctgcaggacttgatcaacttctgcctcagctacatggccctgctcaggctgcccaagaagcgtggaaccttcatcgagttccggaatggcatgctgaacatctcgcccatcggccggagctgcaccctggaggagaggatcgagttctccgaactggacaagaaagagaagatccgggagaagttcgtggaagccctctttgacgtcttccccgagggctgggacaagcgctactgcctggatagcctggaccaggacagcttcgacaccatccacttctttgggaacgagactagccctggtgggaacgactttgagatctttgccgacccccggactgttggccacagcgtggtgtctcctcaggacacggtgcagcgatgccgggagattttcttcccagagacagctcatgaggcgtgaccggggcccacatctgtgtgtcgtgacttctgaagagtttggcctaggcctaaagagaggtcctggtgttggatagatgccagggcccctcctctggcccaggacgcctgctgcaagcccacccagatggggccagagtctgtgtggacaaccgtccccagccagtctgctcctagtggcactggcttcgtcctcccagggcccagagtgttccccatgctccacctggtggcccaggccacagctgctgcttgtatttcggtacagaagaggtttctttctgcaccaggaggaggcgtgctcaagtatcggtacgagatctagcctgccctgcctgcctgccctgggcgatgaggtacggtggggaaggtgcctattttagagaactttgtcacagtattaaagttcccagaacaaagtagg

SEQ ID NO: 29526 - protein, 244 aa, Homo sapiens; identical to SEQ ID NO: 29510

SEQ ID NO: 29527 - DNA, 1186 bp, Homo sapiens
cgttgcatcttcgggactccgccccgcgcgcggacctgcagccatggcagtcaccgcccaggcagcccgcaggaaggagcgcgtcctctgcctgtttgacgtggacgggaccctcacgccggctcgccagaaaattgaccctgaggtggccgccttcctgcagaagctacgaagtagagtgcagatcggtgtggtgggcggctctgactactgtaagatcgctgagcagctgggtgacggggatgaagtcattgagaagtttgattatgtgtttgccgagaacgggacggtgcagtataagcacggacgactgctctccaagcagaccatccagaaccacctgggggaggagctgctgcaggacttgatcaacttctgcctcagctacatggccctgctcaggctgcccaagaagcgtggaaccttcatcgagttccggaatggcatgctgaacatctcgcccatcggccggagctgcaccctggaggagaggatcgagttctccgaactggacaagaaagagaagatccgggagaagttcgtggaagccctgaaaacagagtttgctggcaaagggctgaggttctctcgaggaggcatgatcagctttgacgtcttccccgagggctgggacaagcgctactgcctggatagcctggaccaggacagcttcgacaccatccacttctttgggaacgagactagccctgacacggtgcagcgatgccgggagattttcttcccagagacagctcatgaggcgtgaccggggcccacatctgtgtgtcgtgacttctgaagagtttggcctaggcctaaagagaggtcctggtgttggatagatgccagggcccctcctctggcccaggacgcctgctgcaagcccacccagatggggccagagtctgtgtggacaaccgtccccagccagtctgctcctagtggcactggcttcgtcctcccagggcccagagtgttccccatgctccacctggtggcccaggccacagctgctgcttgtatttcggtacagaagaggtttctttctgcaccaggaggaggcgtgctcaagtatcggtacgagatctagcctgccctgcctgcctgccctgggcgatgaggtacggtggggaaggtgcctattttagagaactttgtcacagtattaaagttcccagaacaaagt

SEQ ID NO: 29528 - protein, 240 aa, Homo sapiens; identical to SEQ ID NO: 29508

SEQ ID NO: 29529 - DNA, 722 bp, Homo sapiens
cggacctgcagccatggcagtcaccgcccaggcagcccgcaggaaggagcgcgtcctctgcctgtttgacgtggacgggaccctcacgccggctcgccagaaaattgaccctgaggtggccgccttcctgcagaagctacgaagtagagtgcagatcggtgtggtgggcggctctgactactgtaagatcgctgagcagctgggtgacggggatgaagtcattgagaagtttgattatgtgtttgccgagaacgggacggtgcagtataagcacggacgactgctctccaagcaggtcagtgtcccccagggcttagccaggggcaccccacttttccatagtggagcagtccaagggggcttctgtcctgggctgggggagagacactgtgcctgtctcagggtcaggcagcccaggccacgctcagagccctgtgttccttggccagaccatccagaaccacctgggggaggagctgctgcaggacttgatcaacttctgcctcagctacatggccctgctcaggctgcccaagaagcggtgaggtcccaccagcctggtctccagaacctggggcctgagggaggagaagtgtgggtccctcagagggaacctggagatacttgggcccctgattttttgcggggagtgtggattcttgtcccctttgaagtcctaggaggctggggtcccaggtggggctagatttgaattcagggcc

SEQ ID NO: 29530 - protein, 230 aa, Homo sapiens
MAVTAQAARRKERVLCLFDVDGTLTPARQKIDPEVAAFLQKLRSRVQIGVVGGSDYCKIAEQLGDGDEVIEKFDYVFAENGTVQYKHGRLLSKQVSVPQGLARGTPLFHSGAVQGGFCPGLGERHCACLRVRQPRPRSEPCVPWPDHPEPPGGGAAAGLDQLLPQLHGPAQAAQEAVRSHQPGLQNLGPEGGEVWVPQREPGDTWAPDFLRGVWILVPFEVLGGWGPRWG

SEQ ID NO: 29531 - DNA, 842 bp, Homo sapiens
agaacactctgcagcccgttctgtcctgatgtgccccaagccttggaagagccttgcaggccatcatccaggcagtataccccgaaaggacacaacacccccaaagccatctcacctcctccctcttgtcgttgattgcattcaggcagcctctgctcattccaggaccatgtctatttgcttattctgactcagtttctcctgaactatggccttatttaacagagatcctggcaggtttcgcaggcccagcaaggtgggctgttttttatatctgaggaagcacctcccaggaagagcttgcataggaaacaagactgctgtggcaggctggtgaggagccccagtccgccagccctggccctgccttcctatcattcgatgagtttgcagtcccacagctctgctgagggatctaggttatggggccctgagcaaactggagtagccagaatgtgcttgctgttattattttatgggtggagttcctggaattgtctgaattaggtttgatatttctaggtttcatctgtctatactttggagtacttcattcctttaaacttggagatgattttcaaaaatggcagtatccactgaagaaaaagccagtgacttaaaagtttctgggcaaccttatttatggttgtcgtaatcatggaaaatctccaaactccagtatttgtagttttttttccatctgttactatgagagcaacctaggagccctttagaaaggcattaatgtgctgggattacaggcgtgagccaccgcgccggccgtgttacagttcttaaaggtggcgtgtccggagtttgttccttctgacgttcggatgtgt

SEQ ID NO: 29532 - protein, 53 aa, Homo sapiens
MCPKPWKSLAGHHPGSIPRKDTTPPKPSHLLPLVVDCIQAASAHSRTMSICLF

SEQ ID NO: 29533 - DNA, 2771 bp, Homo sapiens
ctgggaccgccctgcctcaccagggcttttcctttttaaacaaaacaaaccctaccagatttctattttataattttacatcagagctaacaaccaggggacggctttttaaatttcccagggaaggagaccgtcaggccgcatgtagacaatgctgctaagaaacagaacaaaatgccaccccttctaatagtattatactaatttattaaggctgtcttgtctgtgcgttcacttcggatgctgtttcctaagcgtcctccacactggagaaagggaggggctttgtttaaacagaaagcgagtcacagtttgcgggagccccaacctagaactctttccagagaacactcacgctctacccaagttgccaacacctgtgggacccaggtgagttttagaacatccgtgacccagaaagttactctagtgttaaatgaaccaaaggatttggtgtacatgggaccggtttcaggatgactaacctaacctaagtgaactctttagccacaaccctcaccttccctcccttaccccaagcaaggccagtgctggagcagccattgcctccggatcaagggagtaacagcaagtatcaggccggagaaaacaggataaagccattcctccttccacctagatggattgccaatcttctgccatcaattttgggaaacctgcctttgtgcccccgaggctgcctttcctcagcatagctgacttgtcatagtggatgaggtctgggctggagcagtagaagccaaggccttttttctgcaagtaatgatgtaggttatttgcagtctctgtaaccaccatccaggccagtacgcagtatttagctggggaccaagggatgggattccctactctaagaaaatacctttattttaattattattattttttgagacccgtctctactaaaaatacaaaattagccgggcatggtggcgcatgcctgtagtcccagctactcgggaggctgaggcaggagaatcgcttgaacccgggaggcagagattgcgatgagccgagatcgtaccagtgcactccagcctgggcgacagagtgagactccatctcaaaaaaataaaataatgaagtggaatcaaggtggcaagaaaatttagaatcgtttctgatagggactttcccttatcctaaatgtgttttgaaggcacacgttatttccattgtcattctgactttagaaaggcaggttggggcatgagtgggcattttcctaatgacttgctgctaggaggttataggcagggaacagtctgggagtctctaatccagagagactttcagattccctctcttcacatgaacctccattagttagattttgggaaagtgagcatgaagaagggactcagagctgccaggtacccgagtctcaggtctgacatccttgggccccttctgccacaacttcttgccacttcacggacttgaattatgttgcttcttcctggaagtctggcctgcagcacaggcctttcctctccaaaaagctgctgctcatttctggccccatctgctgctatctttgccatcagccatcacagtttggcatcatcagagtctcagctagaggagctgtcattctgccttagtgtttgcctgcgacctgaccaggggcatgaccagctgggatgtcaagtgacatttgggaacttgtagaggccaaatgattgaaagtttaattcttctcaagacccactgatttgccagtgtgcatggaaataatagattagagcagaaactagcagggactgttgtataatcgtgatctactagcagaattgggcccaaagagaaagaatttctgaggctgggtttcttctgggagggtagcaggttggtcttggccagtgctctgtttcccaccagtgttgttcccttttccagcttgcctggcccggctctgtcttccagggtcctgctccagacccctctgcctggggtctcccctccatccagggggttctgggcatcacagctcctttttttcctttctcctcttccagatccagtttcagctggtttgcttcttccagcaggcacccttaggcccaggagcagctcccctgagagaatttgagtcactcatttccttgaacagcacccccctttatactagcagccatttgtgccattgcctgtgccctagggtttgtggggagagagcgagggatcactgagcagttttcccagagctccatgggaaggcaagctctccctcccaatgggagccccactgtcactaactgtaaactcaggctcaggcttcaactgcctacccccatcctcatatttctgtctgtcccagcacctcaggagcattctcattgtggccggctaactccgcctggatgtgaacaggcaagcacagtgggaaatgagtcacgtacttgtattgcacagtggacacctctagaggtccattggtttaaagggatagggaaggaggagggatgagaccatcaccccctcccagaagtaaatctagtatctgagttttctttatgcccttgagtcaaactaataactgtctagtacggaggtgtttgctggttttcttcggtgttttttctaatgcaataaactcatttctgcctgctgcatttgtgtggtgcctgaatcaggtctgcacatgcatccaacatgaagcgaccccaggcttttgggtcccttggagcttaagtctgcggggtctggatgtgtctcctttgcatggttgtgagcctgtagataagaag

SEQ ID NO: 29534 - protein, 36 aa, Homo sapiens
MGFPTLRKYLYFNYYYFLRPVSTKNTKLAGHGGACL

SEQ ID NO: 29535 - DNA, 2612 bp, Homo sapiens
ctgggaccgccctgcctcaccagggcttttcctttttaaacaaaacaaaccctaccagatttctattttataattttacatcagagctaacaaccaggggacggctttttaaatttcccagggaaggagaccgtcaggccgcatgtagacaatgctgctaagaaacagaacaaaatgccaccccttctaatagtattatactaatttattaaggctgtcttgtctgtgcgttcacttcggatgctgtttcctaagcgtcctccacactggagaaagggaggggctttgtttaaacagaaagcgagtcacagtttgcgggagccccaacctagaactctttccagagaacactcacgctctacccaagttgccaacacctgtgggacccaggtgagttttagaacatccgtgacccagaaagttactctagtgttaaatgaaccaaaggatttggtgtacatgggaccggtttcaggatgactaacctaacctaagtgaactctttagccacaaccctcaccttccctcccttaccccaagcaaggccagtgctggagcagccattgcctccggatcaagggagtaacagcaagtatcaggccggagaaaacaggataaagccattcctccttccacctagatggattgccaatcttctgccatcaattttgggaaacctgcctttgtgcccccgaggctgcctttcctcagcatagctgacttgtcatagtggatgaggtctgggctggagcagtagaagccaaggccttttttctgcaagtaatgatgtaggttatttgcagtctctgtaaccaccatccaggccagtacgcagtatttagctggggaccaagggatgggattccctactctaagaaaatacctttattttaattattattattttttgagacggaactccatctcaaaaaaataaaataatgaagtggaatcaaggtggcaagaaaatttagaatcgtttctgatagggactttcccttatcctaaatgtgttttgaaggcacacgttatttccattgtcattctgactttagaaaggcaggttggggcatgagtgggcattttcctaatgacttgctgctaggaggttataggcagggaacagtctgggagtctctaatccagagagactttcagattccctctcttcacatgaacctccattagttagattttgggaaagtgagcatgaagaagggactcagagctgccaggtacccgagtctcaggtctgacatccttgggccccttctgccacaacttcttgccacttcacggacttgaattatgttgcttcttcctggaagtctggcctgcagcacaggcctttcctctccaaaaagctgctgctcatttctggccccatctgctgctatctttgccatcagccatcacagtttggcatcatcagagtctcagctagaggagctgtcattctgccttagtgtttgcctgcgacctgaccaggggcatgaccagctgggatgtcaagtgacatttgggaacttgtagaggccaaatgattgaaagtttaattcttctcaagacccactgatttgccagtgtgcatggaaataatagattagagcagaaactagcagggactgttgtataatcgtgatctactagcagaattgggcccaaagagaaagaatttctgaggctgggtttcttctgggagggtagcaggttggtcttggccagtgctctgtttcccaccagtgttgttcccttttccagcttgcctggcccggctctgtcttccagggtcctgctccagacccctctgcctggggtctcccctccatccagggggttctgggcatcacagctcctttttttcctttctcctcttccagatccagtttcagctggtttgcttcttccagcaggcacccttaggcccaggagcagctcccctgagagaatttgagtcactcatttccttgaacagcacccccctttatactagcagccatttgtgccattgcctgtgccctagggtttgtggggagagagcgagggatcactgagcagttttcccagagctccatgggaaggcaagctctccctcccaatgggagccccactgtcactaactgtaaactcaggctcaggcttcaactgcctacccccatcctcatatttctgtctgtcccagcacctcaggagcattctcattgtggccggctaactccgcctggatgtgaacaggcaagcacagtgggaaatgagtcacgtacttgtattgcacagtggacacctctagaggtccattggtttaaagggatagggaaggaggagggatgagaccatcaccccctcccagaagtaaatctagtatctgagttttctttatgcccttgagtcaaactaataactgtctagtacggaggtgtttgctggttttcttcggtgttttttctaatgcaataaactcatttctgcctgctgcatttgtgtggtgcctgaatcaggtctgcacatgcatccaacatgaagcgaccccaggcttttgggtcccttggagcttaagtctgcggggtctggatgtgtctcctttgcatggttgtgagcctgtagataagaag

SEQ ID NO: 29536 - protein, 85 aa, Homo sapiens
MGRQALPPNGSPTVTNCKLRLRLQLPTPILIFLSVPAPQEHSHCGRLTPPGCEQASTVGNESRTCIAQWTPLEVHWFKGIGKEEG

SEQ ID NO: 29537 - DNA, 2719 bp, Homo sapiens
ctgggaccgccctgcctcaccagggcttttcctttttaaacaaaacaaaccctaccagatttctattttataattttacatcagagctaacaaccaggggacggctttttaaatttcccagggaaggagaccgtcaggccgcatgtagacaatgctgctaagaaacagaacaaaatgccaccccttctaatagtattatactaatttattaaggctgtcttgtctgtgcgttcacttcggatgctgtttcctaagcgtcctccacactggagaaagggaggggctttgtttaaacagaaagcgagtcacagtttgcgggagccccaacctagaactctttccagagaacactcacgctctacccaagttgccaacacctgtgggacccaggtgagttttagaacatccgtgacccagaaagttactctagtgttaaatgaaccaaaggatttggtgtacatgggaccggtttcaggatgactaacctaacctaagtgaactctttagccacaaccctcaccttccctcccttaccccaagcaaggccagtgctggagcagccattgcctccggatcaagggagtaacagcaagtatcaggccggagaaaacaggataaagccattcctccttccacctagatggattgccaatcttctgccatcaattttgggaaacctgcctttgtgcccccgaggctgcctttcctcagcatagctgacttgtcatagtggatgaggtctgggctggagcagtagaagccaaggccttttttctgcaagtaatgatgtaggttatttgcagtctctgtaaccaccatccaggccagtacgcagtatttagctggggaccaagggatgggattccctactctaagaaaatacctttattttaattattattattttttgagacggagtctcgctctaccacccaggctggtgtgcagtggcatgatccgggaggcagagattgcgatgagccgagatcgtaccagtgcactccagcctgggcgacagagtgagactccatctcaaaaaaataaaataatgaagtggaatcaaggtggcaagaaaatttagaatcgtttctgatagggactttcccttatcctaaatgtgttttgaaggcacacgttatttccattgtcattctgactttagaaaggcaggttggggcatgagtgggcattttcctaatgacttgctgctaggaggttataggcagggaacagtctgggagtctctaatccagagagactttcagattccctctcttcacatgaacctccattagttagattttgggaaagtgagcatgaagaagggactcagagctgccaggtacccgagtctcaggtctgacatccttgggccccttctgccacaacttcttgccacttcacggacttgaattatgttgcttcttcctggaagtctggcctgcagcacaggcctttcctctccaaaaagctgctgctcatttctggccccatctgctgctatctttgccatcagccatcacagtttggcatcatcagagtctcagctagaggagctgtcattctgccttagtgtttgcctgcgacctgaccaggggcatgaccagctgggatgtcaagtgacatttgggaacttgtagaggccaaatgattgaaagtttaattcttctcaagacccactgatttgccagtgtgcatggaaataatagattagagcagaaactagcagggactgttgtataatcgtgatctactagcagaattgggcccaaagagaaagaatttctgaggctgggtttcttctgggagggtagcaggttggtcttggccagtgctctgtttcccaccagtgttgttcccttttccagcttgcctggcccggctctgtcttccagggtcctgctccagacccctctgcctggggtctcccctccatccagggggttctgggcatcacagctcctttttttcctttctcctcttccagatccagtttcagctggtttgcttcttccagcaggcacccttaggcccaggagcagctcccctgagagaatttgagtcactcatttccttgaacagcacccccctttatactagcagccatttgtgccattgcctgtgccctagggtttgtggggagagagcgagggatcactgagcagttttcccagagctccatgggaaggcaagctctccctcccaatgggagccccactgtcactaactgtaaactcaggctcaggcttcaactgcctacccccatcctcatatttctgtctgtcccagcacctcaggagcattctcattgtggccggctaactccgcctggatgtgaacaggcaagcacagtgggaaatgagtcacgtacttgtattgcacagtggacacctctagaggtccattggtttaaagggatagggaaggaggagggatgagaccatcaccccctcccagaagtaaatctagtatctgagttttctttatgcccttgagtcaaactaataactgtctagtacggaggtgtttgctggttttcttcggtgttttttctaatgcaataaactcatttctgcctgctgcatttgtgtggtgcctgaatcaggtctgcacatgcatccaacatgaagcgaccccaggcttttgggtcccttggagcttaagtctgcggggtctggatgtgtctcctttgcatggttgtgagcctgtagataagaag

SEQ ID NO: 29538 - protein, 74 aa, Homo sapiens
MGFPTLRKYLYFNYYYFLRRSLALPPRLVCSGMIREAEIAMSRDRTSALQPGRQSETPSQKNKIMKWNQGGKKI

SEQ ID NO: 29539 - DNA, 2803 bp, Homo sapiens
ccctcctggactccattcagatccagcctccaggagggagctccgtgggcagacccaacggccagagctaacaggactgcctgggaccgccctgcctcaccagggcttttcctttttaaacaaaacaaaccctaccagatttctattttataattttacatcagagctaacaaccaggggacggctttttaaatttcccagggaaggagaccgtcaggccgcatgtagacaatgctgctaagaaacagaacaaaatgccaccccttctaatagtattatactaatttattaaggctgtcttgtctgtgcgttcacttcggatgctgtttcctaagcgtcctccacactggagaaagggaggggctttgtttaaacagaaagcgagtcacagtttgcgggagccccaacctagaactctttccagagaacactcacgctctacccaagttgccaacacctgtgggacccaggtgagttttagaacatccgtgacccagaaagttactctagtgttaaatgaaccaaaggatttggtgtacatgggaccggtttcaggatgactaacctaacctaagtgaactctttagccacaaccctcaccttccctcccttaccccaagcaaggccagtgctggagcagccattgcctccggatcaagggagtaacagcaagtatcaggccggagaaaacaggataaagccattcctccttccacctagatggattgccaatcttctgccatcaattttgggaaacctgcctttgtgcccccgaggctgcctttcctcagcatagctgacttgtcatagtggatgaggtctgggctggagcagtagaagccaaggccttttttctgcaagtaatgatgtaggttatttgcagtctctgtaaccaccatccaggccagtacgcagtatttagctggggaccaagggatgggattccctactctaagaaaatacctttattttaattattattattttttgagacggagtctcgctctactcgggaggctgaggcaggagaatcgcttgaacccgggaggcagagattgcgatgagccgagatcgtaccagtgcactccagcctgggcgacagagtgagactccatctcaaaaaaataaaataatgaagtggaatcaaggtggcaagaaaatttagaatcgtttctgatagggactttcccttatcctaaatgtgttttgaaggcacacgttatttccattgtcattctgactttagaaaggcaggttggggcatgagtgggcattttcctaatgacttgctgctaggaggttataggcagggaacagtctgggagtctctaatccagagagactttcagattccctctcttcacatgaacctccattagttagattttgggaaagtgagcatgaagaagggactcagagctgccaggtacccgagtctcaggtctgacatccttgggccccttctgccacaacttcttgccacttcacggacttgaattatgttgcttcttcctggaagtctggcctgcagcacaggcctttcctctccaaaaagctgctgctcatttctggccccatctgctgctatctttgccatcagccatcacagtttggcatcatcagagtctcagctagaggagctgtcattctgccttagtgtttgcctgcgacctgaccaggggcatgaccagctgggatgtcaagtgacatttgggaacttgtagaggccaaatgattgaaagtttaattcttctcaagacccactgatttgccagtgtgcatggaaataatagattagagcagaaactagcagggactgttgtataatcgtgatctactagcagaattgggcccaaagagaaagaatttctgaggctgggtttcttctgggagggtagcaggttggtcttggccagtgctctgtttcccaccagtgttgttcccttttccagcttgcctggcccggctctgtcttccagggtcctgctccagacccctctgcctggggtctcccctccatccagggggttctgggcatcacagctcctttttttcctttctcctcttccagatccagtttcagctggtttgcttcttccagcaggcacccttaggcccaggagcagctcccctgagagaatttgagtcactcatttccttgaacagcacccccctttatactagcagccatttgtgccattgcctgtgccctagggtttgtggggagagagcgagggatcactgagcagttttcccagagctccatgggaaggcaagctctccctcccaatgggagccccactgtcactaactgtaaactcaggctcaggcttcaactgcctacccccatcctcatatttctgtctgtcccagcacctcaggagcattctcattgtggccggctaactccgcctggatgtgaacaggcaagcacagtgggaaatgagtcacgtacttgtattgcacagtggacacctctagaggtccattggtttaaagggatagggaaggaggagggatgagaccatcaccccctcccagaagtaaatctagtatctgagttttctttatgcccttgagtcaaactaataactgtctagtacggaggtgtttgctggttttcttcggtgttttttctaatgcaataaactcatttctgcctgctgcatttgtgtggtgcctgaatcaggtctgcacatgcatccaacatgaagcgaccccaggcttttgggtcccttggagcttaagtctgcggggtctggatgtgtctcctttgcatggttgtgagcctgtagataagaag

SEQ ID NO: 29540 - protein, 56 aa, Homo sapiens
MGFPTLRKYLYFNYYYFLRRSLALLGRLRQENRLNPGGRDCDEPRSYQCTPAWATE

SEQ ID NO: 29541 - DNA, 2380 bp, Homo sapiens
gccctttggacaggcacttcggcccctcctggactccattcagatccagcctccaggagggagctccgtgggcagacccaacggccagagctaacaggactgcctgggaccgccctgcctcaccagggcttttcctttttaaacaaaacaaaccctaccagatttctattttataattttacatcagagctaacaaccaggggacggctttttaaatttcccagggaaggagaccgtcaggccgcatgtagacaatgctgctaagaaacagaacaaaatgccaccccttctaatagtattatactaatttattaaggctgtcttgtctgtgcgttcacttcggatgctgtttcctaagcgtcctccacactggagaaagggaggggctttgtttaaacagaaagcgagtcacagtttgcgggagccccaacctagaactctttccagagaacactcacgctctacccaagttgccaacacctgtgggacccaggtgagttttagaacatccgtgacccagaaagttactctagtgttaaatgaaccaaaggatttggtgtacatgggaccggtttcaggatgactaacctaacctaagtgaactctttagccacaaccccgggaggcagagattgcgatgagccgagatcgtaccagtgcactccagcctgggcgacagagtgagactccatctcaaaaaaataaaataatgaagtggaatcaaggtggcaagaaaatttagaatcgtttctgatagggactttcccttatcctaaatgtgttttgaaggcacacgttatttccattgtcattctgactttagaaaggcaggttggggcatgagtgggcattttcctaatgacttgctgctaggaggttataggcagggaacagtctgggagtctctaatccagagagactttcagattccctctcttcacatgaacctccattagttagattttgggaaagtgagcatgaagaagggactcagagctgccaggtacccgagtctcaggtctgacatccttgggccccttctgccacaacttcttgccacttcacggacttgaattatgttgcttcttcctggaagtctggcctgcagcacaggcctttcctctccaaaaagctgctgctcatttctggccccatctgctgctatctttgccatcagccatcacagtttggcatcatcagagtctcagctagaggagctgtcattctgccttagtgtttgcctgcgacctgaccaggggcatgaccagctgggatgtcaagtgacatttgggaacttgtagaggccaaatgattgaaagtttaattcttctcaagacccactgatttgccagtgtgcatggaaataatagattagagcagaaactagcagggactgttgtataatcgtgatctactagcagaattgggcccaaagagaaagaatttctgaggctgggtttcttctgggagggtagcaggttggtcttggccagtgctctgtttcccaccagtgttgttcccttttccagcttgcctggcccggctctgtcttccagggtcctgctccagacccctctgcctggggtctcccctccatccagggggttctgggcatcacagctcctttttttcctttctcctcttccagatccagtttcagctggtttgcttcttccagcaggcacccttaggcccaggagcagctcccctgagagaatttgagtcactcatttccttgaacagcacccccctttatactagcagccatttgtgccattgcctgtgccctagggtttgtggggagagagcgagggatcactgagcagttttcccagagctccatgggaaggcaagctctccctcccaatgggagccccactgtcactaactgtaaactcaggctcaggcttcaactgcctacccccatcctcatatttctgtctgtcccagcacctcaggagcattctcattgtggccggctaactccgcctggatgtgaacaggcaagcacagtgggaaatgagtcacgtacttgtattgcacagtggacacctctagaggtccattggtttaaagggatagggaaggaggagggatgagaccatcaccccctcccagaagtaaatctagtatctgagttttctttatgcccttgagtcaaactaataactgtctagtacggaggtgtttgctggttttcttcggtgttttttctaatgcaataaactcatttctgcctgctgcatttgtgtggtgcctgaatcaggtctgcacatgcatccaacatgaagcgaccccaggcttttgggtcccttggagcttaagtctgcggggtctggatgtgtctcctttgcatggttgtgagcctgtagataagaag

SEQ ID NO: 29542 - protein, 85 aa, Homo sapiens; identical to SEQ ID NO: 29536

SEQ ID NO: 29543 - DNA, 2211 bp, Homo sapiens
ctgtcccctctctgtcacctcacagtagtcgttgccggtagcgggtgtgggggcgcgagcagcgcagggcggcctctcccccacccctcagcccgggcccgggctcggtccccccctctccctccgcttcgcactcccgtcgggtacgggaaggtccaagccgctgccgggtgcccgagggccgtcgtggccgccgtcgccacgggtcccaatggagccgccgaatctctatccggtgaagctctacgtgtacgacctgtccaaaggcctggcccggcggctcagccccatcatgctggggaaacaactggaaggcatctggcacacatccatagttgtgcacaaggatgagttcttcttcggcagtggtggtatctccagctgccccccgggagggacattgcttgggcctccagactctgtggttgatgtggggaaatcgcttgaacccgggaggcagagattgcgatgagccgagatcgtaccagtgcactccagcctgggcgacagagtgagactccatctcaaaaaaataaaataatgaagtggaatcaaggtggcaagaaaatttagaatcgtttctgatagggactttcccttatcctaaatgtgttttgaaggcacacgttatttccattgtcattctgactttagaaaggcaggttggggcatgagtgggcattttcctaatgacttgctgctaggaggttataggcagggaacagtctgggagtctctaatccagagagactttcagattccctctcttcacatgaacctccattagttagattttgggaaagtgagcatgaagaagggactcagagctgccaggtacccgagtctcaggtctgacatccttgggccccttctgccacaacttcttgccacttcacggacttgaattatgttgcttcttcctggaagtctggcctgcagcacaggcctttcctctccaaaaagctgctgctcatttctggccccatctgctgctatctttgccatcagccatcacagtttggcatcatcagagtctcagctagaggagctgtcattctgccttagtgtttgcctgcgacctgaccaggggcatgaccagctgggatgtcaagtgacatttgggaacttgtagaggccaaatgattgaaagtttaattcttctcaagacccactgatttgccagtgtgcatggaaataatagattagagcagaaactagcagggactgttgtataatcgtgatctactagcagaattgggcccaaagagaaagaatttctgaggctgggtttcttctgggagggtagcaggttggtcttggccagtgctctgtttcccaccagtgttgttcccttttccagcttgcctggcccggctctgtcttccagggtcctgctccagacccctctgcctggggtctcccctccatccagggggttctgggcatcacagctcctttttttcctttctcctcttccagatccagtttcagctggtttgcttcttccagcaggcacccttaggcccaggagcagctcccctgagagaatttgagtcactcatttccttgaacagcacccccctttatactagcagccatttgtgccattgcctgtgccctagggtttgtggggagagagcgagggatcactgagcagttttcccagagctccatgggaaggcaagctctccctcccaatgggagccccactgtcactaactgtaaactcaggctcaggcttcaactgcctacccccatcctcatatttctgtctgtcccagcacctcaggagcattctcattgtggccggctaactccgcctggatgtgaacaggcaagcacagtgggaaatgagtcacgtacttgtattgcacagtggacacctctagaggtccattggtttaaagggatagggaaggaggagggatgagaccatcaccccctcccagaagtaaatctagtatctgagttttctttatgcccttgagtcaaactaataactgtctagtacggaggtgtttgctggttttcttcggtgttttttctaatgcaataaactcatttctgcctgctgcatttgtgtggtgcctgaatcaggtctgcacatgcatccaacatgaagcgaccccaggcttttgggtcccttggagcttaagtctgcggggtctggatgtgtctcctttgcatggttgtgagcctgtagataagaag

SEQ ID NO: 29544 - protein, 86 aa, Homo sapiens
MEPPNLYPVKLYVYDLSKGLARRLSPIMLGKQLEGIWHTSIVVHKDEFFFGSGGISSCPPGGTLLGPPDSVVDVGKSLEPGRQRLR

SEQ ID NO: 29545 - DNA, 786 bp, Homo sapiens
tttcctttttaaacaaaacaaaccctaccagatttctattttataattttacatcagagctaacaaccaggggacggctttttaaatttcccagggaaggagaccgtcaggccgcatgtagacaatgctgctaagaaacagaacaaaatgccaccccttctaatagtattatactaatttattaaggctgtcttgtctgtgcgttcacttcggatgctgtttcctaagcgtcctccacactggagaaagggaggggctttgtttaaacagaaagcgagtcacagtttgcgggagccccaacctagaactctttccagagaacactcacgctctacccaagttgccaacacctgtgggacccaggtgagttttagaacatccgtgacccagaaagttactctagtgttaaatgaaccaaaggatttggtgtacatgggaccggtttcaggcttcaactgcctacccccatcctcatatttctgtctgtcccagcacctcaggagcattctcattgtggccggctaactccgcctggatgtgaacaggcaagcacagtgggaaatgagtcacgtacttgtattgcacagtggacacctctagaggtccattggtttaaagggatagggaaggaggagggatgagaccatcaccccctcccagaagtaaatctagtatctgagttttctttatgcccttgagtcaaactaataactgtctagtacggaggtgtttgctggttttcttcggtgttttttctaatgcaataaactcatttctgcctgctgc

SEQ ID NO: 29546 - protein, 103 aa, Homo sapiens
MLFPKRPPHWRKGGALFKQKASHSLREPQPRTLSREHSRSTQVANTCGTQVSFRTSVTQKVTLVLNEPKDLVYMGPVSGFNCLPPSSYFCLSQHLRSILIVAG

SEQ ID NO: 29547 - DNA, 2635 bp, Homo sapiens
ctgggaccgccctgcctcaccagggcttttcctttttaaacaaaacaaaccctaccagatttctattttataattttacatcagagctaacaaccaggggacggctttttaaatttcccagggaaggagaccgtcaggccgcatgtagacaatgctgctaagaaacagaacaaaatgccaccccttctaatagtattatactaatttattaaggctgtcttgtctgtgcgttcacttcggatgctgtttcctaagcgtcctccacactggagaaagggaggggctttgtttaaacagaaagcgagtcacagtttgcgggagccccaacctagaactctttccagagaacactcacgctctacccaagttgccaacacctgtgggacccaggtgagttttagaacatccgtgacccagaaagttactctagtgttaaatgaaccaaaggatttggtgtacatgggaccggtttcaggatgactaacctaacctaagtgaactctttagccacaaccctcaccttccctcccttaccccaagcaaggccagtgctggagcagccattgcctccggatcaagggagtaacagcaagtatcaggccggagaaaacaggataaagccattcctccttccacctagatggattgccaatcttctgccatcaattttgggaaacctgcctttgtgcccccgaggctgcctttcctcagcatagctgacttgtcatagtggatgaggtctgggctggagcagtagaagccaaggccttttttctgcaagtaatgatgtaggttatttgcagtctctgtaaccaccatccaggccagtacgcagtatttagctggggaccaagggatgggattccctactctaagaaaatacctttattttaattattattattttttgagacccgtctctactaaaaatacaaaattagccgggcatggtggcgcatgcctgtagtcccagctactcgggaggctgaggcaggagaatcgcttgaacccgggaggcagagattgcgatgagccgagatcgtaccagtgcactccagcctgggcgacagagtgagactccatctcaaaaaaataaaataatgaagtggaatcaaggtggcaagaaaatttagaatcgtttctgatagggactttcccttatcctaaatgtgttttgaaggcacacgttatttccattgtcattctgactttagaaaggcaggttggggcatgagtgggcattttcctaatgacttgctgctaggaggttataggcagggaacagtctgggagtctctaatccagagagactttcagattccctctcttcacatgaacctccattagttagattttgggaaagtgagcatgaagaagggactcagagctgccaggtacccgagtctcaggtctgacatccttgggccccttctgccacaacttcttgccacttcacggacttgaattatgttgcttcttcctggaagtctggcctgcagcacaggcctttcctctccaaaaagctgctgctcatttctggccccatctgctgctatctttgccatcagccatcacagtttggcatcatcagagtctcagctagaggagctgtcattctgccttagtgtttgcctgcgacctgaccaggggcatgaccagctgggatgtcaagtgacatttgggaacttgtagaggccaaatgattgaaagtttaattcttctcaagacccactgatttgccagtgtgcatggaaataatagattagagcagaaactagcagggactgttgtataatcgtgatctactagcagaattgggcccaaagagaaagaatttctgaggctgggtttcttctgggagggtagcaggttggtcttggccagtgctctgtttcccaccagtgttgttcccttttccagcttgcctggcccggctctgtcttccagggtcctgctccagacccctctgcctggggtctcccctccatccagggggttctgggcatcacagctcctttttttcctttctcctcttccagatccagtttcagctggtttgcttcttccagcaggcacccttaggcccaggagcagctcccctgagagaatttgagtcactcatttccttgaacagcacccccctttatactagcagccatttgtgccattgcctgtgccctagggtttgtggggagagagcgagggatcactgagcagttttcccagagctccatgggaaggcaagctctccctcccaatgggagccccactgtcactaactgtaaactcaggctcaggcttcaactgcctacccccatcctcatatttctgtctgtcccagcacctcaggagcattctcattgtggccggctaactccgcctggatgtgaacaggcaagcacagtgggaaatgagtcacgtacttgtattgcacagtggacacctctagaggtccattggtttaaagggatagggaaggaggagggatgagaccatcaccccctcccagaagtaaatctagtatctgagttttctttatgcccttgagtcaaactaataactgtctagtacggaggtgtttgctggttttcttcggtgttttttctaatgcaataaactcatttctgcctgctgc

SEQ ID NO: 29548 - protein, 36 aa, Homo sapiens; identical to SEQ ID NO: 29534

SEQ ID NO: 29549 - DNA, 2476 bp, Homo sapiens
ctgggaccgccctgcctcaccagggcttttcctttttaaacaaaacaaaccctaccagatttctattttataattttacatcagagctaacaaccaggggacggctttttaaatttcccagggaaggagaccgtcaggccgcatgtagacaatgctgctaagaaacagaacaaaatgccaccccttctaatagtattatactaatttattaaggctgtcttgtctgtgcgttcacttcggatgctgtttcctaagcgtcctccacactggagaaagggaggggctttgtttaaacagaaagcgagtcacagtttgcgggagccccaacctagaactctttccagagaacactcacgctctacccaagttgccaacacctgtgggacccaggtgagttttagaacatccgtgacccagaaagttactctagtgttaaatgaaccaaaggatttggtgtacatgggaccggtttcaggatgactaacctaacctaagtgaactctttagccacaaccctcaccttccctcccttaccccaagcaaggccagtgctggagcagccattgcctccggatcaagggagtaacagcaagtatcaggccggagaaaacaggataaagccattcctccttccacctagatggattgccaatcttctgccatcaattttgggaaacctgcctttgtgcccccgaggctgcctttcctcagcatagctgacttgtcatagtggatgaggtctgggctggagcagtagaagccaaggccttttttctgcaagtaatgatgtaggttatttgcagtctctgtaaccaccatccaggccagtacgcagtatttagctggggaccaagggatgggattccctactctaagaaaatacctttattttaattattattattttttgagacggaactccatctcaaaaaaataaaataatgaagtggaatcaaggtggcaagaaaatttagaatcgtttctgatagggactttcccttatcctaaatgtgttttgaaggcacacgttatttccattgtcattctgactttagaaaggcaggttggggcatgagtgggcattttcctaatgacttgctgctaggaggttataggcagggaacagtctgggagtctctaatccagagagactttcagattccctctcttcacatgaacctccattagttagattttgggaaagtgagcatgaagaagggactcagagctgccaggtacccgagtctcaggtctgacatccttgggccccttctgccacaacttcttgccacttcacggacttgaattatgttgcttcttcctggaagtctggcctgcagcacaggcctttcctctccaaaaagctgctgctcatttctggccccatctgctgctatctttgccatcagccatcacagtttggcatcatcagagtctcagctagaggagctgtcattctgccttagtgtttgcctgcgacctgaccaggggcatgaccagctgggatgtcaagtgacatttgggaacttgtagaggccaaatgattgaaagtttaattcttctcaagacccactgatttgccagtgtgcatggaaataatagattagagcagaaactagcagggactgttgtataatcgtgatctactagcagaattgggcccaaagagaaagaatttctgaggctgggtttcttctgggagggtagcaggttggtcttggccagtgctctgtttcccaccagtgttgttcccttttccagcttgcctggcccggctctgtcttccagggtcctgctccagacccctctgcctggggtctcccctccatccagggggttctgggcatcacagctcctttttttcctttctcctcttccagatccagtttcagctggtttgcttcttccagcaggcacccttaggcccaggagcagctcccctgagagaatttgagtcactcatttccttgaacagcacccccctttatactagcagccatttgtgccattgcctgtgccctagggtttgtggggagagagcgagggatcactgagcagttttcccagagctccatgggaaggcaagctctccctcccaatgggagccccactgtcactaactgtaaactcaggctcaggcttcaactgcctacccccatcctcatatttctgtctgtcccagcacctcaggagcattctcattgtggccggctaactccgcctggatgtgaacaggcaagcacagtgggaaatgagtcacgtacttgtattgcacagtggacacctctagaggtccattggtttaaagggatagggaaggaggagggatgagaccatcaccccctcccagaagtaaatctagtatctgagttttctttatgcccttgagtcaaactaataactgtctagtacggaggtgtttgctggttttcttcggtgttttttctaatgcaataaactcatttctgcctgctgc

SEQ ID NO: 29550 - protein, 85 aa, Homo sapiens; identical to SEQ ID NO: 29536

SEQ ID NO: 29551 - DNA, 2583 bp, Homo sapiens
ctgggaccgccctgcctcaccagggcttttcctttttaaacaaaacaaaccctaccagatttctattttataattttacatcagagctaacaaccaggggacggctttttaaatttcccagggaaggagaccgtcaggccgcatgtagacaatgctgctaagaaacagaacaaaatgccaccccttctaatagtattatactaatttattaaggctgtcttgtctgtgcgttcacttcggatgctgtttcctaagcgtcctccacactggagaaagggaggggctttgtttaaacagaaagcgagtcacagtttgcgggagccccaacctagaactctttccagagaacactcacgctctacccaagttgccaacacctgtgggacccaggtgagttttagaacatccgtgacccagaaagttactctagtgttaaatgaaccaaaggatttggtgtacatgggaccggtttcaggatgactaacctaacctaagtgaactctttagccacaaccctcaccttccctcccttaccccaagcaaggccagtgctggagcagccattgcctccggatcaagggagtaacagcaagtatcaggccggagaaaacaggataaagccattcctccttccacctagatggattgccaatcttctgccatcaattttgggaaacctgcctttgtgcccccgaggctgcctttcctcagcatagctgacttgtcatagtggatgaggtctgggctggagcagtagaagccaaggccttttttctgcaagtaatgatgtaggttatttgcagtctctgtaaccaccatccaggccagtacgcagtatttagctggggaccaagggatgggattccctactctaagaaaatacctttattttaattattattattttttgagacggagtctcgctctaccacccaggctggtgtgcagtggcatgatccgggaggcagagattgcgatgagccgagatcgtaccagtgcactccagcctgggcgacagagtgagactccatctcaaaaaaataaaataatgaagtggaatcaaggtggcaagaaaatttagaatcgtttctgatagggactttcccttatcctaaatgtgttttgaaggcacacgttatttccattgtcattctgactttagaaaggcaggttggggcatgagtgggcattttcctaatgacttgctgctaggaggttataggcagggaacagtctgggagtctctaatccagagagactttcagattccctctcttcacatgaacctccattagttagattttgggaaagtgagcatgaagaagggactcagagctgccaggtacccgagtctcaggtctgacatccttgggccccttctgccacaacttcttgccacttcacggacttgaattatgttgcttcttcctggaagtctggcctgcagcacaggcctttcctctccaaaaagctgctgctcatttctggccccatctgctgctatctttgccatcagccatcacagtttggcatcatcagagtctcagctagaggagctgtcattctgccttagtgtttgcctgcgacctgaccaggggcatgaccagctgggatgtcaagtgacatttgggaacttgtagaggccaaatgattgaaagtttaattcttctcaagacccactgatttgccagtgtgcatggaaataatagattagagcagaaactagcagggactgttgtataatcgtgatctactagcagaattgggcccaaagagaaagaatttctgaggctgggtttcttctgggagggtagcaggttggtcttggccagtgctctgtttcccaccagtgttgttcccttttccagcttgcctggcccggctctgtcttccagggtcctgctccagacccctctgcctggggtctcccctccatccagggggttctgggcatcacagctcctttttttcctttctcctcttccagatccagtttcagctggtttgcttcttccagcaggcacccttaggcccaggagcagctcccctgagagaatttgagtcactcatttccttgaacagcacccccctttatactagcagccatttgtgccattgcctgtgccctagggtttgtggggagagagcgagggatcactgagcagttttcccagagctccatgggaaggcaagctctccctcccaatgggagccccactgtcactaactgtaaactcaggctcaggcttcaactgcctacccccatcctcatatttctgtctgtcccagcacctcaggagcattctcattgtggccggctaactccgcctggatgtgaacaggcaagcacagtgggaaatgagtcacgtacttgtattgcacagtggacacctctagaggtccattggtttaaagggatagggaaggaggagggatgagaccatcaccccctcccagaagtaaatctagtatctgagttttctttatgcccttgagtcaaactaataactgtctagtacggaggtgtttgctggttttcttcggtgttttttctaatgcaataaactcatttctgcctgctgc

SEQ ID NO: 29552 - protein, 74 aa, Homo sapiens; identical to SEQ ID NO: 29538

SEQ ID NO: 29553 - DNA, 2667 bp, Homo sapiens
ccctcctggactccattcagatccagcctccaggagggagctccgtgggcagacccaacggccagagctaacaggactgcctgggaccgccctgcctcaccagggcttttcctttttaaacaaaacaaaccctaccagatttctattttataattttacatcagagctaacaaccaggggacggctttttaaatttcccagggaaggagaccgtcaggccgcatgtagacaatgctgctaagaaacagaacaaaatgccaccccttctaatagtattatactaatttattaaggctgtcttgtctgtgcgttcacttcggatgctgtttcctaagcgtcctccacactggagaaagggaggggctttgtttaaacagaaagcgagtcacagtttgcgggagccccaacctagaactctttccagagaacactcacgctctacccaagttgccaacacctgtgggacccaggtgagttttagaacatccgtgacccagaaagttactctagtgttaaatgaaccaaaggatttggtgtacatgggaccggtttcaggatgactaacctaacctaagtgaactctttagccacaaccctcaccttccctcccttaccccaagcaaggccagtgctggagcagccattgcctccggatcaagggagtaacagcaagtatcaggccggagaaaacaggataaagccattcctccttccacctagatggattgccaatcttctgccatcaattttgggaaacctgcctttgtgcccccgaggctgcctttcctcagcatagctgacttgtcatagtggatgaggtctgggctggagcagtagaagccaaggccttttttctgcaagtaatgatgtaggttatttgcagtctctgtaaccaccatccaggccagtacgcagtatttagctggggaccaagggatgggattccctactctaagaaaatacctttattttaattattattattttttgagacggagtctcgctctactcgggaggctgaggcaggagaatcgcttgaacccgggaggcagagattgcgatgagccgagatcgtaccagtgcactccagcctgggcgacagagtgagactccatctcaaaaaaataaaataatgaagtggaatcaaggtggcaagaaaatttagaatcgtttctgatagggactttcccttatcctaaatgtgttttgaaggcacacgttatttccattgtcattctgactttagaaaggcaggttggggcatgagtgggcattttcctaatgacttgctgctaggaggttataggcagggaacagtctgggagtctctaatccagagagactttcagattccctctcttcacatgaacctccattagttagattttgggaaagtgagcatgaagaagggactcagagctgccaggtacccgagtctcaggtctgacatccttgggccccttctgccacaacttcttgccacttcacggacttgaattatgttgcttcttcctggaagtctggcctgcagcacaggcctttcctctccaaaaagctgctgctcatttctggccccatctgctgctatctttgccatcagccatcacagtttggcatcatcagagtctcagctagaggagctgtcattctgccttagtgtttgcctgcgacctgaccaggggcatgaccagctgggatgtcaagtgacatttgggaacttgtagaggccaaatgattgaaagtttaattcttctcaagacccactgatttgccagtgtgcatggaaataatagattagagcagaaactagcagggactgttgtataatcgtgatctactagcagaattgggcccaaagagaaagaatttctgaggctgggtttcttctgggagggtagcaggttggtcttggccagtgctctgtttcccaccagtgttgttcccttttccagcttgcctggcccggctctgtcttccagggtcctgctccagacccctctgcctggggtctcccctccatccagggggttctgggcatcacagctcctttttttcctttctcctcttccagatccagtttcagctggtttgcttcttccagcaggcacccttaggcccaggagcagctcccctgagagaatttgagtcactcatttccttgaacagcacccccctttatactagcagccatttgtgccattgcctgtgccctagggtttgtggggagagagcgagggatcactgagcagttttcccagagctccatgggaaggcaagctctccctcccaatgggagccccactgtcactaactgtaaactcaggctcaggcttcaactgcctacccccatcctcatatttctgtctgtcccagcacctcaggagcattctcattgtggccggctaactccgcctggatgtgaacaggcaagcacagtgggaaatgagtcacgtacttgtattgcacagtggacacctctagaggtccattggtttaaagggatagggaaggaggagggatgagaccatcaccccctcccagaagtaaatctagtatctgagttttctttatgcccttgagtcaaactaataactgtctagtacggaggtgtttgctggttttcttcggtgttttttctaatgcaataaactcatttctgcctgctgc

SEQ ID NO: 29554 - protein, 56 aa, Homo sapiens; identical to SEQ ID NO: 29540

SEQ ID NO: 29555 - DNA, 2244 bp, Homo sapiens
gccctttggacaggcacttcggcccctcctggactccattcagatccagcctccaggagggagctccgtgggcagacccaacggccagagctaacaggactgcctgggaccgccctgcctcaccagggcttttcctttttaaacaaaacaaaccctaccagatttctattttataattttacatcagagctaacaaccaggggacggctttttaaatttcccagggaaggagaccgtcaggccgcatgtagacaatgctgctaagaaacagaacaaaatgccaccccttctaatagtattatactaatttattaaggctgtcttgtctgtgcgttcacttcggatgctgtttcctaagcgtcctccacactggagaaagggaggggctttgtttaaacagaaagcgagtcacagtttgcgggagccccaacctagaactctttccagagaacactcacgctctacccaagttgccaacacctgtgggacccaggtgagttttagaacatccgtgacccagaaagttactctagtgttaaatgaaccaaaggatttggtgtacatgggaccggtttcaggatgactaacctaacctaagtgaactctttagccacaaccccgggaggcagagattgcgatgagccgagatcgtaccagtgcactccagcctgggcgacagagtgagactccatctcaaaaaaataaaataatgaagtggaatcaaggtggcaagaaaatttagaatcgtttctgatagggactttcccttatcctaaatgtgttttgaaggcacacgttatttccattgtcattctgactttagaaaggcaggttggggcatgagtgggcattttcctaatgacttgctgctaggaggttataggcagggaacagtctgggagtctctaatccagagagactttcagattccctctcttcacatgaacctccattagttagattttgggaaagtgagcatgaagaagggactcagagctgccaggtacccgagtctcaggtctgacatccttgggccccttctgccacaacttcttgccacttcacggacttgaattatgttgcttcttcctggaagtctggcctgcagcacaggcctttcctctccaaaaagctgctgctcatttctggccccatctgctgctatctttgccatcagccatcacagtttggcatcatcagagtctcagctagaggagctgtcattctgccttagtgtttgcctgcgacctgaccaggggcatgaccagctgggatgtcaagtgacatttgggaacttgtagaggccaaatgattgaaagtttaattcttctcaagacccactgatttgccagtgtgcatggaaataatagattagagcagaaactagcagggactgttgtataatcgtgatctactagcagaattgggcccaaagagaaagaatttctgaggctgggtttcttctgggagggtagcaggttggtcttggccagtgctctgtttcccaccagtgttgttcccttttccagcttgcctggcccggctctgtcttccagggtcctgctccagacccctctgcctggggtctcccctccatccagggggttctgggcatcacagctcctttttttcctttctcctcttccagatccagtttcagctggtttgcttcttccagcaggcacccttaggcccaggagcagctcccctgagagaatttgagtcactcatttccttgaacagcacccccctttatactagcagccatttgtgccattgcctgtgccctagggtttgtggggagagagcgagggatcactgagcagttttcccagagctccatgggaaggcaagctctccctcccaatgggagccccactgtcactaactgtaaactcaggctcaggcttcaactgcctacccccatcctcatatttctgtctgtcccagcacctcaggagcattctcattgtggccggctaactccgcctggatgtgaacaggcaagcacagtgggaaatgagtcacgtacttgtattgcacagtggacacctctagaggtccattggtttaaagggatagggaaggaggagggatgagaccatcaccccctcccagaagtaaatctagtatctgagttttctttatgcccttgagtcaaactaataactgtctagtacggaggtgtttgctggttttcttcggtgttttttctaatgcaataaactcatttctgcctgctgc

SEQ ID NO: 29556 - protein, 85 aa, Homo sapiens; identical to SEQ ID NO: 29536

SEQ ID NO: 29557 - DNA, 2075 bp, Homo sapiens
ctgtcccctctctgtcacctcacagtagtcgttgccggtagcgggtgtgggggcgcgagcagcgcagggcggcctctcccccacccctcagcccgggcccgggctcggtccccccctctccctccgcttcgcactcccgtcgggtacgggaaggtccaagccgctgccgggtgcccgagggccgtcgtggccgccgtcgccacgggtcccaatggagccgccgaatctctatccggtgaagctctacgtgtacgacctgtccaaaggcctggcccggcggctcagccccatcatgctggggaaacaactggaaggcatctggcacacatccatagttgtgcacaaggatgagttcttcttcggcagtggtggtatctccagctgccccccgggagggacattgcttgggcctccagactctgtggttgatgtggggaaatcgcttgaacccgggaggcagagattgcgatgagccgagatcgtaccagtgcactccagcctgggcgacagagtgagactccatctcaaaaaaataaaataatgaagtggaatcaaggtggcaagaaaatttagaatcgtttctgatagggactttcccttatcctaaatgtgttttgaaggcacacgttatttccattgtcattctgactttagaaaggcaggttggggcatgagtgggcattttcctaatgacttgctgctaggaggttataggcagggaacagtctgggagtctctaatccagagagactttcagattccctctcttcacatgaacctccattagttagattttgggaaagtgagcatgaagaagggactcagagctgccaggtacccgagtctcaggtctgacatccttgggccccttctgccacaacttcttgccacttcacggacttgaattatgttgcttcttcctggaagtctggcctgcagcacaggcctttcctctccaaaaagctgctgctcatttctggccccatctgctgctatctttgccatcagccatcacagtttggcatcatcagagtctcagctagaggagctgtcattctgccttagtgtttgcctgcgacctgaccaggggcatgaccagctgggatgtcaagtgacatttgggaacttgtagaggccaaatgattgaaagtttaattcttctcaagacccactgatttgccagtgtgcatggaaataatagattagagcagaaactagcagggactgttgtataatcgtgatctactagcagaattgggcccaaagagaaagaatttctgaggctgggtttcttctgggagggtagcaggttggtcttggccagtgctctgtttcccaccagtgttgttcccttttccagcttgcctggcccggctctgtcttccagggtcctgctccagacccctctgcctggggtctcccctccatccagggggttctgggcatcacagctcctttttttcctttctcctcttccagatccagtttcagctggtttgcttcttccagcaggcacccttaggcccaggagcagctcccctgagagaatttgagtcactcatttccttgaacagcacccccctttatactagcagccatttgtgccattgcctgtgccctagggtttgtggggagagagcgagggatcactgagcagttttcccagagctccatgggaaggcaagctctccctcccaatgggagccccactgtcactaactgtaaactcaggctcaggcttcaactgcctacccccatcctcatatttctgtctgtcccagcacctcaggagcattctcattgtggccggctaactccgcctggatgtgaacaggcaagcacagtgggaaatgagtcacgtacttgtattgcacagtggacacctctagaggtccattggtttaaagggatagggaaggaggagggatgagaccatcaccccctcccagaagtaaatctagtatctgagttttctttatgcccttgagtcaaactaataactgtctagtacggaggtgtttgctggttttcttcggtgttttttctaatgcaataaactcatttctgcctgctgc

SEQ ID NO: 29558 - protein, 86 aa, Homo sapiens; identical to SEQ ID NO: 29544

SEQ ID NO: 29559 - DNA, 1059 bp, Homo sapiens
gtaccagtgcactccagcctgggcgacagagtgagactccatctcaaaaaaataaaataatgaagtggaatcaaggtggcaagaaaatttagaatcgtttctgatagggactttcccttatcctaaatgtgttttgaaggcacacgttatttccattgtcattctgactttagaaaggcaggttggggcatgagtgggcattttcctaatgacttgctgctaggaggttataggcagggaacagtctgggagtctctaatccagagagactttcagattccctctcttcacatgaacctccattagttagattttgggaaagtgagcatgaagaagggactcagagctgccaggtacccgagtctcaggtctgacatccttgggccccttctgccacaacttcttgccacttcacggacttgaattatgttgcttcttcctggaagtctggcctgcagcacaggcctttcctctccaaaaagctgctgctcatttctggccccatctgctgctatctttgccatcagccatcacagtttggcatcatcagagtctcagctagaggagctgtcattctgccttagtgtttgcctgcgacctgaccaggggcatgaccagctgggatgtcaagtgacatttgggaacttgtagaggccaaatgattgaaagtttaattcttctcaagacccactgatttgccagtgtgcatggaaataatagattagagcagaaactagcagggactgttgtataatcgtgatctactagcagaattgggcccaaagagaaagaatttctgaggctgggtttcttctgggagggtagcaggttggtcttggccagtgctctgtttcccaccagtgttgttcccttttccagcttgcctggcccggctctgtcttccagggtcctgctccagacccctctgcctggggtctcccctccatccagggggttctgggcatcacagctcctttttttcctttctcctcttccagatccagtttcagtggttttcttcggtgttttttctaatgcaataaactcatttctgcctgc

SEQ ID NO: 29560 - protein, 74 aa, Homo sapiens
MLLLPGSLACSTGLSSPKSCCSFLAPSAAIFAISHHSLASSESQLEELSFCLSVCLRPDQGHDQLGCQVTFGNL

SEQ ID NO: 29561 - DNA, 1094 bp, Homo sapiens
gcaggtttcgcaggcccagcaaggtgggctgttttttatatctgaggaagcacctcccaggaagagcttgcataggaaacaagactgctgtggcaggctggccctttggacaggcacttcggcccctcctggactccattcagatccagcctccaggagggagctccgtgggcagacccaacggccagagctaacaggactgcctgggaccgccctgcctcaccagggcttttcctttttaaacaaaacaaaccctaccagatttctattttataattttacatcagagctaacaaccaggggacggctttttaaatttcccagggaaggagaccgtcaggccgcatgtagacaatgctgctaagaaacagaacaaaatgccaccccttctaatagtattatactaatttattaaggctgtcttgtctgtgcgttcacttcggatgctgtttcctaagcgtcctccacactggagaaagggaggggctttgtttaaacagaaagcgagtcacagtttgcgggagccccaacctagaactctttccagagaacactcacgctctacccaagttgccaacacctgtgggacccaggtgagttttagaacatccgtgacccagaaagttactctagtgttaaatgaaccaaaggatttggtgtacatgggaccggtttcaggatgactaacctaacctaagtgaactctttagccacaaccctcaccttccctcccttaccccaagcaaggccagtgctggagcagccattgcctccggatcaagggagtaacagcaagtatcaggccggagaaaacaggataaagccattcctccttccacctagatggattgccaatcttctgccatcaattttgggaaacctgcctttgtgcccccgaggctgcctttcctcagcatagctgacttgtcatagtggatgaggtctgggctggagcagtagaagccaaggccttttttctgcaagtaatgatgtaggttatttgcagtctctgtaaccaccatccaggccagtacgcagtatttagctggggaccaagggatgggattccctactctaagaaaatacctttattt

SEQ ID NO: 29562 - protein, 79 aa, Homo sapiens
MLFPKRPPHWRKGGALFKQKASHSLREPQPRTLSREHSRSTQVANTCGTQVSFRTSVTQKVTLVLNEPKDLVYMGPVSG

SEQ ID NO: 29563 - DNA, 1455 bp, Homo sapiens
agcgggtgtgggggcgcgagcagcgcagggcggcctctcccccacccctcagcccgggcccgggctcggtccccccctctccctccgcttcgcactcccgtcgggtacgggaaggtccaagccgctgccgggtgcccgagggccgtcgtggccgccgtcgccacgggtcccaatggagccgccgaatctctatccggtgaagctctacgtgtacgacctgtccaaaggcctggcccggcggctcagcctccagactctgtggttgatgtggggagtacagaagtcacagaagaaatctttctggagtacctctcctccctgggggagtccctgttccgaggtgaggcctacaacctctttgaacacaattgtaacaccttcagcaacgaagtggcacagttcctgactgggcggaagattccttcttacatcacagacctgccctctgaagttctctccacgccctttggacaggcacttcggcccctcctggactccattcagatccagcctccaggagggagctccgtgggcagacccaacggccagagctaacaggactgcctgggaccgccctgcctcaccagggcttttcctttttaaacaaaacaaaccctaccagatttctattttataattttacatcagagctaacaaccaggggacggctttttaaatttcccagggaaggagaccgtcaggccgcatgtagacaatgctgctaagaaacagaacaaaatgccaccccttctaatagtattatactaatttattaaggctgtcttgtctgtgcgttcacttcggatgctgtttcctaagcgtcctccacactggagaaagggaggggctttgtttaaacagaaagcgagtcacagtttgcgggagccccaacctagaactctttccagagaacactcacgctctacccaagttgccaacacctgtgggacccaggtgagttttagaacatccgtgacccagaaagttactctagtgttaaatgaaccaaaggatttggtgtacatgggaccggtttcaggatgactaacctaacctaagtgaactctttagccacaaccctcaccttccctcccttaccccaagcaaggccagtgctggagcagccattgcctccggatcaagggagtaacagcaagtatcaggccggagaaaacaggataaagccattcctccttccacctagatggattgccaatcttctgccatcaattttgggaaacctgcctttgtgcccccgaggctgcctttcctcagcatagctgacttgtcatagtggatgaggtctgggctggagcagtagaagccaaggccttttttctgcaagtaatgatgtaggttatttgcagtctctgtaaccaccatccaggccagtacgcagtatttagctggggaccaagggatgggattccctactctaagaaaatacctttattt

SEQ ID NO: 29564 - protein, 77 aa, Homo sapiens
MEPPNLYPVKLYVYDLSKGLARRLSLQTLWLMWGVQKSQKKSFWSTSPPWGSPCSEVRPTTSLNTIVTPSATKWHSS

SEQ ID NO: 29565 - DNA, 1614 bp, Homo sapiens
ctgtcccctctctgtcacctcacagtagtcgttgccggtagcgggtgtgggggcgcgagcagcgcagggcggcctctcccccacccctcagcccgggcccgggctcggtccccccctctccctccgcttcgcactcccgtcgggtacgggaaggtccaagccgctgccgggtgcccgagggccgtcgtggccgccgtcgccacgggtcccaatggagccgccgaatctctatccggtgaagctctacgtgtacgacctgtccaaaggcctggcccggcggctcagccccatcatgctggtctctctctgtgtgacaggcacacatccatagttgtgcacaaggatgagttcttcttcggcagtggtggtatctccagctgccccccgggagggacattgcttgggcctccagactctgtggttgatgtggggagtacagaagtcacagaagaaatctttctggagtacctctcctccctgggggagtccctgttccgaggtgaggcctacaacctctttgaacacaattgtaacaccttcagcaacgaagtggcacagttcctgactgggcggaagattccttcttacatcacagacctgccctctgaagttctctccacgccctttggacaggcacttcggcccctcctggactccattcagatccagcctccaggagggagctccgtgggcagacccaacggccagagctaacaggactgcctgggaccgccctgcctcaccagggcttttcctttttaaacaaaacaaaccctaccagatttctattttataattttacatcagagctaacaaccaggggacggctttttaaatttcccagggaaggagaccgtcaggccgcatgtagacaatgctgctaagaaacagaacaaaatgccaccccttctaatagtattatactaatttattaaggctgtcttgtctgtgcgttcacttcggatgctgtttcctaagcgtcctccacactggagaaagggaggggctttgtttaaacagaaagcgagtcacagtttgcgggagccccaacctagaactctttccagagaacactcacgctctacccaagttgccaacacctgtgggacccaggtgagttttagaacatccgtgacccagaaagttactctagtgttaaatgaaccaaaggatttggtgtacatgggaccggtttcaggatgactaacctaacctaagtgaactctttagccacaaccctcaccttccctcccttaccccaagcaaggccagtgctggagcagccattgcctccggatcaagggagtaacagcaagtatcaggccggagaaaacaggataaagccattcctccttccacctagatggattgccaatcttctgccatcaattttgggaaacctgcctttgtgcccccgaggctgcctttcctcagcatagctgacttgtcatagtggatgaggtctgggctggagcagtagaagccaaggccttttttctgcaagtaatgatgtaggttatttgcagtctctgtaaccaccatccaggccagtacgcagtatttagctggggaccaagggatgggattccctactctaagaaaatacctttattt

SEQ ID NO: 29566 - protein, 73 aa, Homo sapiens
MSSSSAVVVSPAAPREGHCLGLQTLWLMWGVQKSQKKSFWSTSPPWGSPCSEVRPTTSLNTIVTPSATKWHSS

SEQ ID NO: 29567 - DNA, 1625 bp, Homo sapiens
gccctccctgtcccctctctgtcacctcacagtagtcgttgccggtagcgggtgtgggggcgcgagcagcgcagggcggcctctcccccacccctcagcccgggcccgggctcggtccccccctctccctccgcttcgcactcccgtcgggtacgggaaggtccaagccgctgccgggtgcccgagggccgtcgtggccgccgtcgccacgggtcccaatggagccgccgaatctctatccggtgaagctctacgtgtacgacctgtccaaaggcctggcccggcggctcagccccatcatgctggggaaacaactggaaggcatctggcacacatccatagttgtgcacaaggatgagttcttcttcggcagtggtggtatctccagctgccccccgggagggacattgcttgggcctccagactctgtggttgatgtggggagtacagaagtcacagaagaaatctttctggagtacctctcctccctgggggagtccctgttccgaggtgaggcctacaacctctttgaacacaattgtaacaccttcagcaacgaagtggcacagttcctgactgggcggaagattccttcttacatcacagacctgccctctgaagttctctccacgccctttggacaggcacttcggcccctcctggactccattcagatccagcctccaggagggagctccgtgggcagacccaacggccagagctaacaggactgcctgggaccgccctgcctcaccagggcttttcctttttaaacaaaacaaaccctaccagatttctattttataattttacatcagagctaacaaccaggggacggctttttaaatttcccagggaaggagaccgtcaggccgcatgtagacaatgctgctaagaaacagaacaaaatgccaccccttctaatagtattatactaatttattaaggctgtcttgtctgtgcgttcacttcggatgctgtttcctaagcgtcctccacactggagaaagggaggggctttgtttaaacagaaagcgagtcacagtttgcgggagccccaacctagaactctttccagagaacactcacgctctacccaagttgccaacacctgtgggacccaggtgagttttagaacatccgtgacccagaaagttactctagtgttaaatgaaccaaaggatttggtgtacatgggaccggtttcaggatgactaacctaacctaagtgaactctttagccacaaccctcaccttccctcccttaccccaagcaaggccagtgctggagcagccattgcctccggatcaagggagtaacagcaagtatcaggccggagaaaacaggataaagccattcctccttccacctagatggattgccaatcttctgccatcaattttgggaaacctgcctttgtgcccccgaggctgcctttcctcagcatagctgacttgtcatagtggatgaggtctgggctggagcagtagaagccaaggccttttttctgcaagtaatgatgtaggttatttgcagtctctgtaaccaccatccaggccagtacgcagtatttagctggggaccaagggatgggattccctactctaagaaaatacctttattt

SEQ ID NO: 29568 - protein, 168 aa, Homo sapiens; identical to SEQ ID NO: 4069

SEQ ID NO: 29569 - DNA, 420 bp, Homo sapiens
gcaggtttcgcaggcccagcaaggtgggctgttttttatatctgaggaagcacctcccaggaagagcttgcataggaaacaagactgctgtggcaggctggccctttggacaggcacttcggcccctcctggactccattcagatccagcctccaggagggagctccgtgggcagacccaacggccagagctaacaggactgcctgggaccgccctgcctcaccagggcttttcctttttaaacaaaacaaaccctaccagatttctattttataattttacatcagagctaacaaccaggggacggctttttaaatttcccagggaaggagaccgtcaggccgcatgtagacaatgctgctaagaaacagaacaaaatgccaccccttctaatagtattatactaatttattaaggctg

SEQ ID NO: 29570 - protein, 120 aa, Homo sapiens
QVSQAQQGGLFFISEEAPPRKSLHRKQDCCGRLALWTGTSAPPGLHSDPASRRELRGQTQRPELTGLPGTALPHQGFSFLNKTNPTRFLFYNFTSELTTRGRLFKFPREGDRQAACRQCC

SEQ ID NO: 29571 - DNA, 781 bp, Homo sapiens
agcgggtgtgggggcgcgagcagcgcagggcggcctctcccccacccctcagcccgggcccgggctcggtccccccctctccctccgcttcgcactcccgtcgggtacgggaaggtccaagccgctgccgggtgcccgagggccgtcgtggccgccgtcgccacgggtcccaatggagccgccgaatctctatccggtgaagctctacgtgtacgacctgtccaaaggcctggcccggcggctcagcctccagactctgtggttgatgtggggagtacagaagtcacagaagaaatctttctggagtacctctcctccctgggggagtccctgttccgaggtgaggcctacaacctctttgaacacaattgtaacaccttcagcaacgaagtggcacagttcctgactgggcggaagattccttcttacatcacagacctgccctctgaagttctctccacgccctttggacaggcacttcggcccctcctggactccattcagatccagcctccaggagggagctccgtgggcagacccaacggccagagctaacaggactgcctgggaccgccctgcctcaccagggcttttcctttttaaacaaaacaaaccctaccagatttctattttataattttacatcagagctaacaaccaggggacggctttttaaatttcccagggaaggagaccgtcaggccgcatgtagacaatgctgctaagaaacagaacaaaatgccaccccttctaatagtattatactaatttattaaggctg

SEQ ID NO: 29572 - protein, 77 aa, Homo sapiens; identical to SEQ ID NO: 29564

SEQ ID NO: 29573 - DNA, 940 bp, Homo sapiens
ctgtcccctctctgtcacctcacagtagtcgttgccggtagcgggtgtgggggcgcgagcagcgcagggcggcctctcccccacccctcagcccgggcccgggctcggtccccccctctccctccgcttcgcactcccgtcgggtacgggaaggtccaagccgctgccgggtgcccgagggccgtcgtggccgccgtcgccacgggtcccaatggagccgccgaatctctatccggtgaagctctacgtgtacgacctgtccaaaggcctggcccggcggctcagccccatcatgctggtctctctctgtgtgacaggcacacatccatagttgtgcacaaggatgagttcttcttcggcagtggtggtatctccagctgccccccgggagggacattgcttgggcctccagactctgtggttgatgtggggagtacagaagtcacagaagaaatctttctggagtacctctcctccctgggggagtccctgttccgaggtgaggcctacaacctctttgaacacaattgtaacaccttcagcaacgaagtggcacagttcctgactgggcggaagattccttcttacatcacagacctgccctctgaagttctctccacgccctttggacaggcacttcggcccctcctggactccattcagatccagcctccaggagggagctccgtgggcagacccaacggccagagctaacaggactgcctgggaccgccctgcctcaccagggcttttcctttttaaacaaaacaaaccctaccagatttctattttataattttacatcagagctaacaaccaggggacggctttttaaatttcccagggaaggagaccgtcaggccgcatgtagacaatgctgctaagaaacagaacaaaatgccaccccttctaatagtattatactaatttattaaggctg

SEQ ID NO: 29574 - protein, 73 aa, Homo sapiens; identical to SEQ ID NO: 29566

SEQ ID NO: 29575 - DNA, 951 bp, Homo sapiens
gccctccctgtcccctctctgtcacctcacagtagtcgttgccggtagcgggtgtgggggcgcgagcagcgcagggcggcctctcccccacccctcagcccgggcccgggctcggtccccccctctccctccgcttcgcactcccgtcgggtacgggaaggtccaagccgctgccgggtgcccgagggccgtcgtggccgccgtcgccacgggtcccaatggagccgccgaatctctatccggtgaagctctacgtgtacgacctgtccaaaggcctggcccggcggctcagccccatcatgctggggaaacaactggaaggcatctggcacacatccatagttgtgcacaaggatgagttcttcttcggcagtggtggtatctccagctgccccccgggagggacattgcttgggcctccagactctgtggttgatgtggggagtacagaagtcacagaagaaatctttctggagtacctctcctccctgggggagtccctgttccgaggtgaggcctacaacctctttgaacacaattgtaacaccttcagcaacgaagtggcacagttcctgactgggcggaagattccttcttacatcacagacctgccctctgaagttctctccacgccctttggacaggcacttcggcccctcctggactccattcagatccagcctccaggagggagctccgtgggcagacccaacggccagagctaacaggactgcctgggaccgccctgcctcaccagggcttttcctttttaaacaaaacaaaccctaccagatttctattttataattttacatcagagctaacaaccaggggacggctttttaaatttcccagggaaggagaccgtcaggccgcatgtagacaatgctgctaagaaacagaacaaaatgccaccccttctaatagtattatactaatttattaaggctg

SEQ ID NO: 29576 - protein, 168 aa, Homo sapiens; identical to SEQ ID NO: 4069

SEQ ID NO: 29577 - DNA, 1404 bp, Homo sapiens
ctgtcccctctctgtcacctcacagtagtcgttgccggtagcgggtgtgggggcgcgagcagcgcagggcggcctctcccccacccctcagcccgggcccgggctcggtccccccctctccctccgcttcgcactcccgtcgggtacgggaaggtccaagccgctgccgggtgcccgagggccgtcgtggccgccgtcgccacgggtcccaatggagccgccgaatctctatccggtgaagctctacgtgtacgacctgtccaaaggcctggcccggcggctcagccccatcatgctggggaaacaactggaaggcatctggcacacatccatagttgtgcacaaggatgagttcttcttcggcagtggtggtatctccagctgccccccgggagggacattgcttgggcctccagactctgtggttgatgtggggagtacagaagtcacagaagaaatctttctggagtacctctcctccctgggggagtccctgttccgaggtgaggcctacaacctctttgaacacaattgtaacaccttcagcaacgaagtggcacagttcctgactgggcggaagattccttcttacatcacagacctgccctctgaagttctctccaccacagtcttcaacagatgttttcttcaagaacactctgcagcccgttctgtcctgatgtgccccaagccttggaagagccttgcaggccatcatccaggcagtataccccgaaaggacacaacacccccaaagccatctcacctcctccctcttgtcgttgattgcattcaggcagcctctgctcattccaggaccatgtctatttgcttattctgactcagtttctcctgaactatggccttatttaacagagatcctggcaggtttcgcaggcccagcaaggtgggctgttttttatatctgaggaagcacctcccaggaagagcttgcataggaaacaagactgctgtggcaggctggtgaggagccccagtccgccagccctggccctgccttcctatcattcgatgagtttgcagtcccacagctctgctgagggatctaggttatggggccctgagcaaactggagtagccagaatgtgcttgctgttattattttatgggtggagttcctggaattgtctgaattaggtttgatatttctaggtttcatctgtctatactttggagtacttcattcctttaaacttggagatgattttcaaaaatggcagtatccactgaagaaaaagccagtgacttaaaagtttctgggcaaccttatttatggttgtcgtaatcatggaaaatctccaaactccagtatttgtagttttttttccatctgttactatgagagcaacctaggagccctttagaaaggcattaatggctggg

SEQ ID NO: 29578 - protein, 209 aa, Homo sapiens
MEPPNLYPVKLYVYDLSKGLARRLSPIMLGKQLEGIWHTSIVVHKDEFFFGSGGISSCPPGGTLLGPPDSVVDVGSTEVTEEIFLEYLSSLGESLFRGEAYNLFEHNCNTFSNEVAQFLTGRKIPSYITDLPSEVLSTTVFNRCFLQEHSAARSVLMCPKPWKSLAGHHPGSIPRKDTTPPKPSHLLPLVVDCIQAASAHSRTMSICLF

SEQ ID NO: 29579 - DNA, 531 bp, Homo sapiens
gcccgcgcatgcgtggattgtcgtcttctgtccaagttggtcgcttccctgcgccaaagtgagcagtagccaacatgtcagggtgggagtcatattacaaaaccgagggcgatgaagaagcagaggaagaacaagaagagaaccttgaagcaagtgtgtatccaaagtgtgtacatcagtaagatcataagcagtgatcgagatctcttggctgtggtgttctatggtaccgagaaagacaaaaattcagtgaattttaaaaatatttacgtcttacaggagctggataatccaggtgcaaaacgaattctagagcttgaccagtttaaggggcagcagggacaaaaacgtttccaagacatgatgggccacggatctgactactcactcagtgaagtgctgtgggtctgtgccaacctctttagtgatgtccaattcaagatgagtcataagaggatcatgctgttcaccaatgaagacaacccccatggcaatgacagtgccaaagccagccgggccaggaccaaagcc

SEQ ID NO: 29580 - protein, 139 aa, Homo sapiens
MKKQRKNKKRTLKQVCIQSVYISKIISSDRDLLAVVFYGTEKDKNSVNFKNIYVLQELDNPGAKRILELDQFKGQQGQKRFQDMMGHGSDYSLSEVLWVCANLFSDVQFKMSHKRIMLFTNEDNPHGNDSAKASRARTK

SEQ ID NO: 29581 - DNA, 2006 bp, Homo sapiens
atgcgtggattgtcgtcttctgtccaagttggtcgcttccctgcgccaaagtgagcagtagccaacatgtcagggtgggagtcatattacaaaaccgagggcgatgaagaagcagaggaagaacaagaagagaaccttgaagcaagtggagactataaatattcaggaagagatagtttgatttttttggttgatgcctccaaggctatgtttgaatctcagagtgaagatgagttgacaccttttgacatgagcatccaggagctggataatccaggtgcaaaacgaattctagagcttgaccagtttaaggggcagcagggacaaaaacgtttccaagacatgatgggccacggatctgactactcactcagtgaagtgctgtgggtctgtgccaacctctttagtgatgtccaattcaagatgagtcataagaggatcatgctgttcaccaatgaagacaacccccatggcaatgacagtgccaaagccagccgggccaggaccaaagccggtgatctccgagatacaggcatcttccttgacttgatgcacctgaagaaacctgggggctttgacatatccttgttctacagagatatcatcagcatagcagaggatgaggacctcagggttcactttgaggaatccagcaagctagaagacctgttgcggaaggttcgcgccaaggagaccaggaagcgagcactcagcaggttaaagctgaagctcaacaaagatatagtgatctctgtgggcatttataatctggtccagaaggctctcaagcctcctccaataaagctctatcgggaaacaaatgaaccagtgaaaaccaagacccggacctttaatacaagtacaggcggtttgcttctgcctagcgataccaagaggtctcagatctatgggagtcgtcagattatactggagaaagaggaaacagaagagctaaaacggtttgatgatccaggtttgatgctcatgggtttcaagccgttggtactgctgaagaaacaccattacctgaggccctccctgttcgtgtacccagaggagtcgctggtgattgggagctcaaccctgttcagtgctctgctcatcaagtgtctggagaaggaggttgcagcattgtgcagatacacaccccgcaggaacatccctccttattttgtggctttggtgccacaggaagaagagttggatgaccagaaaattcaggtgactcctccaggcttccagctggtctttttaccctttgctgatgataaaaggaagatgccctttactgaaaaaatcatggcaactccagagcaggtgggcaagatgaaggctatcgttgagaagcttcgcttcacatacagaagtgacagctttgagaaccccgtgctgcagcagcacttcaggaacctggaggccttggccttggatttgatggagccggaacaagcagtggacctgacattgcccaaggttgaagcaatgaataaaagactgggctccttggtggatgagtttaaggagcttgtttacccaccagattacaatcctgaagggaaagttaccaagagaaaacacgataatgaaggttctggaagcaaaaggcccaaggtggagtattcagaagaggagctgaagacccacatcagcaagggtacgctgggcaagttcactgtgcccatgctgaaagaggcctgccgggcttacgggctgaagagtgggctgaagaagcaggagctgctggaagccctcaccaagcacttccaggactgaccagaggccgcgcgtccagctgcccttccgcagtgtggccaggctgcctggccttgtcctcagccagttaaaatgtgtttctcctgagctaggaagagtctacccgacataagtcgagggactttatgtttttgaggctttctgttgccatggtgatggtgtagccctcccactttgctgttccttactttactgcctgaataaagagccctaagtttgtactatatactgtt

SEQ ID NO: 29582 - protein, 568 aa, Homo sapiens
MSGWESYYKTEGDEEAEEEQEENLEASGDYKYSGRDSLIFLVDASKAMFESQSEDELTPFDMSIQELDNPGAKRILELDQFKGQQGQKRFQDMMGHGSDYSLSEVLWVCANLFSDVQFKMSHKRIMLFTNEDNPHGNDSAKASRARTKAGDLRDTGIFLDLMHLKKPGGFDISLFYRDIISIAEDEDLRVHFEESSKLEDLLRKVRAKETRKRALSRLKLKLNKDIVISVGIYNLVQKALKPPPIKLYRETNEPVKTKTRTFNTSTGGLLLPSDTKRSQIYGSRQIILEKEETEELKRFDDPGLMLMGFKPLVLLKKHHYLRPSLFVYPEESLVIGSSTLFSALLIKCLEKEVAALCRYTPRRNIPPYFVALVPQEEELDDQKIQVTPPGFQLVFLPFADDKRKMPFTEKIMATPEQVGKMKAIVEKLRFTYRSDSFENPVLQQHFRNLEALALDLMEPEQAVDLTLPKVEAMNKRLGSLVDEFKELVYPPDYNPEGKVTKRKHDNEGSGSKRPKVEYSEEELKTHISKGTLGKFTVPMLKEACRAYGLKSGLKKQELLEALTKHFQD

SEQ ID NO: 29583 - DNA, 2718 bp, Homo sapiens
gcgggccgttatccatttgtgttgttcgccagctaggcctggcctcgtcccgcttcgctcggtcggtctcgcgcgcccccatagccttgctagagggttagcgttagccttaagtgtgcgaatccgaggagcagcgacagactcgagaccacgctccttcctcgggaaggaggcggcacctcgcgtttgaggcccgcctgcgtttgaggcccgcctgcgcttgcggcccgcctgcgcttgaggcctgtctgcgtttgagatctcattgggcgtgattgaggaatttggggaggtttttgggcggtattgaggacgagggggtccgttagtcagcatagaatcctggagcgggaatccctcaccgtctaaatggcgtcgggggcgggacctccgggatctggcttccgcgggccgccgccggccctgaaacgtgagggatagctgagatgaggcagctactgggatggcccccatgcgcatttacatgcagtccgactgccgagctttcgaggcagcaggatttaccgtccacattcctcactactaaccaagcttttagaacagatctcacaagaacctagaggtcggtattttttcgatttaaatttgcctgttactgacgttaacgtctttcgcctagtgagcagtagccaacatgtcagggtgggagtcatattacaaaaccgagggcgatgaagaagcagaggaagaacaagaagagaaccttgaagcaagtggagactataaatattcaggaagagatagtttgatttttttggttgatgcctccaaggctatgtttgaatctcagagtgaagatgagttgacaccttttgacatgagcatccagtgtatccaaagtgtgtacatcagtaagatcataagcagtgatcgagatctcttggctgtggtgttctatggtaccgagaaagacaaaaattcagtgaattttaaaaatatttacgtcttacaggagctggataatccaggtgcaaaacgaattctagagcttgaccagtttaaggggcagcagggacaaaaacgtttccaagacatgatgggccacggatctgactactcactcagtgaagtgctgtgggtctgtgccaacctctttagtgatgtccaattcaagatgagtcataagaggatcatgctgttcaccaatgaagacaacccccatggcaatgacagtgccaaagccagccgggccaggaccaaagccggtgatctccgagatacaggcatcttccttgacttgatgcacctgaagaaacctgggggctttgacatatccttgttctacagagatatcatcagcatagcagaggatgaggacctcagggttcactttgaggaatccagcaagctagaagacctgttgcggaaggttcgcgccaaggagaccaggaagcgagcactcagcaggttaaagctgaagctcaacaaagatatagtgatctctgtgggcatttataatctggtccagaaggctctcaagcctcctccaataaagctctatcgggaaacaaatgaaccagtgaaaaccaagacccggacctttaatacaagtacaggcggtttgcttctgcctagcgataccaagaggtctcagatctatgggagtcgtcagattatactggagaaagaggaaacagaagagctaaaacggtttgatgatccaggtttgatgctcatgggtttcaagccgttggtactgctgaagaaacaccattacctgaggccctccctgttcgtgtacccagaggagtcgctggtgattgggagctcaaccctgttcagtgctctgctcatcaagtgtctggagaaggaggttgcagcattgtgcagatacacaccccgcaggaacatccctccttattttgtggctttggtgccacaggaagaagagttggatgaccagaaaattcaggtgactcctccaggcttccagctggtctttttaccctttgctgatgataaaaggaagatgccctttactgaaaaaatcatggcaactccagagcaggtgggcaagatgaaggctatcgttgagaagcttcgcttcacatacagaagtgacagctttgagaaccccgtgctgcagcagcacttcaggaacctggaggccttggccttggatttgatggagccggaacaagcagtggacctgacattgcccaaggttgaagcaatgaataaaagactgggctccttggtggatgagtttaaggagcttgtttacccaccagattacaatcctgaagggaaagttaccaagagaaaacacgataatgaaggttctggaagcaaaaggcccaaggtggagtattcagaagaggagctgaagacccacatcagcaagggtacgctgggcaagttcactgtgcccatgctgaaagaggcctgccgggcttacgggctgaagagtgggctgaagaagcaggagctgctggaagccctcaccaagcacttccaggactgaccagaggccgcgcgtccagctgcccttccgcagtgtggccaggctgcctggccttgtcctcagccagttaaaatgtgtttctcctgagctaggaagagtctacccgacataagtcgagggactttatgtttttgaggctttctgttgccatggtgatggtgtagccctcccactttgctgttccttactttactgcctgaataaagagccctaagtttgtactatatactgtt

SEQ ID NO: 29584 - protein, 609 aa, Homo sapiens; identical to SEQ ID NO: 4071

SEQ ID NO: 29585 - DNA, 1664 bp, Homo sapiens
agctacttgggaggctgaggcaggagaatcacttgaacctggctgcttgggagactgaggcaggagaatcacttaaacccgggaagcggaggttgaagtgagccaagatcgcaccactgcactccagctgtgtgacagagcaagactccatctcaaaaaaaaaaaagaagaagaagaagtggtcagattcaggacgtgttttgaggataagtggtggatttaatgtagggcttgagaaaatgccattgtgtatgactgactggtgtttgaatcctttatcatatcccagggccggtctaggacacataattgtgtgtgcctaggcattcttcccagtttgttgtggctgccctgcccaagcccacatcacctattagcttcacgtccttctctccgcagccaccaaaaccctcaacaggggcatctctgagttcatcgtgatggctgcagacgccgagccactggagatcattctgcacctgccgctgctgtgtgaagacaagaatgtgccctacgtgtttgtgcgctccaagcaggccctggggagagcctgtggggtctccaggcctgtcatcgcctgttctgtcaccatcaaagaaggctcgcagctgaaacagcagatccaatccattcagcagtccattgaaaggctcttagtctaaacctgtggcctctgccacgtgctccctgccagcttcccccctgaggttgtgtatcatattatctgtgttagcatgtagtattttcagctactctctattgttataaaatgtagtactaaatctggtttctggatttttgtgttgtttttgttctgttttacagggttgctatcccccttcctttcctccctccctctgccatccttcatccttttatcctccctttttggaacaagtgttcagagcagacagaagcagggtggtggcaccgttgaaaggcagaaagagccaggagaaagctgatggagccaggacagagatctggttccagctttcagccactagcttcctgttgtgtgcggggtgtggtggaattaaacagcattcattgtgtgtccctgtgcctggcacacagaatcattcatacgtgttcaagtgatcaaggggtttcatttgctcttgggggattaggtatcatttggggaggaagcatgtgttctgtgaggttgttcggctatgtccaagtgtcgtttactaatgtacccctgctgtttgcttttggtaatgtgatgttgatgttctccccctacccacaaccatgcccttgagggtagcagggcagcagcataccaaagagatgtgctgcaggactccggaggcagcctgggtgggtgagccatggggcagttgacctgggtcttgaaagagtcgggagtgacaagctcagagagcatgaactgatgctggcatgaaggattccaggaagatcatggagacctggctggtagctgtaacagagatggtggagtccaaggaaacagcctgtctctggtgaatgggactttctttggtggacacttggcaccagctctgagagcccttcccctgtgtcctgccaccatgtgggtcagatgtactctctgtcacatgaggagagtgctagttcatgtgttctccattcttgtgagcatcctaataaatctgttccattttgatgacaga

SEQ ID NO: 29586 - protein, 101 aa, Homo sapiens [sequence omitted]

SEQ ID NO: 29587 - DNA, 1821 bp, Homo sapiens
gggcatccgtgtccttgcggtgctgggcagcagaccgtccaaaccgacacgcgtggtatcctcgcggtgtccggcaagagactaccaagacagacgctatggcggaagagtgatacaagaggtacttctcatcttctacctggttaccgcctaatacagcatttaggaaaggcacagaagatgattgtttccctttcccagttttcaaaatattgagttgctatcacttgcatagttttgacttttaaaccatgaagatattttacatatttgaaaaataaaatttaaagcaagctgactacaaaataaatctacttgtataccaaattgctaaccacaaggaaaattttaatttgaataacttttgaacaaagtcctgccactggatggctttgataggatatatcctaagaacaaaaataaattttgactttgactgaggctgatgtgaatccaaaggcctatccccttgccgatgcccacctcaccaagaagctactggacctcgttcagcagtcatgtaactataagcagcttcggaaaggagccaatgaggccaccaaaaccctcaacaggggcatctctgagttcatcgtgatggctgcagacgccgagccactggagatcattctgcacctgccgctgctgtgtgaagacaagaatgtgccctacgtgtttgtgcgctccaagcaggccctggggagagcctgtggggtctccaggcctgtcatcgcctgttctgtcaccatcaaagaaggctcgcagctgaaacagcagatccaatccattcagcagtccattgaaaggctcttagtctaaacctgtggcctctgccacgtgctccctgccagcttcccccctgaggttgtgtatcatattatctgtgttagcatgtagtattttcagctactctctattgttataaaatgtagtactaaatctggtttctggatttttgtgttgtttttgttctgttttacagggttgctatcccccttcctttcctccctccctctgccatccttcatccttttatcctccctttttggaacaagtgttcagagcagacagaagcagggtggtggcaccgttgaaaggcagaaagagccaggagaaagctgatggagccaggacagagatctggttccagctttcagccactagcttcctgttgtgtgcggggtgtggtggaattaaacagcattcattgtgtgtccctgtgcctggcacacagaatcattcatacgtgttcaagtgatcaaggggtttcatttgctcttgggggattaggtatcatttggggaggaagcatgtgttctgtgaggttgttcggctatgtccaagtgtcgtttactaatgtacccctgctgtttgcttttggtaatgtgatgttgatgttctccccctacccacaaccatgcccttgagggtagcagggcagcagcataccaaagagatgtgctgcaggactccggaggcagcctgggtgggtgagccatggggcagttgacctgggtcttgaaagagtcgggagtgacaagctcagagagcatgaactgatgctggcatgaaggattccaggaagatcatggagacctggctggtagctgtaacagagatggtggagtccaaggaaacagcctgtctctggtgaatgggactttctttggtggacacttggcaccagctctgagagcccttcccctgtgtcctgccaccatgtgggtcagatgtactctctgtcacatgaggagagtgctagttcatgtgttctccattcttgtgagcatcctaataaatctgttccattttgatgacaga

SEQ ID NO: 29588 - protein, 40 aa, Homo sapiens
MPTSPRSYWTSFSSHVTISSFGKEPMRPPKPSTGASLSSS

SEQ ID NO: 29589 - DNA, 1653 bp, Homo sapiens
gagaactcctccatccttcacctaattcttcctagttgtcctgggaccaagacaaattcgcctaagataaggagttacgtagaagacagggcgtcctggtgtacgggctggccctggacgtcacttccgctggcggcagtggcgtcacttcctgctcttgggggcggggcatccgtgtccttgcggtgctgggcagcagaccgtccaaaccgacacgcgtggtatcctcgcggtgtccggcaagagactaccaagacagacgctatgactgaggctgatgtgaatccaaaggcctatccccttgccgatgcccacctcaccaagaagctactggacctcgttcagcagtcatgtaactataagcagcttcggaaaggagccaatgaggccaccaaaaccctcaacaggggcatctctgagttcatcgtgatggctgcagacgccgagccactggagatcattctgcacctgccgctgctgtgtgaagacaagaatgtgccctacgtgtttgtgcgctccaagcaggccctggggagagcctgtggggtctccaggcctgtcatcgcctgttctgtcaccatcaaagaaggctcgcagctgaaacagcagatccaatccattcagcagtccattgaaaggctcttagtctaaacctgtggcctctgccacgtgctccctgccagcttcccccctgaggttgtgtatcatattatctgtgttagcatgtagtattttcagctactctctattgttataaaatgtagtactaaatctggtttctggatttttgtgttgtttttgttctgttttacagggttgctatcccccttcctttcctccctccctctgccatccttcatccttttatcctccctttttggaacaagtgttcagagcagacagaagcagggtggtggcaccgttgaaaggcagaaagagccaggagaaagctgatggagccaggacagagatctggttccagctttcagccactagcttcctgttgtgtgcggggtgtggtggaattaaacagcattcattgtgtgtccctgtgcctggcacacagaatcattcatacgtgttcaagtgatcaaggggtttcatttgctcttgggggattaggtatcatttggggaggaagcatgtgttctgtgaggttgttcggctatgtccaagtgtcgtttactaatgtacccctgctgtttgcttttggtaatgtgatgttgatgttctccccctacccacaaccatgcccttgagggtagcagggcagcagcataccaaagagatgtgctgcaggactccggaggcagcctgggtgggtgagccatggggcagttgacctgggtcttgaaagagtcgggagtgacaagctcagagagcatgaactgatgctggcatgaaggattccaggaagatcatggagacctggctggtagctgtaacagagatggtggagtccaaggaaacagcctgtctctggtgaatgggactttctttggtggacacttggcaccagctctgagagcccttcccctgtgtcctgccaccatgtgggtcagatgtactctctgtcacatgaggagagtgctagttcatgtgttctccattcttgtgagcatcctaataaatctgttccattttgatgacaga

SEQ ID NO: 29590 - protein, 128 aa, Homo sapiens; identical to SEQ ID NO: 4073

SEQ ID NO: 29591 - DNA, 1993 bp, Homo sapiens
ggaggagatctcccatgggtctgcgcttagtgcccgccgcgagtcacacgcgccagggacctagaggagcctttggcatttgggggctgtggggaacatgaagtgagcgcgactcacggcctggagtgcaggaaaggcttctcctgcaaggcggtggcttcaaaaaccagaagtctggtagcaccacgtgcggcgtctctaaactcttggtcgtctctgacttttaaacatctagggaaagttctaaaacgtgtgtcctggcgtagtagttttggttggcacttggtgaggagggaagaatttgtaaagcactgtaacttctatagttaatccttccagtggagcttggatcccggcggtagcactccccacaaacctcctcccatgcattttgaagcttagtacgtggctgagcctagaacttgaagcttccaaactcagtgctcgctttaacgcagctccctgaaacgttttggaatcggatggtctcaggttgaactttgcagttttcctcaactgtaaaatggggatgacagtgcatgagggtgttgtgaggatcaaatgaaataaagcatggtaaacatctagtcctgatgcttggtacagaactgaggctgatgtgaatccaaaggcctatccccttgccgatgcccacctcaccaagaagctactggacctcgttcagcagtcatgtaactataagcagcttcggaaaggagccaatgaggccaccaaaaccctcaacaggggcatctctgagttcatcgtgatggctgcagacgccgagccactggagatcattctgcacctgccgctgctgtgtgaagacaagaatgtgccctacgtgtttgtgcgctccaagcaggccctggggagagcctgtggggtctccaggcctgtcatcgcctgttctgtcaccatcaaagaaggctcgcagctgaaacagcagatccaatccattcagcagtccattgaaaggctcttagtctaaacctgtggcctctgccacgtgctccctgccagcttcccccctgaggttgtgtatcatattatctgtgttagcatgtagtattttcagctactctctattgttataaaatgtagtactaaatctggtttctggatttttgtgttgtttttgttctgttttacagggttgctatcccccttcctttcctccctccctctgccatccttcatccttttatcctccctttttggaacaagtgttcagagcagacagaagcagggtggtggcaccgttgaaaggcagaaagagccaggagaaagctgatggagccaggacagagatctggttccagctttcagccactagcttcctgttgtgtgcggggtgtggtggaattaaacagcattcattgtgtgtccctgtgcctggcacacagaatcattcatacgtgttcaagtgatcaaggggtttcatttgctcttgggggattaggtatcatttggggaggaagcatgtgttctgtgaggttgttcggctatgtccaagtgtcgtttactaatgtacccctgctgtttgcttttggtaatgtgatgttgatgttctccccctacccacaaccatgcccttgagggtagcagggcagcagcataccaaagagatgtgctgcaggactccggaggcagcctgggtgggtgagccatggggcagttgacctgggtcttgaaagagtcgggagtgacaagctcagagagcatgaactgatgctggcatgaaggattccaggaagatcatggagacctggctggtagctgtaacagagatggtggagtccaaggaaacagcctgtctctggtgaatgggactttctttggtggacacttggcaccagctctgagagcccttcccctgtgtcctgccaccatgtgggtcagatgtactctctgtcacatgaggagagtgctagttcatgtgttctccattcttgtgagcatcctaataaatctgttccattttgatgacaga

SEQ ID NO: 29592 - protein, 40 aa, Homo sapiens; identical to SEQ ID NO: 29588

SEQ ID NO: 29593 - DNA, 1646 bp, Homo sapiens
ccgcagccatggaggagatctcccatgggtctgcgcttagtgcccgccgcgagtcacacgcgccagggacctagaggagcctttggcatttgggggctgtggggaacatgaagtgagcgcgactcacggcctggagtgcaggaaaggcttctcctgcaaggcggtggcttcaaaaaccagaagtctggtagcaccacgtgcggcgtctctaaactcttggtcgtctctgacttttaaacatctagggaaagttctaaaacactgaggctgatgtgaatccaaaggcctatccccttgccgatgcccacctcaccaagaagctactggacctcgttcagcagtcatgtaactataagcagcttcggaaaggagccaatgaggccaccaaaaccctcaacaggggcatctctgagttcatcgtgatggctgcagacgccgagccactggagatcattctgcacctgccgctgctgtgtgaagacaagaatgtgccctacgtgtttgtgcgctccaagcaggccctggggagagcctgtggggtctccaggcctgtcatcgcctgttctgtcaccatcaaagaaggctcgcagctgaaacagcagatccaatccattcagcagtccattgaaaggctcttagtctaaacctgtggcctctgccacgtgctccctgccagcttcccccctgaggttgtgtatcatattatctgtgttagcatgtagtattttcagctactctctattgttataaaatgtagtactaaatctggtttctggatttttgtgttgtttttgttctgttttacagggttgctatcccccttcctttcctccctccctctgccatccttcatccttttatcctccctttttggaacaagtgttcagagcagacagaagcagggtggtggcaccgttgaaaggcagaaagagccaggagaaagctgatggagccaggacagagatctggttccagctttcagccactagcttcctgttgtgtgcggggtgtggtggaattaaacagcattcattgtgtgtccctgtgcctggcacacagaatcattcatacgtgttcaagtgatcaaggggtttcatttgctcttgggggattaggtatcatttggggaggaagcatgtgttctgtgaggttgttcggctatgtccaagtgtcgtttactaatgtacccctgctgtttgcttttggtaatgtgatgttgatgttctccccctacccacaaccatgcccttgagggtagcagggcagcagcataccaaagagatgtgctgcaggactccggaggcagcctgggtgggtgagccatggggcagttgacctgggtcttgaaagagtcgggagtgacaagctcagagagcatgaactgatgctggcatgaaggattccaggaagatcatggagacctggctggtagctgtaacagagatggtggagtccaaggaaacagcctgtctctggtgaatgggactttctttggtggacacttggcaccagctctgagagcccttcccctgtgtcctgccaccatgtgggtcagatgtactctctgtcacatgaggagagtgctagttcatgtgttctccattcttgtgagcatcctaataaatctgttccattttgatgacaga

SEQ ID NO: 29594 - protein, 40 aa, Homo sapiens; identical to SEQ ID NO: 29588

SEQ ID NO: 29595 - DNA, 1820 bp, Homo sapiens
gctgagcccgcggaaccgcagccatggaggagatctcccatgggtctgcgcttagtgcccgccgcgagtcacacgcgccagggacctagaggagcctttggcatttgggggctgtggggaacatgaagtgagcgcgactcacggcctggagtgcaggaaaggcttctcctgcaaggcggtggcttcaaaaaccagaagtctgttgtcctgggaccaagacaaattcgcctaagataaggagttacgtagaagacagggcgtcctggtgtacgggctggccctggacgtcacttccgctggcggcagtggcgtcacttcctgctcttgggggcggggcatccgtgtccttgcggtgctgggcagcagaccgtccaaaccgacacgcgtggtatcctcgcggtgtccggcaagagactaccaagacagacgctatgactgaggctgatgtgaatccaaaggcctatccccttgccgatgcccacctcaccaagaagctactggacctcgttcagcagtcatgtaactataagcagcttcggaaaggagccaatgaggccaccaaaaccctcaacaggggcatctctgagttcatcgtgatggctgcagacgccgagccactggagatcattctgcacctgccgctgctgtgtgaagacaagaatgtgccctacgtgtttgtgcgctccaagcaggccctggggagagcctgtggggtctccaggcctgtcatcgcctgttctgtcaccatcaaagaaggctcgcagctgaaacagcagatccaatccattcagcagtccattgaaaggctcttagtctaaacctgtggcctctgccacgtgctccctgccagcttcccccctgaggttgtgtatcatattatctgtgttagcatgtagtattttcagctactctctattgttataaaatgtagtactaaatctggtttctggatttttgtgttgtttttgttctgttttacagggttgctatcccccttcctttcctccctccctctgccatccttcatccttttatcctccctttttggaacaagtgttcagagcagacagaagcagggtggtggcaccgttgaaaggcagaaagagccaggagaaagctgatggagccaggacagagatctggttccagctttcagccactagcttcctgttgtgtgcggggtgtggtggaattaaacagcattcattgtgtgtccctgtgcctggcacacagaatcattcatacgtgttcaagtgatcaaggggtttcatttgctcttgggggattaggtatcatttggggaggaagcatgtgttctgtgaggttgttcggctatgtccaagtgtcgtttactaatgtacccctgctgtttgcttttggtaatgtgatgttgatgttctccccctacccacaaccatgcccttgagggtagcagggcagcagcataccaaagagatgtgctgcaggactccggaggcagcctgggtgggtgagccatggggcagttgacctgggtcttgaaagagtcgggagtgacaagctcagagagcatgaactgatgctggcatgaaggattccaggaagatcatggagacctggctggtagctgtaacagagatggtggagtccaaggaaacagcctgtctctggtgaatgggactttctttggtggacacttggcaccagctctgagagcccttcccctgtgtcctgccaccatgtgggtcagatgtactctctgtcacatgaggagagtgctagttcatgtgttctccattcttgtgagcatcctaataaatctgttccattttgatgacaga

SEQ ID NO: 29596 - protein, 128 aa, Homo sapiens; identical to SEQ ID NO: 4073

SEQ ID NO: 29597 - DNA, 1706 bp, Homo sapiens
tctgtgagtttttccggtgcacgcgagtgcttctgaaacgtcagctgcgctcccctaggagtgctgagcccgcggaaccgcagccatgttgtcctgggaccaagacaaattcgcctaagataaggagttacgtagaagacagggcgtcctggtgtacgggctggccctggacgtcacttccgctggcggcagtggcgtcacttcctgctcttgggggcggggcatccgtgtccttgcggtgctgggcagcagaccgtccaaaccgacacgcgtggtatcctcgcggtgtccggcaagagactaccaagacagacgctatgactgaggctgatgtgaatccaaaggcctatccccttgccgatgcccacctcaccaagaagctactggacctcgttcagcagtcatgtaactataagcagcttcggaaaggagccaatgaggccaccaaaaccctcaacaggggcatctctgagttcatcgtgatggctgcagacgccgagccactggagatcattctgcacctgccgctgctgtgtgaagacaagaatgtgccctacgtgtttgtgcgctccaagcaggccctggggagagcctgtggggtctccaggcctgtcatcgcctgttctgtcaccatcaaagaaggctcgcagctgaaacagcagatccaatccattcagcagtccattgaaaggctcttagtctaaacctgtggcctctgccacgtgctccctgccagcttcccccctgaggttgtgtatcatattatctgtgttagcatgtagtattttcagctactctctattgttataaaatgtagtactaaatctggtttctggatttttgtgttgtttttgttctgttttacagggttgctatcccccttcctttcctccctccctctgccatccttcatccttttatcctccctttttggaacaagtgttcagagcagacagaagcagggtggtggcaccgttgaaaggcagaaagagccaggagaaagctgatggagccaggacagagatctggttccagctttcagccactagcttcctgttgtgtgcggggtgtggtggaattaaacagcattcattgtgtgtccctgtgcctggcacacagaatcattcatacgtgttcaagtgatcaaggggtttcatttgctcttgggggattaggtatcatttggggaggaagcatgtgttctgtgaggttgttcggctatgtccaagtgtcgtttactaatgtacccctgctgtttgcttttggtaatgtgatgttgatgttctccccctacccacaaccatgcccttgagggtagcagggcagcagcataccaaagagatgtgctgcaggactccggaggcagcctgggtgggtgagccatggggcagttgacctgggtcttgaaagagtcgggagtgacaagctcagagagcatgaactgatgctggcatgaaggattccaggaagatcatggagacctggctggtagctgtaacagagatggtggagtccaaggaaacagcctgtctctggtgaatgggactttctttggtggacacttggcaccagctctgagagcccttcccctgtgtcctgccaccatgtgggtcagatgtactctctgtcacatgaggagagtgctagttcatgtgttctccattcttgtgagcatcctaataaatctgttccattttgatgacaga

SEQ ID NO: 29598 - protein, 128 aa, Homo sapiens; identical to SEQ ID NO: 4073

SEQ ID NO: 29599 - DNA, 1867 bp, Homo sapiens
tctcctgcttcagcctcctaagtagctggggttacaggcgcccgccaccacgcctggctaatttttgtattttttagtagggacgaggtttcgccatgttggccaggctggtctcgaactcctgtcctcaggtgatgcgcccgcctcggcctcccaaagtgccgggattacagccataagccgctgcggccggccggtgggttactttttgaatgtttaattcattgtttctgccaataatttgtactaggcagctcataagaacgccaaagtacgttccttcttcgacacagggccagtttccgcgccagtgcccccgtagagggcggggcccactcgctcgcgtagcgtcaccttcgcttcctgccgcgcggggccatttccgctgctgcttctgtgagtttttccggtgcacgcgagtgcttctgaaacgtcagctgcgctcccctaggagtgctgagcccgcggaaccgcagccatgactgaggctgatgtgaatccaaaggcctatccccttgccgatgcccacctcaccaagaagctactggacctcgttcagcagtcatgtaactataagcagcttcggaaaggagccaatgaggccaccaaaaccctcaacaggggcatctctgagttcatcgtgatggctgcagacgccgagccactggagatcattctgcacctgccgctgctgtgtgaagacaagaatgtgccctacgtgtttgtgcgctccaagcaggccctggggagagcctgtggggtctccaggcctgtcatcgcctgttctgtcaccatcaaagaaggctcgcagctgaaacagcagatccaatccattcagcagtccattgaaaggctcttagtctaaacctgtggcctctgccacgtgctccctgccagcttcccccctgaggttgtgtatcatattatctgtgttagcatgtagtattttcagctactctctattgttataaaatgtagtactaaatctggtttctggatttttgtgttgtttttgttctgttttacagggttgctatcccccttcctttcctccctccctctgccatccttcatccttttatcctccctttttggaacaagtgttcagagcagacagaagcagggtggtggcaccgttgaaaggcagaaagagccaggagaaagctgatggagccaggacagagatctggttccagctttcagccactagcttcctgttgtgtgcggggtgtggtggaattaaacagcattcattgtgtgtccctgtgcctggcacacagaatcattcatacgtgttcaagtgatcaaggggtttcatttgctcttgggggattaggtatcatttggggaggaagcatgtgttctgtgaggttgttcggctatgtccaagtgtcgtttactaatgtacccctgctgtttgcttttggtaatgtgatgttgatgttctccccctacccacaaccatgcccttgagggtagcagggcagcagcataccaaagagatgtgctgcaggactccggaggcagcctgggtgggtgagccatggggcagttgacctgggtcttgaaagagtcgggagtgacaagctcagagagcatgaactgatgctggcatgaaggattccaggaagatcatggagacctggctggtagctgtaacagagatggtggagtccaaggaaacagcctgtctctggtgaatgggactttctttggtggacacttggcaccagctctgagagcccttcccctgtgtcctgccaccatgtgggtcagatgtactctctgtcacatgaggagagtgctagttcatgtgttctccattcttgtgagcatcctaataaatctgttccattttgatgacaga

SEQ ID NO: 29600 - protein, 128 aa, Homo sapiens; identical to SEQ ID NO: 4073

SEQ ID NO: 29601 - DNA, 794 bp, Homo sapiens
agctacttgggaggctgaggcaggagaatcacttgaacctggctgcttgggagactgaggcaggagaatcacttaaacccgggaagcggaggttgaagtgagccaagatcgcaccactgcactccagctgtgtgacagagcaagactccatctcaaaaaaaaaaaagaagaagaagaagtggtcagattcaggacgtgttttgaggataagtggtggatttaatgtagggcttgagaaaatgccattgtgtatgactgactggtgtttgaatcctttatcatatcccagggccggtctaggacacataattgtgtgtgcctaggcattcttcccagtttgttgtggctgccctgcccaagcccacatcacctattagcttcacgtccttctctccgcagccaccaaaaccctcaacaggggcatctctgagttcatcgtgatggctgcagacgccgagccactggagatcattctgcacctgccgctgctgtgtgaagacaagaatgtgccctacgtgtttgtgcgctccaagcaggccctggggagagcctgtggggtctccaggcctgtcatcgcctgttctgtcaccatcaaagaaggctcgcagctgaaacagcagatccaatccattcagcagtccattgaaaggctcttagtctaaacctgtggcctctgccacgtgctccctgccagcttcccccctgaggttgtgtatcatattatctgtgttagcatgtagtattttcagctactctctattgttataaaatgtagtactaaatctggtttctgg

SEQ ID NO: 29602 - protein, 73 aa, Homo sapiens
MAADAEPLEIILHLPLLCEDKNVPYVFVRSKQALGRACGVSRPVIACSVTIKEGSQLKQQIQSIQQSIERLLV

SEQ ID NO: 29603 - DNA, 951 bp, Homo sapiens
gggcatccgtgtccttgcggtgctgggcagcagaccgtccaaaccgacacgcgtggtatcctcgcggtgtccggcaagagactaccaagacagacgctatggcggaagagtgatacaagaggtacttctcatcttctacctggttaccgcctaatacagcatttaggaaaggcacagaagatgattgtttccctttcccagttttcaaaatattgagttgctatcacttgcatagttttgacttttaaaccatgaagatattttacatatttgaaaaataaaatttaaagcaagctgactacaaaataaatctacttgtataccaaattgctaaccacaaggaaaattttaatttgaataacttttgaacaaagtcctgccactggatggctttgataggatatatcctaagaacaaaaataaattttgactttgactgaggctgatgtgaatccaaaggcctatccccttgccgatgcccacctcaccaagaagctactggacctcgttcagcagtcatgtaactataagcagcttcggaaaggagccaatgaggccaccaaaaccctcaacaggggcatctctgagttcatcgtgatggctgcagacgccgagccactggagatcattctgcacctgccgctgctgtgtgaagacaagaatgtgccctacgtgtttgtgcgctccaagcaggccctggggagagcctgtggggtctccaggcctgtcatcgcctgttctgtcaccatcaaagaaggctcgcagctgaaacagcagatccaatccattcagcagtccattgaaaggctcttagtctaaacctgtggcctctgccacgtgctccctgccagcttcccccctgaggttgtgtatcatattatctgtgttagcatgtagtattttcagctactctctattgttataaaatgtagtactaaatctggtttctgg

SEQ ID NO: 29604 - protein, 40 aa, Homo sapiens; identical to SEQ ID NO: 29588

SEQ ID NO: 29605 - DNA, 1123 bp, Homo sapiens
ggaggagatctcccatgggtctgcgcttagtgcccgccgcgagtcacacgcgccagggacctagaggagcctttggcatttgggggctgtggggaacatgaagtgagcgcgactcacggcctggagtgcaggaaaggcttctcctgcaaggcggtggcttcaaaaaccagaagtctggtagcaccacgtgcggcgtctctaaactcttggtcgtctctgacttttaaacatctagggaaagttctaaaacgtgtgtcctggcgtagtagttttggttggcacttggtgaggagggaagaatttgtaaagcactgtaacttctatagttaatccttccagtggagcttggatcccggcggtagcactccccacaaacctcctcccatgcattttgaagcttagtacgtggctgagcctagaacttgaagcttccaaactcagtgctcgctttaacgcagctccctgaaacgttttggaatcggatggtctcaggttgaactttgcagttttcctcaactgtaaaatggggatgacagtgcatgagggtgttgtgaggatcaaatgaaataaagcatggtaaacatctagtcctgatgcttggtacagaactgaggctgatgtgaatccaaaggcctatccccttgccgatgcccacctcaccaagaagctactggacctcgttcagcagtcatgtaactataagcagcttcggaaaggagccaatgaggccaccaaaaccctcaacaggggcatctctgagttcatcgtgatggctgcagacgccgagccactggagatcattctgcacctgccgctgctgtgtgaagacaagaatgtgccctacgtgtttgtgcgctccaagcaggccctggggagagcctgtggggtctccaggcctgtcatcgcctgttctgtcaccatcaaagaaggctcgcagctgaaacagcagatccaatccattcagcagtccattgaaaggctcttagtctaaacctgtggcctctgccacgtgctccctgccagcttcccccctgaggttgtgtatcatattatctgtgttagcatgtagtattttcagctactctctattgttataaaatgtagtactaaatctggtttctgg

SEQ ID NO: 29606 - protein, 40 aa, Homo sapiens; identical to SEQ ID NO: 29588

SEQ ID NO: 29607 - DNA, 836 bp, Homo sapiens
tctgtgagtttttccggtgcacgcgagtgcttctgaaacgtcagctgcgctcccctaggagtgctgagcccgcggaaccgcagccatgttgtcctgggaccaagacaaattcgcctaagataaggagttacgtagaagacagggcgtcctggtgtacgggctggccctggacgtcacttccgctggcggcagtggcgtcacttcctgctcttgggggcggggcatccgtgtccttgcggtgctgggcagcagaccgtccaaaccgacacgcgtggtatcctcgcggtgtccggcaagagactaccaagacagacgctatgactgaggctgatgtgaatccaaaggcctatccccttgccgatgcccacctcaccaagaagctactggacctcgttcagcagtcatgtaactataagcagcttcggaaaggagccaatgaggccaccaaaaccctcaacaggggcatctctgagttcatcgtgatggctgcagacgccgagccactggagatcattctgcacctgccgctgctgtgtgaagacaagaatgtgccctacgtgtttgtgcgctccaagcaggccctggggagagcctgtggggtctccaggcctgtcatcgcctgttctgtcaccatcaaagaaggctcgcagctgaaacagcagatccaatccattcagcagtccattgaaaggctcttagtctaaacctgtggcctctgccacgtgctccctgccagcttcccccctgaggttgtgtatcatattatctgtgttagcatgtagtattttcagctactctctattgttataaaatgtagtactaaatctggtttctgg

SEQ ID NO: 29608 - protein, 128 aa, Homo sapiens; identical to SEQ ID NO: 4073

SEQ ID NO: 29609 - DNA, 997 bp, Homo sapiens
tctcctgcttcagcctcctaagtagctggggttacaggcgcccgccaccacgcctggctaatttttgtattttttagtagggacgaggtttcgccatgttggccaggctggtctcgaactcctgtcctcaggtgatgcgcccgcctcggcctcccaaagtgccgggattacagccataagccgctgcggccggccggtgggttactttttgaatgtttaattcattgtttctgccaataatttgtactaggcagctcataagaacgccaaagtacgttccttcttcgacacagggccagtttccgcgccagtgcccccgtagagggcggggcccactcgctcgcgtagcgtcaccttcgcttcctgccgcgcggggccatttccgctgctgcttctgtgagtttttccggtgcacgcgagtgcttctgaaacgtcagctgcgctcccctaggagtgctgagcccgcggaaccgcagccatgactgaggctgatgtgaatccaaaggcctatccccttgccgatgcccacctcaccaagaagctactggacctcgttcagcagtcatgtaactataagcagcttcggaaaggagccaatgaggccaccaaaaccctcaacaggggcatctctgagttcatcgtgatggctgcagacgccgagccactggagatcattctgcacctgccgctgctgtgtgaagacaagaatgtgccctacgtgtttgtgcgctccaagcaggccctggggagagcctgtggggtctccaggcctgtcatcgcctgttctgtcaccatcaaagaaggctcgcagctgaaacagcagatccaatccattcagcagtccattgaaaggctcttagtctaaacctgtggcctctgccacgtgctccctgccagcttcccccctgaggttgtgtatcatattatctgtgttagcatgtagtattttcagctactctctattgttataaaatgtagtactaaatctggtttctgg

SEQ ID NO: 29610 - protein, 128 aa, Homo sapiens; identical to SEQ ID NO: 4073

SEQ ID NO: 29611 - DNA, 329 bp, Homo sapiens
actacctccctttgtaaaaaaggaaaaaaaaaaagctgtttttcagtagaataattatgtatgcatgatgcttctgcccagaggtgatataggatactctcactttattcattattatttttttaattttattttatttatttatttatttttttatttggagagttttgctcttgttgcccaagccgggaagcggaggttgaagtgagccaagatcgcaccactgcactccagctgtgtgacagagcaagactccatctcaaaaaaaaaaaagaagaagaagaagtggtcagattcaggacgtgttttgaggataagtggtggattta

SEQ ID NO: 29612 - protein, 47 aa, Homo sapiens [sequence omitted]

SEQ ID NO: 29613 - DNA, 856 bp, Homo sapiens
cgcgagtgcttctgaaacgtcagctgcgctcccctaggagtgctgagcccgcggaaccgcagccatggaggagatctcccatgggtctgcgcttagtgcccgccgcgagtcacacgcgccagggacctagaggagcctttggcatttgggggctgtggggaacatgaagtgagcgcgactcacggcctggagtgcaggaaaggcttctcctgcaaggcggtggcttcaaaaaccagaagtctggtagcaccacgtgcggcgtctctaaactcttggtcgtctctgacttttaaacatctagggaaagttctaaaacgtgtgtcctggcgtagtagttttggttggcacttggtgaggagggaagaatttgtaaagcactgtaacttctatagttaatccttccagtggagcttggatcccggcggtagcactccccacaaacctcctcccatgcattttgaagcttagtacgtggctgagcctagaacttgaagcttccaaactcagtgctcgctttaacgcagctccctgaaacgttttggaatcggatggtctcaggttgaactttgcagttttcctcaactgtaaaatggggatgacagtgcatgagggtgttgtgaggatcaaatgaaataaagcatggtaaacatctagtcctgatgcttggtacagagtaagcacgcagtatttgttgttcaatcaaaaccttgcaagttttggctgtctggtgtacagcgaaaccaaactgatcatgctaggtagggatttaggttggctggtggtatgatatcattcgttaatttatttaacccctgaagaaattgaaaggcaaataaatacaccctaagcaagtttc

SEQ ID NO: 29614 - protein, 99 aa, Homo sapiens
CPPRVTRARDLEEPLAFGGCGEHEVSATHGLECRKGFSCKAVASKTRSLVAPRAASLNSWSSLTFKHLGKVLKRVSWRSSFGWHLVRREEFVKHCNFYS

SEQ ID NO: 29615 - DNA, 813 bp, Homo sapiens
gggggcactggcgcggaaactggccctgtgtcgaagaaggaacgtactttggcgttcttatgagctgcctagtacaaattattggcagaaacaatgaattaaacattcaaaaagtaacccaccggccggccgcagcggcttatggctgtaatcccggcactttgggaggccgaggcgggcgcatcacctgaggacaggagttcgagaccagcctggccaacatggcgaaacctcgtccctactaaaaaatacaaaaattagccaggcgtggtggcgggcgcctgtaaccccagctacttaggaggctgaagcaggagaatcgcttgaaccccggaggtggaggctacagtccggcactgttggcaccaggtcaccaggacccgcttcagcacaaggaatgtcatcaaggtgccactgcagaagcgggcagtgccctccatgaggtgcgaaactgtcttcaagctgactcctgaattcttcagtcctggaaagtccaggggcctagattctcaacaatgcgcacaaaggcagagatggggataccggaggagcctccaggaatcatgggcccagaacctgctctctccacagcacccatgtccaggcccaccttcgggtgtccacacccactctgagcccatcttttgtaccacctccatttcaaacacctgtttactgcctcagaacagttcctggaaagcatggcaggtgccttggtgtctccatgatggtcagactcgccctgccttggacatgtgtcaagagatggagcagctgctgcttcactcacaggaaagctgagaggctgcagtt

SEQ ID NO: 29616 - protein, 120 aa, Homo sapiens
MRCETVFKLTPEFFSPGKSRGLDSQQCAQRQRWGYRRSLQESWAQNLLSPQHPCPGPPSGVHTHSEPIFCTTSISNTCLLPQNSSWKAWQVPWCLHDGQTRPALDMCQEMEQLLLHSQES

SEQ ID NO: 29617 - DNA, 1463 bp, Homo sapiens
agaaatcaagcagaccgcaggttatatcaccccatcacacattcagggaacttaatcttttcattccagaggatgggtttgtttaaaacaagttcttcctcctaattacttttgaacaattccccaatactgtccttacctgcaccaagagcatgctaaccaggcctggcaccaggcgggtcctcccaccgccctcactgtcctgcccaaggggacaggcctcaagaagagcaaacgactgctcctggagtccctcatgcggaggaggattgcacacctgaagtggggtcttccccggcggatcctggagtcctatttcctgtttaacttcttaggatcttgctcattgacccttgctggggcgaggctctctggactgaacacaggccaggagctccaagcccagcaggaaaggtattgtgaggcccaaggctccccaccaggccttaagtccccagagaggttccagagggttcagcgcccagacagaaaaagctcgaaacttcctatacaagccagagctctggagaggaacagaccgcacatgtcagagcccattaagcatttccatccagcctgaaaaggccaggagagtcaggccaccagggggcgccagagaaccacaggagatccaggaagcgcttgctaggaccaagctcccagctcccaggacccccaggccggcagcggagtccaggagctggtgtggcccacaaagggtcggagagcctcccagtgagaacagtaggggcaggaaaatgatcaggtcaagggtctcccagctggcagagagggctcccagcagagtgaggacttcattctctagggcagaccacgcccactggaggaaggaatgtacatcctgggaggcctctaagctccccagactcaaatgccagcagctcacatactggagaagaggaagcctggaatctacagggtgcagaggggctgggcagcagccttcctgccattctgcagaacctgtcagcttcaaagggaggctccactctgcggtggcaaagctgggcctgacccttctggccaagatgtcctggtccccacagctcgccaagcgcaagcacttggcccctaacctgagcctgagggaacctgattctactctgcctcccaaagtgggtgatcctcgtgcaggggaggacagcatcggagatcacactgcttcacagagggatcttcagctgcaaggtcactgctgtactggggccacccttcctaagacagagagtccccagggccaggaggcacctgggaacccaaatggggctccacagaatacacgagcctccaaaaagtttagtattatgaagcatctgaatttttttctcttccagaatggctttaaaaagtagactcaggcccagagtcctcaggacatatcagaaaagctttgagagtgtcctgatccctgcaaagcctctaataaattggtcatttgggcc

SEQ ID NO: 29618 - protein, 42 aa, Homo sapiens [sequence omitted]

SEQ ID NO: 29619 - DNA, 673 bp, Homo sapiens
acctgcaccaagagcatgctaaccaggcctggcaccagggtcagagttgaggctggggcatcagccccctttgtgaggtggcctcagtgacaggggtgctatgaggtggcggctatcatactggagaagaggaagcctggaatctacagggtgcagaggggctgggcagcagccttcctgccattctgcagaacctgtcagcttcaaagggaggctccactctgcggtggcaaagctgggcctgacccttctggccaagatgtcctggtccccacagctcgccaagcgcaagcacttggcccctaacctgagcctgagggaacctgattctactctgcctcccaaagtgggtgatcctcgtgcaggggaggacagcatcggagatcacactgcttcacagagggatcttcagctgcaaggtcactgctgtactggggccacccttcctaagacagagagtccccagggccaggaggcacctgggaacccaaatggggctccacagaatacacgagcctccaaaaagtttagtattatgaagcatctgaatttttttctcttccagaatggctttaaaaagtagactcaggcccagagtcctcaggacatatcagaaaagctttgagagtgtcctgatccctgcaaagcctctaataaattggtcatttgggcc

SEQ ID NO: 29620 - protein, 160 aa, Homo sapiens
MRWRLSYWRRGSLESTGCRGAGQQPSCHSAEPVSFKGRLHSAVAKLGLTLLAKMSWSPQLAKRKHLAPNLSLREPDSTLPPKVGDPRAGEDSIGDHTASQRDLQLQGHCCTGATLPKTESPQGQEAPGNPNGAPQNTRASKKFSIMKHLNFFLFQNGFKK

SEQ ID NO: 29621 - DNA, 4976 bp, Homo sapiens
ggctatcctactgcagctggctgcatcagatgtgccaggcctgccctctagctcccaacaccatctgcctgatctaagctttgccatgttgttgtcactgctgggtgcctgtgctgtggtggggccattccatggccctgagtgggagccagtgcagggcctgctctcccagaatcacagctgcagggaccctcagtgctgtggcaacctgcttgtcctctgcctctttctggtctggcaggtccggcactgttggcaccaggtcaccaggacccgcttcagcacaaggaatgtcatcaaggtgccactgcagaagcgggcagtgccctccatgaggtgcgaaactgtcttcaagctgactcctgaattcttcagtcctggaaagtccaggggcctagattctcaacaatgcgcacaaaggcagagatggggataccggaggagcctccaggaatcatgggcccagaacctgctctctccacagcacccatgtccaggcccaccttcgggtgtccacacccactctgagcccatcttttgtaccacctccatttcaaacacctgtttactgcctcagaacagttcctggaaagcatggcaggtgccttggtgtctccatgatggtcagactcgccctgccttggacatgtgtcaagagatggagcagctgctgcttcactcacaggaaaggttggtgtcactggagcctgtcatcagtgtgaggtctcgccccacctccatgaccttaaccacctctcttccaaacttactttcagctgagaggctgcagttctgcccccagagagctcctgcctgatccttcccaccaaacactgagaatgtgcacttggaagtcttggcactgtcgaccagaggcctgggaaccagggggtaaaaaccagaaagcaggcagagaggatagtagagagacccaggctccaaggtgggtgaaccagacagggagcagacgggaggatgcttcagaaatccaggcatctggggagtagttcccagtagactttggaatggagggtgatgcagagactaacgtgttggagtgtgcaaaccagagactagtaataagtgaaactgatggcgagatcttgacaccagggtgggacacccaggaccggatgggagttgagagtagaaccaacattcaggaactagggaatagaaaccagagggaggctggaggtgagaatctccctgaaacccaggcacatatgggagagaaccaagaacagttaagatgtaaaattgatgcagagacccaaacacctgagtgggagaaccaggataagaatggaagtgaggatgctgtggagacccagacatttgagaagaaggacaagaaagaggctggagaggaggatggggaagagatccaggctcaaggattggggaagcaaggccagactggagatgagaatggtgaggagacccagacaccacagtgggagaaacaagatcagatgaaaggtgatgcggatgtggaaattcagatggaagaggggagaaacaaggatcaggttggaggtcaggatgctgcacaaacccaatcatgtgggagggagaacgtgggagaagtaaaaaaagagaatagtgtagagacccaggccttggattggggaaaacaggaatgtgttggaaatgggaatgttacagagatccagacaccaaggtgggagaagcatgatcaaggtggaagtaagaaagctaagaagacccaagcatctgggggagagaaccagaaacaattaagtcatgaaattcaagtggggtggggaaataagggcctgagaagagatgaagatgctaaggaaacccagatagctaccaagaagaagctcagggagataagagaaggattgggtggtgatccaggcactatggtggggaaaccggagacaagtagcaagtgaaatttatagagaatttgagatactatgttgggagaatcagaactggattggaggtgaacatagagcagaaattcaggcatcagagaagagagaccaaagaaaggatggatgtgaggatggcacaaatatcctggcacccgaggctgagatccaggaacaattaaaaggtgaaactgatgtggagactcagagcaatgagccacttagagaagaggatggtacagacattcagtcactagggaggagagaggttaaaggtgaggatgataaagacacccaggaacttgggaggaaaaatcagggtcagttaggaaatgaatttagtggaaagattcacataccaaaggggaagaatcaggaacatattagaggcgaagatggtgcacatacccagatatctgagtcagggaactggggcaaattaacaagtcaaattgatggagaaatgcattcagcagaatggaagaaagatcagcagattggaggtgagaatggggcagaaattcagatacaagggaagagaaacctgagagaagttggaggtgaggacggtgtaaagacctgggcacctgggaaagaaacccagagtcagtttagaagtgatcttggtagaaagatccttttatcagagtggaagagccagaagcagatgggaagtgagaatggaacagaaattcaggctccagtggagagaaaccagagagaacctggaggtgaggacggtgtaaagactcagagacctaagagagagaacgaggaccagttagatagtgaaattggagggagccattcaccagggaggaggaactgggagctgattggaaaggatgttgcagaaaatcaggcatcagagaagagaaaccagagagaggttggaaacgaggacggtagaatgatctggaggcttaggggaaaaaactggaggcttagagcgaagaaacagactgttaaaaagtaaagataatggaaagacccgtttatcagagtggaagaaccaggaacagggtggaggtgggaatgatgaagaaattcaaatacaggggaagagaaacctgagagggaccacagctgatgatggtacagagacccaggctcctgcaggagatgaccagggacagttaagagttgaaattgctgaagagatccaggtacaagggcaaggaaataagaatgacggtggagttgaggatgttgcagaactccaggatataggaagccagagaaagtgcacagatgaggatgttggagagcctcgagcaccaaggggaggaaacaaggatctggtcagaggagaggatgctgtgagggacagtctccaagtcgactgttctgggagtgagaggcccacaggcaggaagcacagcctaccatggcctccagccttcactggctatggatgtgggacccgggaacaggaacaggcagtggctgtgaatggtttcatctctgccccctgtcctgagatgaatcctgtcccccactggggtgaagtcttcctgctggtgggtggggagggagagcatctggccagccagggcacaacccctgccagggatcatagagtggggatcagtccagcctcccagcaggcccaacctgaatcctggagaagacgacaaagggacaaaggggtggatccagagaaggcccccagcctgactcggcagtcccaaaaccctccgtctctgacagctcccttgggcatgccctctgcctgctcctgtctcccgtgtggcccagccccggaagctgccatcattctagcgggtcctcccaccgccctcactgtcctgcccaaggggacaggcctcaagaagagcaaacgactgctcctggagtccctcatgcggaggaggattgcacacctgaagtggggtcttccccggcggatcctggagtcctatttcctgtttaacttcttaggatcttgctcattgacccttgctggggcgaggctctctggactgaacacaggccaggagctccaagcccagcaggaaaggtattgtgaggcccaaggctccccaccaggccttaagtccccagagaggttccagagggttcagcgcccagacagaaaaagctcgaaacttcctatacaagccagagctctggagaggaacagaccgcacatgtcagagcccattaagcatttccatccagcctgaaaaggccaggagagtcaggccaccagggggcgccagagaaccacaggagatccaggaagcgcttgctaggaccaagctcccagctcccaggacccccaggccggcagcggagtccaggagctggtgtggcccacaaagggtcggagagcctcccagtgagaacagtaggggcaggaaaatgatcaggtcaagggtctcccagctggcagagagggctcccagcagagtgaggacttcattctctagggcagaccacgcccactggaggaaggaatgtacatcctgggaggcctctaagctccccagactcaaatgccagcagctcacatactggagaagaggaagcctggaatctacagggtgcagaggggctgggcagcagccttcctgccattctgcagaacctgtcagcttcaaagggaggctccactctgcggtggcaaagctgggcctgacccttctggccaagatgtcctggtccccacagctcgccaagcgcaagcacttggcccctaacctgagcctgagggaacctgattctactctgcctcccaaagtgggtgatcctcgtgcaggggaggacagcatcggagatcacactgcttcacagagggatcttcagctgcaaggtcactgctgtactggggccacccttcctaagacagagagtccccagggccaggaggcacctgggaacccaaatggggctccacagaatacacgagcctccaaaaagtttagtattatgaagcatctgaatttttttctcttccagaatggctttaaaaagtagactcaggcccagagtcctcaggacatatcagaaaagctttgagagtgtcctgatccctgcaaagcctctaataaattggtcatttgggcc

SEQ ID NO: 29622 - protein, 243 aa, Homo sapiens
MLLSLLGACAVVGPFHGPEWEPVQGLLSQNHSCRDPQCCGNLLVLCLFLVWQVRHCWHQVTRTRFSTRNVIKVPLQKRAVPSMRCETVFKLTPEFFSPGKSRGLDSQQCAQRQRWGYRRSLQESWAQNLLSPQHPCPGPPSGVHTHSEPIFCTTSISNTCLLPQNSSWKAWQVPWCLHDGQTRPALDMCQEMEQLLLHSQERLVSLEPVISVRSRPTSMTLTTSLPNLLSAERLQFCPQRAPA

SEQ ID NO: 29623 - DNA, 2113 bp, Homo sapiens
aatgcgcacaaaggcagagatggggataccggaggagcctccaggaatcatgggcccagaacctgctctctccacagcacccatgtccaggcccaccttcgggtgtccacacccactctgagcccatcttttgtaccacctccatttcaaacacctgtttactgcctcagaacagttcctggaaagcatggcaggtgccttggtgtctccatgatggtcagactcgccctgccttggacatgtgtcaagagatggagcagctgctgcttcactcacaggaaaggttggtgtcactggagcctgtcatcagtgtgaggtctcgccccacctccatgaccttaaccacctctcttccaaacttactttcagctgagaggctgcagttctgcccccagagagctcctgcctgatccttcccaccaaacactgagaatgtgcacttggaagtcttggcactgtcgaccagaggcctgggaaccagggggtaaaaaccagaaagcaggcagagaggatagtagagagacccaggctccaaggtgggtgaaccagacagggagcagacgggaggatgcttcagaaatccaggcatctggggagtagttcccagtagactttggaatggagggtgatgcagagactaacgtgttggagtgtgcaaaccagagactagtaataagtgaaactgatggcgagatcttgacaccagggtgggacacccaggaccggatgggagttgagagtagaaccaacattcaggaactagggaatagaaaccagagggaggctggaggtgagaatctccctgaaacccaggcacatatgggagagaaccaagaacagttaagatgtaaaattgatgcagagacccaaacacctgagtgggagaaccaggataagaatggaagtgaggatgctgtggagacccagacatttgagaagaaggacaagaaagaggctggatcctatttcctgtttaacttcttaggatcttgctcattgacccttgctggggcgaggctctctggactgaacacaggccaggagctccaagcccagcaggaaaggtattgtgaggcccaaggctccccaccaggccttaagtccccagagaggttccagagggttcagcgcccagacagaaaaagctcgaaacttcctatacaagccagagctctggagaggaacagaccgcacatgtcagagcccattaagcatttccatccagcctgaaaaggccaggagagtcaggccaccagggggcgccagagaaccacaggagatccaggaagcgcttgctaggaccaagctcccagctcccaggacccccaggccggcagcggagtccaggagctggtgtggcccacaaagggtcggagagcctcccagtgagaacagtaggggcaggaaaatgatcaggtcaagggtctcccagctggcagagagggctcccagcagagtgaggacttcattctctagggcagaccacgcccactggaggaaggaatgtacatcctgggaggcctctaagctccccagactcaaatgccagcagctcacatactggagaagaggaagcctggaatctacagggtgcagaggggctgggcagcagccttcctgccattctgcagaacctgtcagcttcaaagggaggctccactctgcggtggcaaagctgggcctgacccttctggccaagatgtcctggtccccacagctcgccaagcgcaagcacttggcccctaacctgagcctgagggaacctgattctactctgcctcccaaagtgggtgatcctcgtgcaggggaggacagcatcggagatcacactgcttcacagagggatcttcagctgcaaggtcactgctgtactggggccacccttcctaagacagagagtccccagggccaggaggcacctgggaacccaaatggggctccacagaatacacgagcctccaaaaagtttagtattatgaagcatctgaatttttttctcttccagaatggctttaaaaagtagactcaggcccagagtcctcaggacatatcagaaaagctttgagagtgtcctgatccctgcaaagcctctaataaattggtcatttgggcc

SEQ ID NO: 29624 - protein, 203 aa, Homo sapiens
MEGDAETNVLECANQRLVISETDGEILTPGWDTQDRMGVESRTNIQELGNRNQREAGGENLPETQAHMGENQEQLRCKIDAETQTPEWENQDKNGSEDAVETQTFEKKDKKEAGSYFLFNFLGSCSLTLAGARLSGLNTGQELQAQQERYCEAQGSPPGLKSPERFQRVQRPDRKSSKLPIQARALERNRPHMSEPIKHFHPA

SEQ ID NO: 29625 - DNA, 1024 bp, Homo sapiens
ggacatgtgtcaagagatggagcagctgctgcttcactcacaggaaaggttggtgtcactggagcctgtcatcagtgtgaggtctcgccccacctccatgaccttaaccacctctcttccaaacttactttcagctgagaggctgcagttctgcccccagagagctcctgcctgatccttcccaccaaacactgagaatgtgcacttggaagtcttggcactgtcgaccagaggcctgggaaccagggggtaaaaaccagaaagcaggcagagaggatagtagagagacccaggctccaaggtgggtgaaccagacagggagcagacgggaggatgcttcagaaatccaggcatctggggagtagttcccagtagactttggaatggagggtgatgcagagactaacgtgttggagtgtgcaaaccagagactagtaataagtgaaactgatggcgagatcttgacaccagggtgggacacccaggaccggatgggagttgagagtagaaccaacattcaggaactagggaatagaaaccagagggaggctggaggtgagaatctccctgaaacccaggcacatatgggagagaaccaagaacagttaagatgtaaaattgatgcacagctcgccaagcgcaagcacttggcccctaacctgagcctgagggaacctgattctactctgcctcccaaagtgggtgatcctcgtgcaggggaggacagcatcggagatcacactgcttcacagagggatcttcagctgcaaggtcactgctgtactggggccacccttcctaagacagagagtccccagggccaggaggcacctgggaacccaaatggggctccacagaatacacgagcctccaaaaagtttagtattatgaagcatctgaatttttttctcttccagaatggctttaaaaagtagactcaggcccagagtcctcaggacatatcagaaaagctttgagagtgtcctgatccctgcaaagcctctaataaattggtcatttgggc

SEQ ID NO: 29626 - protein, 183 aa, Homo sapiens
MEGDAETNVLECANQRLVISETDGEILTPGWDTQDRMGVESRTNIQELGNRNQREAGGENLPETQAHMGENQEQLRCKIDAQLAKRKHLAPNLSLREPDSTLPPKVGDPRAGEDSIGDHTASQRDLQLQGHCCTGATLPKTESPQGQEAPGNPNGAPQNTRASKKFSIMKHLNFFLFQNGFKK

SEQ ID NO: 29627 - DNA, 977 bp, Homo sapiens
ggagaatcagaactggattggaggtgaacatagagcagaaattcaggcatcagagaagagagaccaaagaaaggatggatgtgaggatggcacaaatatcctggcacccgaggctgagatccaggaacaattaaaaggtgaaactgatgtggagactcagagcaatgagccacttagagaagaggatggtacagacattcagtcactagggaggagagaggttaaaggtgaggatgataaagacacccaggaacttgggaggaaaaatcagggtcagttaggaaatgaatttagtggaaagattcacataccaaaggggaagaatcaggaacatattagaggcgaagatggtgcacatacccagatatctgagtcagggaactggggcaaattaacaagtcaaattgatggagaaatgcattcagcagaatggaagaaagatcagcagattggaggtgagaatggggcagaaattcagatacaagggaagagaaacctgagagaagttggaggtgaggacggtgtaaagacctgggcacctgggaaagaaacccagagtcagtttagaagtgatcttggtagaaagatccttttatcagagtggaagagccagaagcagatgggaagtgagaatggaacagaaattcaggctccagtggagagaaaccagagagaacctggaggtgaggacggtgtaaagactcagagacctaagagagagaacgaggaccagttagatagtgaaattggagggagccattcaccagggaggaggaactgggagctgattggaaaggatgttgcagaaaatcaggcatcagagaagagaaaccagagagaggttggaaacgaggacggtagaatgatctggaggcttaggggaaaaaactggaggcttagagcgaagaaacagatgtcctgcccaaggggacaggcctcaagaagagcaaacgactgctcctggagtccctcatgcg

SEQ ID NO: 29628 - protein, 186 aa, Homo sapiens
MHSAEWKKDQQIGGENGAEIQIQGKRNLREVGGEDGVKTWAPGKETQSQFRSDLGRKILLSEWKSQKQMGSENGTEIQAPVERNQREPGGEDGVKTQRPKRENEDQLDSEIGGSHSPGRRNWELIGKDVAENQASEKRNQREVGNEDGRMIWRLRGKNWRLRAKKQMSCPRGQASRRANDCSWSPS

SEQ ID NO: 29629 - DNA, 2362 bp, Homo sapiens
agagaaacctgagagaagttggaggtgaggacggtgtaaagactcagagacctaagagagagaacgaggaccagttagatagtgaaattggagggagccattcaccagggaggaggaactgggagctgattggaaaggatgttgcagaaaatcaggcatcagagaagagaaaccagagagaggttggaaacgaggacggtagaatgatctggaggcttaggggaaaaaactggaggcttagagcgaagaaacagactgttaaaaagtaaagataatggaaagacccgtttatcagagtggaagaaccaggaacagggtggaggtgggaatgatgaagaaattcaaatacaggggaagagaaacctgagagggaccacagctgatgatggtacagagacccaggctcctgcaggagatgaccagggacagttaagagttgaaattgctgaagagatccaggtacaagggcaaggaaataagaatgacggtggagttgaggatgttgcagaactccaggatataggaagccagagaaagtgcacagatgaggatgttggagagcctcgagcaccaaggggaggaaacaaggatctggtcagaggagaggatgctgtgagggacagtctccaagtcgactgttctgggagtgagaggcccacaggcaggaagcacagcctaccatggcctccagccttcactggctatggatgtgggacccgggaacaggaacaggcagtggctgtgaatggtttcatctctgccccctgtcctgagatgaatcctgtcccccactggggtgaagtcttcctgctggtgggtggggagggagagcatctggccagccagggcacaacccctgccagggatcatagagtggggatcagtccagcctcccagcaggcccaacctgaatcctggagaagacgacaaagggacaaaggggtggatccagagaaggcccccagcctgactcggcagtcccaaaaccctccgtctctgacagctcccttgggcatgccctctgcctgctcctgtctcccgtgtggcccagccccggaagctgccatcattctagcgggtcctcccaccgccctcactgtcctgcccaaggggacaggcctcaagaagagcaaacgactgctcctggagtccctcatgcggaggaggattgcacacctgaagtggggtcttccccggcggatcctggagtcctatttcctgtttaacttcttaggatcttgctcattgacccttgctggggcgaggctctctggactgaacacaggccaggagctccaagcccagcaggaaaggtattgtgaggcccaaggctccccaccaggccttaagtccccagagaggttccagagggttcagcgcccagacagaaaaagctcgaaacttcctatacaagccagagctctggagaggaacagaccgcacatgtcagagcccattaagcatttccatccagcctgaaaaggccaggagagtcaggccaccagggggcgccagagaaccacaggagatccaggaagcgcttgctaggaccaagctcccagctcccaggacccccaggccggcagcggagtccaggagctggtgtggcccacaaagggtcggagagcctcccagtgagaacagtaggggcaggaaaatgatcaggtcaagggtctcccagctggcagagagggctcccagcagagtgaggacttcattctctagggcagaccacgcccactggaggaaggaatgtacatcctgggaggcctctaagctccccagactcaaatgccagcagctcacatactggagaagaggaagcctggaatctacagggtgcagaggggctgggcagcagccttcctgccattctgcagaacctgtcagcttcaaagggaggctccactctgcggtggcaaagctgggcctgacccttctggccaagatgtcctggtccccacagctcgccaagcgcaagcacttggcccctaacctgagcctgagggaacctgattctactctgcctcccaaagtgggtgatcctcgtgcaggggaggacagcatcggagatcacactgcttcacagagggatcttcagctgcaaggtcactgctgtactggggccacccttcctaagacagagagtccccagggccaggaggcacctgggaacccaaatggggctccacagaatacacgagcctccaaaaagtttagtattatgaagcatctgaatttttttctcttccagaatggctttaaaaagtagactcaggcccagagtcctcaggacatatcagaaaagctttgagagtgtcctgatccctgcaaagcctctaataaattggtcatttgggcc

SEQ ID NO: 29630 - protein, 234 aa, Homo sapiens; identical to SEQ ID NO: 4077

SEQ ID NO: 29631 - DNA, 1337 bp, Homo sapiens
agggatcatagagtggggatcagtccagcctcccagcaggcccaacctgaatcctggagaagacgacaaagggacaaaggggtggatccagagaaggcccccagcctgactcggcagtcccaaaaccctccgtctctgacagctcccttgggcatgccctctgcctgctcctgtctcccgtgtggcccagccccggaagctgccatcattctagcgggtcctcccaccgccctcactgtcctgcccaaggggacaggcctcaagaagagcaaacgactgctcctggagtccctcatgcggaggaggattgcacacctgaagtggggtcttccccggcggatcctggagtcctatttcctgtttaacttcttaggatcttgctcattgacccttgctggggcgaggctctctggactgaacacaggccaggagctccaagcccagcaggaaaggtattgtgaggcccaaggctccccaccaggccttaagtccccagagaggttccagagggttcagcgcccagacagaaaaagctcgaaacttcctatacaagccagagctctggagaggaacagaccgcacatgtcagagcccattaagcatttccatccagcctgaaaaggccaggagagtcaggccaccagggggcgccagagaaccacaggagatccaggaagcgcttgctaggaccaagctcccagctcccaggacccccaggccggcagcggagtccaggagctggtgtggcccacaaagggtcggagagcctcccagtgagaacagtaggggcaggaaaatgatcaggtcaagggtctcccagctggcagagagggctcccagcagagtgaggacttcattctctagggcagaccacgcccactggaggaaggaatgtacatcctgggaggcctctaagctccccagactcaaatgccagcagagctcgccaagcgcaagcacttggcccctaacctgagcctgagggaacctgattctactctgcctcccaaagtgggtgatcctcgtgcaggggaggacagcatcggagatcacactgcttcacagagggatcttcagctgcaaggtcactgctgtactggggccacccttcctaagacagagagtccccagggccaggaggcacctgggaacccaaatggggctccacagaatacacgagcctccaaaaagtttagtattatgaagcatctgaatttttttctcttccagaatggctttaaaaagtagactcaggcccagagtcctcaggacatatcagaaaagctttgagagtgtcctgatccctgcaaagcctctaataaattggtcatttgggc

SEQ ID NO: 29632 - protein, 105 aa, Homo sapiens
MPAELAKRKHLAPNLSLREPDSTLPPKVGDPRAGEDSIGDHTASQRDLQLQGHCCTGATLPKTESPQGQEAPGNPNGAPQNTRASKKFSIMKHLNFFLFQNGFKK

SEQ ID NO: 29633 - DNA, 1441 bp, Homo sapiens
gcgggaaagagtgccgcctcagctgagggcaagcgaggagatggctgtgaggcaggcggcgacggcgggcactcccgggcccaggagagaggaagaggcggcgcttctattcgagagggcccattaccggcacgacccgcgctggctgctgcccgtgaccccccgcctgtgcctggcctgcgcgctggagctgctgccggaccccggcgtgtcgttagtgcgcaagaagcacatgttgtcctgcttccaagatgcccttgtgaggcatacctccctggtcacgcaactggtgtctcaggatcagagagtctgcatccacttcataagtgtgctttttggactattatgcagcatggaagatgggagtgtgacagacctctgtattgaagtccttattcagatcacaacgcagctgaagctggagcagactatccgttgcctgctggatgagtgccacaaagagctgtgtaacatgccctccatgcgaggcagcctggccaccctgacccttcttggcaagttggtggatgccatccctgctctggcagacgagcttgtaatggagcatggcaacctgatggagcatctgttgagaggcttagtataccccagtgagggcatacaagcttctgtctgttacctttatgggaagctatactcctcaccagtggcagctgagatgctttcaggacacttccgtgagaagctttttcccctcttcctttccatcctggatggtgcccagacaaaggagctgcagattaactgcttgggtttgctgaggcagctgttgaagtatgatctctttgtgtccatgatcatgaaccaggatggactgggagaaagtgctaagaatatcgaagggtcatcaggaaatacctcactgcctttggtgctcaaaaagcttctcctctctagagatgaaaccctgcaggtggccagtgctcactgtataactgcggtgcttgtccactccccagcaaagcatgcgtcagccttcatccacgctgacatcccagagttcctctttgagcatctttcttcttccagtgaagtgctcgtctggtccagctgtaactgcttgacactcctggtagaagagccactctttttttccaagtgccacacggtgtatgggatcgaggcagtggtgaggagcctgcagggaagcctgaagatgaacaacatagagctgcacaagcagggcctgctgcttttcgctgaaatcctgacccggcagccagaggagatcaagctgttcacaagctcagccatgtgcagagatgctggccgtgccctccaagaagcagttagcagccctgtgctggaggtggctgctgaggccttgaaggccacttctgcttttctgaggtaaagtgaaaagatggaactggtccctttcctcttggaaactcacaattaaactagtcaatgactgttg

SEQ ID NO: 29634 - protein, 444 aa, Homo sapiens
MAVRQAATAGTPGPRREEEAALLFERAHYRHDPRWLLPVTPRLCLACALELLPDPGVSLVRKKHMLSCFQDALVRHTSLVTQLVSQDQRVCIHFISVLFGLLCSMEDGSVTDLCIEVLIQITTQLKLEQTIRCLLDECHKELCNMPSMRGSLATLTLLGKLVDAIPALADELVMEHGNLMEHLLRGLVYPSEGIQASVCYLYGKLYSSPVAAEMLSGHFREKLFPLFLSILDGAQTKELQINCLGLLRQLLKYDLFVSMIMNQDGLGESAKNIEGSSGNTSLPLVLKKLLLSRDETLQVASAHCITAVLVHSPAKHASAFIHADIPEFLFEHLSSSSEVLVWSSCNCLTLLVEEPLFFSKCHTVYGIEAVVRSLQGSLKMNNIELHKQGLLLFAEILTRQPEEIKLFTSSAMCRDAGRALQEAVSSPVLEVAAEALKATSAFLR

SEQ ID NO: 29635 - DNA, 1899 bp, Homo sapiens
gcgggaaagagtgccgcctcagctgagggcaagcgaggagatggctgtgaggcaggcggcgacggcgggcactcccgggcccaggagagaggaagaggcggcgcttctattcgagagggcccattaccggcacgacccgcgctggctgctgcccgtgaccccccgcctgtgcctggcctgcgcgctggagctgctgccggaccccggcgtgtcgttagtgcgcaagaagcacatgttgtcctgcttccaagatgcccttgtgaggcatacctccctggtcacgcaactggtgtctcaggatcagagagtctgcatccacttcataagtgtgctttttggactattatgcagcatggaagatgggagtgtgacagacctctgtattgaagtccttattcagatcacaacgcagctgaagctggagcagactatccgttgcctgctggatgagtgccacaaagagctgtgtaacatgccctccatgcgaggcagcctggccaccctgacccttcttggcaagttggtggatgccatccctgctctggcagacgagcttgtaatggagcatggcaacctgatggagcatctgttgagaggcttagtataccccagtgagggcatacaagcttctgtctgttacctttatgggaagctatactcctcaccagtggcagctgagatgctttcaggacacttccgtgagaagctttttcccctcttcctttccatcctggatggtgcccagacaaaggagctgcagattaactgcttgggtttgctgaggcagctgttgaagtatgatctctttgtgtccatgatcatgaaccaggatggactgggagaaagtgctaagaatatcgaagggtcatcaggaaatacctcactgcctttggtgctcaaaaagcttctcctctctagagatgaaaccctgcaggtggccagtgctcactgtataactgcggtgcttgtccactccccagcaaagcatgcgtcagccttcatccacgctgacatcccagagttcctctttgagcatctttcttcttccagtgaagtgctcgtctggtccagctgtaactgcttgacactcctggtagaagagccactctttttttccaagtgccacacggtgtatgggatcgaggcagtggtgaggagcctgcagggaagcctgaagatgaacaacatagagctgcacaagcagggcctgctgcttttcgctgaaatcctgacccggcagccagaggagatcaagctgttcacaagctcagccatgtgcagagatgctggccgtgccctccaagaagcagttagcagccctgtgctggaggtggctgctgaggccttgaaggccacttctgcttttctgaggaaggaccatcagagcactccacctgtgcagtatggggaactgcaggctttgctagaagccatgctaaaccgatgtgcggagttttcccagaccttgctgagcaggaggcccctgggccatgcctccagtagagattcagagaaggccattcttcaaaggggaaagttcctcctcagcactctggagggatttagaagtgcctgcaggttggctatagaattccagagtgagccttcagcccaggagaatccattcacagctcccagcgccaagaaggaagacaccttggaggccttctcagaatttcttctcagtgcctgtgactcgctgtgtatccccatggtgatggtgggttctcctgagccacgggcaacatgaagcttggggaagagaagaatgtgcaggcgagccaggctcagaggcataaggcagtgactgctcaaaggaactctctgggggcctcagcagtgcaattcttgctgctacctttcctttgttctaaaaataaaatgtagtgtttgattatg

SEQ ID NO: 29636 - protein, 569 aa, Homo sapiens
MAVRQAATAGTPGPRREEEAALLFERAHYRHDPRWLLPVTPRLCLACALELLPDPGVSLVRKKHMLSCFQDALVRHTSLVTQLVSQDQRVCIHFISVLFGLLCSMEDGSVTDLCIEVLIQITTQLKLEQTIRCLLDECHKELCNMPSMRGSLATLTLLGKLVDAIPALADELVMEHGNLMEHLLRGLVYPSEGIQASVCYLYGKLYSSPVAAEMLSGHFREKLFPLFLSILDGAQTKELQINCLGLLRQLLKYDLFVSMIMNQDGLGESAKNIEGSSGNTSLPLVLKKLLLSRDETLQVASAHCITAVLVHSPAKHASAFIHADIPEFLFEHLSSSSEVLVWSSCNCLTLLVEEPLFFSKCHTVYGIEAVVRSLQGSLKMNNIELHKQGLLLFAEILTRQPEEIKLFTSSAMCRDAGRALQEAVSSPVLEVAAEALKATSAFLRKDHQSTPPVQYGELQALLEAMLNRCAEFSQTLLSRRPLGHASSRDSEKAILQRGKFLLSTLEGFRSACRLAIEFQSEPSAQENPFTAPSAKKEDTLEAFSEFLLSACDSLCIPMVMVGSPEPRAT

SEQ ID NO: 29637 - DNA, 1962 bp, Homo sapiens
gcgggaaagagtgccgcctcagctgagggcaagcgaggagatggctgtgaggcaggcggcgacggcgggcactcccgggcccaggagagaggaagaggcggcgcttctattcgagagggcccattaccggcacgacccgcgctggctgctgcccgtgaccccccgcctgtgcctggcctgcgcgctggagctgctgccggaccccggcgtgtcgttagtgcgcaagaagcacatgttgtcctgcttccaagatgcccttgtgaggcatacctccctggtcacgcaactggtgtctcaggatcagagagtctgcatccacttcataagtgtgctttttggactattatgcagcatggaagatgggagtgtgacagacctctgtattgaagtccttattcagatcacaacgcagctgaagctggagcagactatccgttgcctgctggatgagtgccacaaagagctgtgtaacatgccctccatgcgaggcagcctggccaccctgacccttcttggcaagttggtggatgccatccctgctctggcagacgagcttgtaatggagcatggcaacctgatggagcatctgttgagaggcttagtataccccagtgagggcatacaagcttctgtctgttacctttatgggaagctatactcctcaccagtggcagctgagatgctttcaggacacttccgtgagaagctttttcccctcttcctttccatcctggatggtgcccagacaaaggagctgcagattaactgcttgggtttgctgaggcagctgttgaagtatgatctctttgtgtccatgatcatgaaccaggatggactgggagaaagtgctaagaatatcgaagggtcatcaggaaatacctcactgcctttggtgctcaaaaagcttctcctctctagagatgaaaccctgcaggtggccagtgctcactgtataactgcggtgcttgtccactccccagcaaagcatgcgtcagccttcatccacgctgacatcccagagttcctctttgagcatctttcttcttccagtgaagtgctcgtctggtccagctgtaactgcttgacactcctggtagaagagccactctttttttccaagtgccacacggtgtatgggatcgaggcagtggtgaggagcctgcagggaagcctgaagatgaacaacatagagctgcacaagcagggcctgctgcttttcgctgaaatcctgacccggcagccagaggagatcaagctgttcacaagctcagccatgtgcagagatgctggccgtgccctccaagaagcagttagcagccctgtgctggaggtggctgctgaggccttgaaggccacttctgcttttctgaggaaggaccatcagagcactccacctgtgcagtatggggaactgcaggctttgctagaagccatgctaaaccgatgtgcggagttttcccagaccttgctgagcaggaggcccctgggccatgcctccagtagagattcagagaaggccattcttcaaaggggaaagttcctcctcagcactctggagggatttagaagtgcctgcaggttggctatagaattccagagtgagccttcagcccaggagaatccattcacagctcccagcgccaagaaggaagacaccttggaggccttctcagaatttcttctcagtgcctgtgactcgctgtgtatccccatggtgatggtgggttctcctgagccacgggcaacatgaagcttggggaagagaagaatgtgcaggcgagccaggctcagaggcataaggcagtgactgctcaaaggaactctctgggggcctcagcagtgcaattcttgctgctacctttcctttgttctaaaaataaaatgtagtgtttgattatgaaactaacaggttcatcttaagaaaaaatagaaagcagtaataataaaataataagtgggtaa

SEQ ID NO: 29638 - protein, 569 aa, Homo sapiens; identical to SEQ ID NO: 29636

SEQ ID NO: 29639 - DNA, 6712 bp, Homo sapiens
aagagaggataagttgtgggtgcacatttactaattcattcagaatctgtatctattctttgtccagtgatgagtgaaaggaagtgtcaggcaccccatatttacttttcatagccaccttaagacctcctctgccacggccatggctagaatttcactagcctctggcacaaagcagtggtgcccaggcatatggcagggataatgctctcccagccaaagtagcaatgtcatctcttctattctttcttcttctccctctaagtcactcagccctaaaccaggtgtgttccaatttcctctactatatgtgcctcaaccttctctcagctccagagaagacaggaccaccttccaaagaaggtaagatgctacaatttgaccactcatgtggcctgtgctggtctttagagtctgggtgccttgctgattgactagatagtgagttagtacagccacgagatttctttgcctgaggctgcccagaggaatcggagtgatgcaattataggttgattcctagggatatgaagtaatagaactggaaaatgatggaacccaaggctcctggcaccttagagttgagaaggatcctaatgttcatcaagtccagttccttcttcctgacagtctcctctgcaacatccccataccataggcctcaggagtccagtgttcactatagcattaatagtgtgttctatttcttcattcattcaagtagtgtttcttttttctttttctttttctttttgtttttcttttattttaagacagtctcgctctgttgcccaggctggagtgcagtggcatgatctcagctcactgcaacctctgccttccaggttcaagtgagtctcctgcctcagcctcccaagtagctgggattacaggctcctgccaccacgcctggctaatttttgcatttttagtagagacgggccttcaccatgttggccatgctggtttcaaactcctgacctcaggtaatctgcctcggcctcccaaagtgctgagattacagatgtgagctaccgtgcccagccaagaggtgtttcttgagcacctgttgtgtgtcagactccattccaggtgctggtgaaagagccagggatacaaagccctgctgtcataaattgaaacaggcaggcaataagcaaatgcatactatgtcagagatccataggcactatgaagaaaataaaactgggcaaaaggatagagagtgatagaaggaggagagagacatgttagatagggtggtcagggaaggcctccatgtggaagtggtatgtgagcagaggtctgagtcaagtaaaggaaagccatgcagaatctaggcaggaggaacagcagctgcagggctgagagctggaagtttttcctcttgttgaacattcattgagcttctgctacctgccaggggaggcctaggtactgctgtggatagagcgattataacagtatgttatttgccctgaggggttcctctatcttagacctgtctcctgatataatagaaaacagtttaataattgtttcatcattcattcaacaaatatacctctgtgggtaagacctagttctggctcttttcccccttattatatttgtgaagattctgtgtcctctcccccactctctacacctgctgctctcttttatctttcccagacatcatgctgagagggagcaaagcccaggtgagcatttttattgcttccaacatagcttggctactggttctctcactatgctggctactcctttctgcaatctccctgttaaggcatgatctggcctgcagagagaatagcatgatttctgccatgtagcctaagactattggcagtcacatcaccatcacctctcatgctcataagtgcctgctccactgcttctggcagttcccttgcttgtcaaaccaaggggagccccacacatctcctgccttaaacactggggcttcttaaatctcattgtgccaggaaatgcagcacatctctcataacattcagactgctttcttttatatatcaggagaaaggcaggtggatgtgtgtggctgaaggatatttgtttcattattattatattgatgagagcatgctttggtggacaagcactgaacttggaattaggagagctgacctggctctgctaccaaattgctgtgggacatgcgctatcctcaccctctgcttgcccaggacttggccctggcaggatggattctttcggttgaccttcaactgaggtcctgtctttcaatctctcatccactcactgctggaaggattatctgaaaacaaagtcttaacatcttaactcccctggctttcagctgtggtctccacacatcagtctgtggagtagtgtcaaatagtgatgaagttttctctggtccatggtgaaatgtggaacataaggataaagttgactttatttaggtttttttgtttgttttgttttttgaggcagagtctcagtctgttgcccaggctggagttgagtgatgtcagctcactgcaacctccacctcccagattcaagtgattcttgtgtctcagcctcacgaatagctgggactacaagcatatgtcaccatgcccaggtgatttttttgtatttttagtagagatggggttttgccatgttggccaggctggtcttgaactcctggcctcaaacaatctacctgccttggactccaaagtgctaggattacaggtgtgagccaccgcacctggcctttattcaaattttaaactctgaagtcagtctttttctttcctttttttttgttttgggacagcgtcttgttctgttgcccaggctggagtgcagtggcgtgatctcggctcattgcaacctccacctcccgggttcaagcaattctcctgcgtcagcttcctgagtagctaggactacaggcacttgccaccacgcttgtctaatttttgtatttttaatagagacagggttttgccatgttggccaggctggtctcgaactcctgacctcaggtgatccacctgccttggtttcccaaagtgctggcattaccggcttgagccaccacgcctatccttctttcctgttcttttggtattaaaatattctttcttttatgaaaccgttttcgtaagaaatctagaagtctctgccctcaggatgaagtcccaattccttaagtggcatttgcttaaaggtctttcacagtccaactgcagattacatcacatagttccccagcttctgacaccccacatctattcactgactatccagtgacactgaatggaaacatggcatgtcttctcatgccttcaggcctctgaacaccttgcttccttttctcttttctcctgtcgctgcctcttttctcctcaccctccacagtttgtttctttctttctttctttttttgagacggagtctcgctctgtcgcccatgctggagtgcagtgacatgatctcggctcactgcaggctccgccttctgggttcacgccattctcctgcctcagcctcccaagtagctgggactacaggggcccgccacctcgcctggctatttttttgtatttttagtagagacgggttttcaccgtgttagccaggatggtcttgatctcgtgacctcgtgatccgccagcctcggcctcccaaagcttgctttcttttttctgagatggagtttcgcgcttgtcattcaggctggagtgcaatggtgccatctcagctcactgcaacctctgcctcccaggttcaagcgattctcccacctcagcctcccaagtagctgggattacaggcgcccgccatcatagccggctaatttttgtatttttgtagggacggggtttcactatgttggccaagctggtcttgaactcctgacctcaggtgatataccctcctcagcctcccaaagtgctgggattacagcctggcccacagtttcttcctctttgacctttccttccccatgccaggcagcctgagtcactccctcctcaatatagcgctgatcacatgtcctgcaattgcctgtctcattatgtgtctcttcccatcagctgccagttcctggaggtagggcctgggtctcacagcctgtcctgagtagtagccactcaatgaacatatgtcaaatgaatgaaagaatgaatgtttttgggaggccaaggtgggtgaatcacctgaggtcaggagtttgagaccagcctggccaacatggcaaaaccctgcctctactaaaaatacaaaaaattagctgggcgtggtggtgggtgcctgtaatcacagctacttgggaggctgaggcaggagaattgcttgaacccagaacggggaggttgcagtgagccgagatcatgccattgcactccagcatgggcaacagagcgagactctgtcaaaagaaaaacaaaacaaaaaaggaatgaacgttaatttttgagacatatccatgtccttctgcttgtgaagtttagtctttcccggtaggttgaaccttgctcaaaggaagaggagcctctgatttccttatttcccactatactgcatttacccttgctgccctgtgcagtactctgcatgtagtaggtactaatgtgctgattacctgttcttctatgttctctgtgtggctttcctctacttattccctccctagaactctctgcagtgtctgagctcctgcagcatgggctgccccagataagcagcaggagccctgaaagccttgccttcctgtctgatcgccagtacatggagggagctgctcgccagagacagtactgcatcctgctcctcttctacttggcctacatccatgaagacaggtttgtctcagaggcagagttatttgaggctgtgcaaagcttcctcctgtcgctgcaggaccagggcgagcgccccccactggtggtcttcaaagcctccatctatctgcttgcaatctgccaggacaaagacaatacactacgtgagactatggtcagtgcaatcagaaaattcctagaaggcatcccagacctgcagctagtctatactcaccatccgctcctgctcaggttctttctgttgtatccagagctcatgagtaggtatgggcaccgtgtcctggaactttggttcttctgggaagagagcagctatgaggaactggatgatgtcacctctgctgggcagcccgcccttcctgccagcttagtagtcctgttccagttgctcagaagcatccccagcatcctgctcatcttgctggacctcatctattccagcccagtggacacagctcacaaggtactgattagcctgaggaccttcctgaggaggaatgaggatatccaagtgggcggtcttatccgaggccacttcctgctgatcctgcagcgtctgctagtggagcatggggcatccccatcaggagcctcggggaacctaccattgctgctgagcctcctctccctgatgcagctcaggaatgtgtcagagcaagaactggacagcgtggccatgaagctccttcaccaagtaagcaagctgtgtgggaagtgcagccccactgacgtggacatcctgcagccctccttcaacttcctgtattggagccttcatcagaccacacccagcagtcagaaaagagctgctgcagtgctcctgagcagcacaggcctgatggagcttctggagaagatgctggccctcaccttggcaaaggcagattctcccaggactgcactcctctgctctgcctggctgctcactgcctccttctctgcccagcagcacaagggcagtttgcaggttcaccagacactctctgtggaaatggaccaagtattgaaggctctcagctttccaaagaaaaaggctgcactactctcagctgccatcttatgcttcctgcggacagccctgcgacaaagcttttcctctgccctggtagccctggtgccctcaggggcccagccactgccagccaccaaggacactgtcctagctccactgcgaatgtcgcaagtccggtccctggtcattgggctgcagaacctcctggtgcagaaggaccctctattgtcccaggcctgtgttggctgcctggaggccttgcttgactacctggatgcccggagcccagacattgctctccacgtggcctcccagccttggaatcggtttttgctgtttaccctcttggatgctggagagaattccttcctcagacctgagattttgaggctcatgaccctgtttatgcggtaccggagtagcagtgtcctctctcatgaagaggtgggtgatgttctgcaaggtgtggctttggctgacctgtctaccctctcgaacaccacactccaggccctgcatggcttcttccagcagctccagagcatgggacacctggctgaccacagcatggcccagaccctgcaggcctccttggagggccttccccctagcacctcctcaggccagccacccctgcaggacatgctctgcctgggaggggtggctgtatccctgtcccacatcagaaactgatcctcaggacttgaaggcccagaagtggagagagaatgagacctggagacaaagggcataattgttggggaaatggatgacagctgaagctattcatatggagccatatactctattgttgaaatagaataaggaaataaaatgatacactcacata

SEQ ID NO: 29640 - protein, 592 aa, Homo sapiens
MEGAARQRQYCILLLFYLAYIHEDRFVSEAELFEAVQSFLLSLQDQGERPPLVVFKASIYLLAICQDKDNTLRETMVSAIRKFLEGIPDLQLVYTHHPLLLRFFLLYPELMSRYGHRVLELWFFWEESSYEELDDVTSAGQPALPASLVVLFQLLRSIPSILLILLDLIYSSPVDTAHKVLISLRTFLRRNEDIQVGGLIRGHFLLILQRLLVEHGASPSGASGNLPLLLSLLSLMQLRNVSEQELDSVAMKLLHQVSKLCGKCSPTDVDILQPSFNFLYWSLHQTTPSSQKRAAAVLLSSTGLMELLEKMLALTLAKADSPRTALLCSAWLLTASFSAQQHKGSLQVHQTLSVEMDQVLKALSFPKKKAALLSAAILCFLRTALRQSFSSALVALVPSGAQPLPATKDTVLAPLRMSQVRSLVIGLQNLLVQKDPLLSQACVGCLEALLDYLDARSPDIALHVASQPWNRFLLFTLLDAGENSFLRPEILRLMTLFMRYRSSSVLSHEEVGDVLQGVALADLSTLSNTTLQALHGFFQQLQSMGHLADHSMAQTLQASLEGLPPSTSSGQPPLQDMLCLGGVAVSLSHIRN

SEQ ID NO: 29641 - DNA, 2375 bp, Homo sapiens
gtggtggagtacattttgaaccaagtctgtgtaactctgaaaccagagctttttgataccacccaggcttgggactctctgtgacaagtctggtttaaactgctctctgctttattcccacttctctgaagcttcctcatccttcatacgactgaccctggagctgaaggccaggttttgcagtggtctgagtcactcagccctaaaccaggtgtgttccaatttcctctactatatgtgcctcaaccttctctcagctccagagaagacaggaccaccttccaaagaagaactctctgcagtgtctgagctcctgcagcatgggctgccccagataagcagcaggagccctgaaagccttgccttcctgtctgatcgccagtacatggagggagctgctcgccagagacagtactgcatcctgctcctcttctacttggcctacatccatgaagacaggtcagtgcacagaggccgggcgcggtggcttactcctgtaatcccagctctttgggaggccgagatgggcagatcacgaggtcaggagatcgagaccatcatggctaacaaggaccagggcgagcgccccccactggtggtcttcaaagcctccatctatctgcttgcaatctgccaggacaaagacaatacactacgtgagactatggtcagtgcaatcagaaaattcctagaaggcatcccagacctgcagctagtctatactcaccatccgctcctgctcaggttctttctgttgtatccagagctcatgagtaggtatgggcaccgtgtcctggaactttggttcttctgggaagagagcagctatgaggaactggatgatgtcacctctgctgggcagcccgcccttcctgccagcttagtagtcctgttccagttgctcagaagcatccccagcatcctgctcatcttgctggacctcatctattccagcccagtggacacagctcacaaggtactgattagcctgaggaccttcctgaggaggaatgaggatatccaagtgggcggtcttatccgaggccacttcctgctgatcctgcagcgtctgctagtggagcatggggcatccccatcaggagcctcggggaacctaccattgctgctgagcctcctctccctgatgcagctcaggaatgtgtcagagcaagaactggacagcgtggccatgaagctccttcaccaagtaagcaagctgtgtgggaagtgcagccccactgacgtggacatcctgcagccctccttcaacttcctgtattggagccttcatcagaccacacccagcagtcagaaaagagctgctgcagtgctcctgagcagcacaggcctgatggagcttctggagaagatgctggccctcaccttggcaaaggcagattctcccaggactgcactcctctgctctgcctggctgctcactgcctccttctctgcccagcagcacaagggcagtttgcaggttcaccagacactctctgtggaaatggaccaagtattgaaggctctcagctttccaaagaaaaaggctgcactactctcagctgccatcttatgcttcctgcggacagccctgcgacaaagcttttcctctgccctggtagccctggtgccctcaggggcccagccactgccagccaccaaggacactgtcctagctccactgcgaatgtcgcaagtccggtccctggtcattgggctgcagaacctcctggtgcagaaggaccctctattgtcccaggcctgtgttggctgcctggaggccttgcttgactacctggatgcccggagcccagacattgctctccacgtggcctcccagccttggaatcggtttttgctgtttaccctcttggatgctggagagaattccttcctcagacctgagattttgaggctcatgaccctgtttatgcggtaccggagtagcagtgtcctctctcatgaagaggtgggtgatgttctgcaaggtgtggctttggctgacctgtctaccctctcgaacaccacactccaggccctgcatggcttcttccagcagctccagagcatgggacacctggctgaccacagcatggcccagaccctgcaggcctccttggagggccttccccctagcacctcctcaggccagccacccctgcaggacatgctctgcctgggaggggtggctgtatccctgtcccacatcagaaactgatcctcaggacttgaaggcccagaagtggagagagaatgagacctggagacaaagggcataattgttggggaaatggatgacagctgaagctattcatatggagccatatactctattgttgaaatagaataaggaaataaaatgatacactcacata

SEQ ID NO: 29642 - protein, 660 aa, Homo sapiens
MCLNLLSAPEKTGPPSKEELSAVSELLQHGLPQISSRSPESLAFLSDRQYMEGAARQRQYCILLLFYLAYIHEDRSVHRGRARWLTPVIPALWEAEMGRSRGQEIETIMANKDQGERPPLVVFKASIYLLAICQDKDNTLRETMVSAIRKFLEGIPDLQLVYTHHPLLLRFFLLYPELMSRYGHRVLELWFFWEESSYEELDDVTSAGQPALPASLVVLFQLLRSIPSILLILLDLIYSSPVDTAHKVLISLRTFLRRNEDIQVGGLIRGHFLLILQRLLVEHGASPSGASGNLPLLLSLLSLMQLRNVSEQELDSVAMKLLHQVSKLCGKCSPTDVDILQPSFNFLYWSLHQTTPSSQKRAAAVLLSSTGLMELLEKMLALTLAKADSPRTALLCSAWLLTASFSAQQHKGSLQVHQTLSVEMDQVLKALSFPKKKAALLSAAILCFLRTALRQSFSSALVALVPSGAQPLPATKDTVLAPLRMSQVRSLVIGLQNLLVQKDPLLSQACVGCLEALLDYLDARSPDIALHVASQPWNRFLLFTLLDAGENSFLRPEILRLMTLFMRYRSSSVLSHEEVGDVLQGVALADLSTLSNTTLQALHGFFQQLQSMGHLADHSMAQTLQASLEGLPPSTSSGQPPLQDMLCLGGVAVSLSHIRN

SEQ ID NO: 29643 - DNA, 1702 bp, Homo sapiens
agtacatggagggagctgctcgccagagacagtactgcatcctgctcctcttctacttggcctacatccatgaagacagactatggtcagtgcaatcagaaaattcctagaaggcatcccagacctgcagctagtctatactcaccatccgctcctgctcaggttctttctgttgtatccagagctcatgagtaggtatgggcaccgtgtcctggaactttggttcttctgggaagagagcagctatgaggaactggatgatgtcacctctgctgggcagcccgcccttcctgccagcttagtagtcctgttccagttgctcagaagcatccccagcatcctgctcatcttgctggacctcatctattccagcccagtggacacagctcacaaggtactgattagcctgaggaccttcctgaggaggaatgaggatatccaagtgggcggtcttatccgaggccacttcctgctgatcctgcagcgtctgctagtggagcatggggcatccccatcaggagcctcggggaacctaccattgctgctgagcctcctctccctgatgcagctcaggaatgtgtcagagcaagaactggacagcgtggccatgaagctccttcaccaagtaagcaagctgtgtgggaagtgcagccccactgacgtggacatcctgcagccctccttcaacttcctgtattggagccttcatcagaccacacccagcagtcagaaaagagctgctgcagtgctcctgagcagcacaggcctgatggagcttctggagaagatgctggccctcaccttggcaaaggcagattctcccaggactgcactcctctgctctgcctggctgctcactgcctccttctctgcccagcagcacaagggcagtttgcaggttcaccagacactctctgtggaaatggaccaagtattgaaggctctcagctttccaaagaaaaaggctgcactactctcagctgccatcttatgcttcctgcggacagccctgcgacaaagcttttcctctgccctggtagccctggtgccctcaggggcccagccactgccagccaccaaggacactgtcctagctccactgcgaatgtcgcaagtccggtccctggtcattgggctgcagaacctcctggtgcagaaggaccctctattgtcccaggcctgtgttggctgcctggaggccttgcttgactacctggatgcccggagcccagacattgctctccacgtggcctcccagccttggaatcggtttttgctgtttaccctcttggatgctggagagaattccttcctcagacctgagattttgaggctcatgaccctgtttatgcggtaccggagtagcagtgtcctctctcatgaagagctccagagcatgggacacctggctgaccacagcatggcccagaccctgcaggcctccttggagggccttccccctagcacctcctcaggccagccacccctgcaggacatgctctgcctgggaggggtggctgtatccctgtcccacatcagaaactgatcctcaggacttgaaggcccagaagtggagagagaatgagacctggagacaaagggcataattgttggggaaatggatgacagctgaagctattcatatggagccatatactctattgttgaaatagaataaggaaataaaatgatacactcacat

SEQ ID NO: 29644 - protein, 487 aa, Homo sapiens
MVSAIRKFLEGIPDLQLVYTHHPLLLRFFLLYPELMSRYGHRVLELWFFWEESSYEELDDVTSAGQPALPASLVVLFQLLRSIPSILLILLDLIYSSPVDTAHKVLISLRTFLRRNEDIQVGGLIRGHFLLILQRLLVEHGASPSGASGNLPLLLSLLSLMQLRNVSEQELDSVAMKLLHQVSKLCGKCSPTDVDILQPSFNFLYWSLHQTTPSSQKRAAAVLLSSTGLMELLEKMLALTLAKADSPRTALLCSAWLLTASFSAQQHKGSLQVHQTLSVEMDQVLKALSFPKKKAALLSAAILCFLRTALRQSFSSALVALVPSGAQPLPATKDTVLAPLRMSQVRSLVIGLQNLLVQKDPLLSQACVGCLEALLDYLDARSPDIALHVASQPWNRFLLFTLLDAGENSFLRPEILRLMTLFMRYRSSSVLSHEELQSMGHLADHSMAQTLQASLEGLPPSTSSGQPPLQDMLCLGGVAVSLSHIRN

SEQ ID NO: 29645 - DNA, 1581 bp, Homo sapiens
gagttctggacagcagagactacagattgggtcatagttttgcccagagccttcccactgatccatatggtggggtcctcacgttcctcttcctccagcattcaccatagccacacaaagctgagtagccccttccttttatacctttaacattcattaactcagacttctgagggaccacctctgtggcagtggggcagtgatgtgttggtgaaggcacaagaccaggaaactggtttgactctgggatctatgaccttgggcaaatcatgcccctcccttcccgtcgggcttcagcctcatactctgtaaagtaaaggacctcatctattccagcccagtggacacagctcacaaggtactgattagcctgaggaccttcctgaggaggaatgaggatatccaagtgggcggtcttatccgaggccacttcctgctgatcctgcagcgtctgctagtggagcatggggcatccccatcaggagcctcggggaacctaccattgctgctgagcctcctctccctgatgcagctcaggaatgtgtcagagcaagaactggacagcgtggccatgaagctccttcaccaagtaagcaagctgtgtgggaagtgcagccccactgacgtggacatcctgcagccctccttcaacttcctgtattggagccttcatcagaccacacccagcagtcagaaaagagctgctgcagtgctcctgagcagcacaggcctgatggagcttctggagaagatgctggccctcaccttggcaaaggcagattctcccaggactgcactcctctgctctgcctggctgctcactgcctccttctctgcccagcagcacaagggcagtttgcaggttcaccagacactctctgtggaaatggaccaagtattgaaggctctcagctttccaaagaaaaaggctgcactactctcagaaggaccctctattgtcccaggcctgtgttggctgcctggaggccttgcttgactacctggatgcccggagcccagacattgctctccacgtggcctcccagccttggaatcggtttttgctgtttaccctcttggatgctggagagaattccttcctcagacctgagattttgaggctcatgaccctgtttatgcggtaccggagtagcagtgtcctctctcatgaagaggtgggtgatgttctgcaaggtgtggctttggctgacctgtctaccctctcgaacaccacactccaggccctgcatggcttcttccagcagctccagagcatgggacacctggctgaccacagcatggcccagaccctgcaggcctccttggagggccttccccctagcacctcctcaggccagccacccctgcaggacatgctctgcctgggaggggtggctgtatccctgtcccacatcagaaactgatcctcaggacttgaaggcccagaagtggagagagaatgagacctggagacaaagggcataattgttggggaaatggatgacagctgaagctattcatatggagccatatactctattgttgaaatagaataaggaaataaaatgatacactcacata

SEQ ID NO: 29646 - protein, 156 aa, Homo sapiens
MQLRNVSEQELDSVAMKLLHQVSKLCGKCSPTDVDILQPSFNFLYWSLHQTTPSSQKRAAAVLLSSTGLMELLEKMLALTLAKADSPRTALLCSAWLLTASFSAQQHKGSLQVHQTLSVEMDQVLKALSFPKKKAALLSEGPSIVPGLCWLPGGLA

SEQ ID NO: 29647 - DNA, 1635 bp, Homo sapiens
acttttccccaactgcagtaccctctgatctctggctttcttctctcctgctcaggacctcatctattccagcccagtggacacagctcacaaggtactgattagcctgaggaccttcctgaggaggaatgaggatatccaagtgggcggtcttatccgaggccacttcctgctgatcctgcagcgtctgctagtggagcatggggcatccccatcaggagcctcggggaacctaccattgctgctgagcctcctctccctgatgcagctcaggaatgtgtcagagcaagaactggacagcgtggccatgaagctccttcaccaaggtgccctggctgcttgggatagcgcccaagggcccagggctggacgtgcagtgggtgctcactaataagcaagctgtgtgggaagtgcagccccactgacgtggacatcctgcagccctccttcaacttcctgtattggagccttcatcagaccacacccagcagtcagaaaagagctgctgcagtgctcctgagcagcacaggcctgatggagcttctggagaagatgctggccctcaccttggcaaaggcagattctcccaggactgcactcctctgctctgcctggctgctcactgcctccttctctgcccagcagcacaagggcagtttgcaggttcaccagacactctctgtggaaatggaccaagtattgaaggctctcagctttccaaagaaaaaggctgcactactctcagctgccatcttatgcttcctgcggacagccctgcgacaaagcttttcctctgccctggtagccctggtgccctcaggggcccagccactgccagccaccaaggacactgtcctagctccactgcgaatgtcgcaagtccggtccctggtcattgggctgcagaacctcctggtgcagaaggaccctctattgtcccaggcctgtgttggctgcctggaggccttgcttgactacctggatgcccggagcccagacattgccaataggagaaggtcctcttgagcaatgtcccaaggcaaggtcttggaagcattaacaacccagtgtttcttgaagctctccacgtggcctcccagccttggaatcggtttttgctgtttaccctcttggatgctggagagaattccttcctcagacctgagattttgaggctcatgaccctgtttatgcggtaccggagtagcagtgtcctctctcatgaagaggtgggtgatgttctgcaaggtgtggctttggctgacctgtctaccctctcgaacaccacactccaggccctgcatggcttcttccagcagctccagagcatgggacacctggctgaccacagcatggcccagaccctgcaggcctccttggagggccttccccctagcacctcctcaggccagccacccctgcaggacatgctctgcctgggaggggtggctgtatccctgtcccacatcagaaactgatcctcaggacttgaaggcccagaagtggagagagaatgagacctggagacaaagggcataattgttggggaaatggatgacagctgaagctattcatatggagccatatactctattgttgaaatagaataaggaaataaaatgatacactcacata

SEQ ID NO: 29648 - protein, 163 aa, Homo sapiens [sequence omitted]

SEQ ID NO: 29649 - DNA, 1947 bp, Homo sapiens
ccccaactgcagtaccctctgatctctggctttcttctctcctgctcaggacctcatctattccagcccagtggacacagctcacaaggtactgattagcctgaggaccttcctgaggaggaatgaggatatccaagtgggcggtcttatccgaggccacttcctgctgatcctgcagcgtctgctagtggagcatggggcatccccatcaggagcctcggggaacctaccattgctgctgagcctcctctccctgatgcagctcaggaatgtgtcagagcaagaactggacagcgtggccatgaagctccttcaccaagtaagcaagctgtgtgggaagtgcagccccactgacgtggacatcctgcagccctccttcaacttcctgtattggagccttcatcagaccacacccagcagtcagaaaagagctgctgcagtgctcctgagcagcacaggcctgatggagcttctggagaagatgctggccctcaccttggcaaaggcagattctcccaggactgcactcctctgctctgcctggctgctcactgcctccttctctgcccagcagcacaagggcagtttgcaggttcaccagacactctctgtggaaatggaccaagtattgaaggctctcagctttccaaagaaaaaggctgcactactctcagctgccatcttatgcttcctgcggacagccctgcgacaaagcttttcctctgccctggtagccctggtgccctcaggggcccagccactgccagccaccaaggacactgtcctagctccactgcgaatgtcgcaagtccggtccctggtcattgggctgcagaacctcctggtgcagaaggaccctctattgtcccaggcctgtgttggctgcctggaggccttgcttgactacctggatgcccggagcccagacattggtagaaactctccacattatctgatgttcccatgagagagattagagggagcaacacccttccaccctcctgctccagccttccattcccttgtgtgactcatacttgttttgtttaattcttttagcagcactgcaagggcagtcatgcccattatacagatgggatcaataaggttcagataggtcaaatgatgtgcccaaccaaggtcacaatgctcttaagtggcagagcccttcttactgcctgccttccacaatcatggcgtatatagtttcaccgagccagtcaacataagtggattagaagcccagggaagaaagaaccctccttgggtcagcttgttcagtgccctgtctctaactgggtagcccctttttaagccaataggagaaggtcctcttgagcaatgtcccaaggcaaggtcttggaagcattaacaacccagtgtttcttgaagctctccacgtggcctcccagccttggaatcggtttttgctgtttaccctcttggatgctggagagaattccttcctcagacctgagattttgaggctcatgaccctgtttatgcggtaccggagtagcagtgtcctctctcatgaagaggtgggtgatgttctgcaaggtgtggctttggctgacctgtctaccctctcgaacaccacactccaggccctgcatggcttcttccagcagctccagagcatgggacacctggctgaccacagcatggcccagaccctgcaggcctccttggagggccttccccctagcacctcctcaggccagccacccctgcaggacatgctctgcctgggaggggtggctgtatccctgtcccacatcagaaactgatcctcaggacttgaaggcccagaagtggagagagaatgagacctggagacaaagggcataattgttggggaaatggatgacagctgaagctattcatatggagccatatactctattgttgaaatagaataaggaaataaaatgatacactcacata

SEQ ID NO: 29650 - protein, 236 aa, Homo sapiens
MQLRNVSEQELDSVAMKLLHQVSKLCGKCSPTDVDILQPSFNFLYWSLHQTTPSSQKRAAAVLLSSTGLMELLEKMLALTLAKADSPRTALLCSAWLLTASFSAQQHKGSLQVHQTLSVEMDQVLKALSFPKKKAALLSAAILCFLRTALRQSFSSALVALVPSGAQPLPATKDTVLAPLRMSQVRSLVIGLQNLLVQKDPLLSQACVGCLEALLDYLDARSPDIGRNSPHYLMFP

SEQ ID NO: 29651 - DNA, 1260 bp, Homo sapiens
gagagaggggatgtggcaagtgcagggaactgcacttcattcgactgttaaagttcccttgggaaggtggtgacgatgttcacaggatggatccctttgaaatcctaaagtctttctgtgatgtgcagctgtaggctgcttgcctgatgtttgtctagatggagggtgtgaatgtgccttaaggtttgtcactgtgtttctttccattggttgtaatatcagggatacttagtttgtgcttgctccccaagactgacatctgaaatagccagtcgcaggctaccacctatgacaagtgtgagtgttttgcgacaggccgactggggactttcatctcttgcagtaagcaagctgtgtgggaagtgcagccccactgacgtggacatcctgcagccctccttcaacttcctgtattggagccttcatcagaccacacccagcagtcagaaaagaggtgcaggggcccgggctgggacagtgaagagtgctgggcagtctgtggtcctctgtatctcaactttttcatcttaaaaaaacaaatagggttgtgtgtgtggctggtggtcataaggtcctttctggctctaataacctgagcttctgttatgaagctgggacccttagagcctcaggatgatcctctgtttgtttgtgaagccccaatcaggtgctaagcaccatagtggcacttagctgaagctcctctgtaactcctgtgggccctgccttgcccacccccgacagctgctgcagtgctcctgagcagcacaggcctgatggagcttctggagaagatgctggccctcaccttggcaaaggcagattctcccaggactgcactcctctgctctgcctggctgctcactgcctccttctctgcccagcagcacaagggcagtttgcaggttcaccagacactctctgtggaaatggaccaagtattgaaggctctcagctttccaaagaaaaaggctgcactactctcagctgccatcttatgcttcctgcggacagccctgcgacaaagcttttcctctgccctggtagccctggtgccctcaggggcccagccactgccagccaccaaggacactgtcctagctccactgcgaatgtcgcaagtccggtccctggtcattgggctgcagaacctcctggtgcagaaggaccctctattgtcccaggcctgtgttggctgcctggaggccttgcttgactacctggatgcccggagcccagacattggtagaaactctccac

SEQ ID NO: 29652 - protein, 160 aa, Homo sapiens
MELLEKMLALTLAKADSPRTALLCSAWLLTASFSAQQHKGSLQVHQTLSVEMDQVLKALSFPKKKAALLSAAILCFLRTALRQSFSSALVALVPSGAQPLPATKDTVLAPLRMSQVRSLVIGLQNLLVQKDPLLSQACVGCLEALLDYLDARSPDIGRNS

SEQ ID NO: 29653 - DNA, 1376 bp, Homo sapiens
gagagaggggatgtggcaagtgcagggaactgcacttcattcgactgttaaagttcccttgggaaggtggtgacgatgttcacaggatggatccctttgaaatcctaaagtctttctgtgatgtgcagctgtaggctgcttgcctgatgtttgtctagatggagggtgtgaatgtgccttaaggtttgtcactgtgtttctttccattggttgtaatatcagggatacttagtttgtgcttgctccccaagactgacatctgaaatagccagtcgcaggctaccacctatgacaagtgtgagtgttttgcgacaggccgactggggactttcatctcttgcagtaagcaagctgtgtgggaagtgcagccccactgacgtggacatcctgcagccctccttcaacttcctgtattggagccttcatcagaccacacccagcagtcagaaaagaggtgcaggggcccgggctgggacagtgaagagtgctgggcagtctgtggtcctctgtatctcaactttttcatcttaaaaaaacaaatagggttgtgtgtgtggctggtggtcataaggtcctttctggctctaataacctgagcttctgttatgaagctgggacccttagagcctcaggatgatcctctgtttgtttgtgaagccccaatcaggtgctaagcaccatagtggcacttagctgaagctcctctgtaactcctgtgggccctgccttgcccacccccgacagctgctgcagtgctcctgagcagcacaggcctgatggagcttctggagaagatgctggccctcaccttggcaaaggcagattctcccaggactgcactcctctgctctgcctggctgctcactgcctccttctctgcccagcagcacaagggcagtttgcagaaggaccctctattgtcccaggcctgtgttggctgcctggaggccttgcttgactacctggatgcccggagcccagacattggtagaaactctccacattatctgatgttcccatgagagagattagagggagcaacacccttccaccctcctgctccagccttccattcccttgtgtgactcatacttgttttgtttaattcttttagcagcactgcaagggcagtcatgcccattatacagatgggatcaataaggttcagataggtcaaatgatgtgcccaaccaaggtcacaatgctcttaagtggcagagcccttcttactgcctgccttccacaatcatggcgtatatagtttcaccgagccagtcaacataagtggattagaagcccagggaagaaagaaccctccttgggtcagcttgttcagtgccctgtctctaactgggtagcccctttttaagccaata

SEQ ID NO: 29654 - protein, 81 aa, Homo sapiens
MELLEKMLALTLAKADSPRTALLCSAWLLTASFSAQQHKGSLQKDPLLSQACVGCLEALLDYLDARSPDIGRNSPHYLMFP

SEQ ID NO: 29655 - DNA, 1667 bp, Homo sapiens
gagagaggggatgtggcaagtgcagggaactgcacttcattcgactgttaaagttcccttgggaaggtggtgacgatgttcacaggatggatccctttgaaatcctaaagtctttctgtgatgtgcagctgtaggctgcttgcctgatgtttgtctagatggagggtgtgaatgtgccttaaggtttgtcactgtgtttctttccattggttgtaatatcagggatacttagtttgtgcttgctccccaagactgacatctgaaatagccagtcgcaggctaccacctatgacaagtgtgagtgttttgcgacaggccgactggggactttcatctcttgcagtaagcaagctgtgtgggaagtgcagccccactgacgtggacatcctgcagccctccttcaacttcctgtattggagccttcatcagaccacacccagcagtcagaaaagaggtgcaggggcccgggctgggacagtgaagagtgctgggcagtctgtggtcctctgtatctcaactttttcatcttaaaaaaacaaatagggttgtgtgtgtggctggtggtcataaggtcctttctggctctaataacctgagcttctgttatgaagctgggacccttagagcctcaggatgatcctctgtttgtttgtgaagccccaatcaggtgctaagcaccatagtggcacttagctgaagctcctctgtaactcctgtgggccctgccttgcccacccccgacagctgctgcagtgctcctgagcagcacaggcctgatggagcttctggagaagatgctggccctcaccttggcaaaggcagattctcccaggactgcactcctctgctctgcctggctgctcactgcctccttctctgcccagcagcacaagggcagtttgcaggttcaccagacactctctgtggaaatggaccaagtattgaaggctctcagctttccaaagaaaaaggctgcactactctcagctgccatcttatgcttcctgcggacagccctgcgacaaagcttttcctctgccctggtagccctggtgccctcaggggcccagccactgccagccaccaaggacactgtcctagctccactgcgaatgtcgcaagtccggtccctggtcattgggctgcagaacctcctggtgcagaaggaccctctattgtcccaggcctgtgttggctgcctggaggccttgcttgactacctggatgcccggagcccagacattgctctccacgtggcctcccagccttggaatcggtttttgctgtttaccctcttggatgctggagagaattccttcctcagacctgagattttgaggctcatgaccctgctccagagcatgggacacctggctgaccacagcatggcccagaccctgcaggcctccttggagggccttccccctagcacctcctcaggccagccacccctgcaggacatgctctgcctgggaggggtggctgtatccctgtcccacatcagaaactgatcctcaggacttgaaggcccagaagtggagagagaatgagacctggagacaaagggcataattgttggggaaatggatgacagctgaagctattcatatggagccatatactctattgttgaaatagaataaggaaataaaatgatacactcacat

SEQ ID NO: 29656 - protein, 244 aa, Homo sapiens
MELLEKMLALTLAKADSPRTALLCSAWLLTASFSAQQHKGSLQVHQTLSVEMDQVLKALSFPKKKAALLSAAILCFLRTALRQSFSSALVALVPSGAQPLPATKDTVLAPLRMSQVRSLVIGLQNLLVQKDPLLSQACVGCLEALLDYLDARSPDIALHVASQPWNRFLLFTLLDAGENSFLRPEILRLMTLLQSMGHLADHSMAQTLQASLEGLPPSTSSGQPPLQDMLCLGGVAVSLSHIRN

SEQ ID NO: 29657 - DNA, 1315 bp, Homo sapiens
gctcggcggtctgcgctcggttgctagccgtttgctcccgctttcagttgctttgctgttagcctgttggaccttcgagcctagctgctcgcacaggactcggccacctgcccttcctgcaccgactggccagctcaagaggtttggatatggaccttcttcaattcctggccttcctctttgtcctgcttttgtctgggatgggagccacaggcaccttgaggacctccctggacccaagcctggagatctacaagaagatgtttgaggtgaagcggcgggagcagctgttggcactgaagaacctggcacagctgaacgacatccaccagcagtacaagatccttgatgtcatgctcaaggggctctttaaggtgctggaggactcccggacagtgctcaccgctgctgatgtgctcccagatgggcccttcccccaggacgagaagctgaaggatgctttctcccacgtggtggagaacacggccttcttcggcgatgtggtgctgcgcttcccgaggattgtgcactattactttgaccacaactccaactggaacctcctcatccgctggggtatcagtttctgcaaccagacaggcgtcttcaaccaggggccccactcgcccatcctcagcctgatggcccaggagctggggatcagtgagaaagactccaacttccagaacccatttaaaatcgaccgcacagagttcattcccagcactgaccctttccagaaggccctgagagaagaagagaaacgccgaaagaaagaggagaagcggaaggagatccgaaaaggcccaaggatctccagatcccagtctgagttatagccctggagcagctcagggctcagggggccacaaggaggcaggtcgggaggaagaagaggtggaggtgtggttgtggtggagagcaccagctagccccttccagaaggggaggccacatttgcccggccccctggagctgggtctgagccccagctgaagggactgagcctcagatggctggattttctctcaggggcctcctgctgaaggggccttcagaggattttatgctggaaatatgaccctgtgcagactgctgggggaggcaggaggatgcctgcctggaccctgttggtggctgaagacctctggccagctggcttccgcccttggtggggaagcagcagaactaggttctgagccacgggtcagggtgccaccctgctgctggccccactgtgtcacagagctgcctggcacaggtcccagcccctctgcagagacacaataaaagccagcagaccctttggaccgac

SEQ ID NO: 29658 - protein, 229 aa, Homo sapiens; identical to SEQ ID NO: 4079

SEQ ID NO: 29659 - DNA, 1847 bp, Homo sapiens
gctcggcggtctgcgctcggttgctagccgtttgctcccgctttcagttgctttgctgttagcctgttggaccttcgagcctagctgctcgcacaggactcggccacctgcccttcctgcaccgactggccagctcaagaggtttggatatggaccttcttcaattcctggccttcctctttgtcctgcttttgtctgggatgggagccacaggcaccttgaggacctccctggacccaagcctggagatctacaagaagatgtttgaggtgaagcggcgggagcagctgttggcactgaagaacctggcacagctgaacgacatccaccagcagtacaagatccttgatgtcatgctcaaggggctctttaaggtgctggaggactcccggacagtgctcaccgctgctgatgtgctcccagatgggcccttcccccaggacgagaagctgaaggatgctttctcccacgtggtggagaacacggccttcttcggcgatgtggtgctgcgcttcccgaggattgtgcactattactttgaccacaactccaactggaacctcctcatccgctggggtatcagtttctgcaaccagacaggcgtcttcaaccaggggccccactcgcccatcctcagcctgatggcccaggagctggggatcagtgagaaagactccaacttccagaacccatttaaaatcgaccgcacagagttcattcccagcactgaccctttccagaaggccctgagagaagaagagaaacgccgaaagaaagaggagaagcggaaggagatccgaaaaggcccaaggatctccagatcccagtctgagttatagccctggagcagctcagggctcagggggccacaaggaggcaggtcgggaggaagaagaggtggaggtgtggttgtggtggagagcaccagctagccccttccagaaggggaggccacatttgcccggccccctggagctgggtctgagccccagctgaagggactgagcctcagatggctggattttctctcaggggcctcctgctgaaggggccttcagaggattttatgctggaaatatgaccctgtgcagactgctgggggaggcaggaggatgcctgcctggaccctgttggtggctgaagacctctggccagctggcttccgcccttggtggggaagcagcagaactaggttctgagccacgggtcagggtgccaccctgctgctggccccactgtgtcacagagctgcctggcacaggtcccagcccctctgcagagacacaataaaagccagcagaccctttggaccgaccaaggctggtggggacactgtgaggggaccagggcccctcagggatgtagaaacagcttggaggatgcctctgccccaccaggaggggccccaggccctggcagggcagagaaggaaggggcttggcttgggcctcctggtcctacgccatcactgcccttgacaaatgattggtgttgggaaaggacctggaagtgccctgggacctgggaaacatttagctcaagaagaccttggagcaacatgatccctgtcctcagatgtctggggacagtcattgagcaagcacagggaagtcagcttgttctctctggcagcgctggaagacagtcaacctgtgggtggggggctgcagggggacaggccgcagccctgcaggaggccgtgctccgcaatggctgccctaagctgcatgggtcagacagcttcccgtctcgggaggccacagggcagggaagctgcagagggcatgtggccctgggtagggcagctgcccttcactcatgcccctcccaagcagaggagggaaggg

SEQ ID NO: 29660 - protein, 229 aa, Homo sapiens; identical to SEQ ID NO: 4079

SEQ ID NO: 29661 - DNA, 352 bp, Homo sapiens
ttgctttgctgttagcctgttggaccttcgagcctagctgctcgcacaggactcggccacctgcccttcctgtacctctgcaggagttcagagcctcatgctgagccaggaggagctccgggtgacgcatacggcaggatcgggattgagaggctgaaaaactcaagaggtttggatatggaccttcttcaattcctggccttcctctttgtcctgcttttgtctgggatgggagccacaggcaccttgaggacctccctggacccaagcctggagatctacaagaagatgtttgaggtgaagcggcgggagcagctgttggcactgaagaacctggcacagctgaacgaca

SEQ ID NO: 29662 - protein, 57 aa, Homo sapiens
MDLLQFLAFLFVLLLSGMGATGTLRTSLDPSLEIYKKMFEVKRREQLLALKNLAQLN

SEQ ID NO: 29663 - DNA, 877 bp, Homo sapiens
cctgttggaccttcgagcctagctgctcgcacaggactcggccacctgcccttcctgcaccgactggccagctcaagaggtttggatatggaccttcttcaattcctggccttcctctttgtcctgcttttgtctgggatgggagccacaggcaccttgaggacctccctggacccaagcctggagatctacaagaagatgtttgaggtgaagcgctggggatcagtgagaaagactccaacttccagaacccatttaaaatcgaccgcacagagttcattcccagcactgaccctttccagaaggccctgagagaagaagagaaacgccgaaagaaagaggagaagcggaaggagatccgaaaaggcccaaggatctccagatcccagtctgagttatagccctggagcagctcagggctcagggggccacaaggaggcaggtcgggaggaagaagaggtggaggtgtggttgtggtggagagcaccagctagccccttccagaaggggaggccacatttgcccggccccctggagctgggtctgagccccagctgaagggactgagcctcagatggctggattttctctcaggggcctcctgctgaaggggccttcagaggattttatgctggaaatatgaccctgtgcagactgctgggggaggcaggaggatgcctgcctggaccctgttggtggctgaagacctctggccagctggcttccgcccttggtggggaagcagcagaactaggttctgagccacgggtcagggtgccaccctgctgctggccccactgtgtcacagagctgcctggcacaggtcccagcccctctgcagagacacaataaaagccagcagaccctttggaccgac

SEQ ID NO: 29664 - protein, 74 aa, Homo sapiens
MDLLQFLAFLFVLLLSGMGATGTLRTSLDPSLEIYKKMFEVKRWGSVRKTPTSRTHLKSTAQSSFPALTLSRRP

SEQ ID NO: 29665 - DNA, 1409 bp, Homo sapiens
cctgttggaccttcgagcctagctgctcgcacaggactcggccacctgcccttcctgcaccgactggccagctcaagaggtttggatatggaccttcttcaattcctggccttcctctttgtcctgcttttgtctgggatgggagccacaggcaccttgaggacctccctggacccaagcctggagatctacaagaagatgtttgaggtgaagcgctggggatcagtgagaaagactccaacttccagaacccatttaaaatcgaccgcacagagttcattcccagcactgaccctttccagaaggccctgagagaagaagagaaacgccgaaagaaagaggagaagcggaaggagatccgaaaaggcccaaggatctccagatcccagtctgagttatagccctggagcagctcagggctcagggggccacaaggaggcaggtcgggaggaagaagaggtggaggtgtggttgtggtggagagcaccagctagccccttccagaaggggaggccacatttgcccggccccctggagctgggtctgagccccagctgaagggactgagcctcagatggctggattttctctcaggggcctcctgctgaaggggccttcagaggattttatgctggaaatatgaccctgtgcagactgctgggggaggcaggaggatgcctgcctggaccctgttggtggctgaagacctctggccagctggcttccgcccttggtggggaagcagcagaactaggttctgagccacgggtcagggtgccaccctgctgctggccccactgtgtcacagagctgcctggcacaggtcccagcccctctgcagagacacaataaaagccagcagaccctttggaccgaccaaggctggtggggacactgtgaggggaccagggcccctcagggatgtagaaacagcttggaggatgcctctgccccaccaggaggggccccaggccctggcagggcagagaaggaaggggcttggcttgggcctcctggtcctacgccatcactgcccttgacaaatgattggtgttgggaaaggacctggaagtgccctgggacctgggaaacatttagctcaagaagaccttggagcaacatgatccctgtcctcagatgtctggggacagtcattgagcaagcacagggaagtcagcttgttctctctggcagcgctggaagacagtcaacctgtgggtggggggctgcagggggacaggccgcagccctgcaggaggccgtgctccgcaatggctgccctaagctgcatgggtcagacagcttcccgtctcgggaggccacagggcagggaagctgcagagggcatgtggccctgggtagggcagctgcccttcactcatgcccctcccaagcagaggagggaaggg

SEQ ID NO: 29666 - protein, 74 aa, Homo sapiens; identical to SEQ ID NO: 29664

SEQ ID NO: 29667 - DNA, 2989 bp, Homo sapiens
acaaaagcaaaatgggaaaatggcaaacagatccttttcaattagctgctgcatttatctcttcccccaaaagagaatcttctgctgcttctgcttcttcatctgcacaacggggatgtagccatcatacatgcctgcaaggctgtagtgagatcctggacatgaaagcattctgaaaactgaaaagtacaatgcacctgtgtttctgcctaagctctctaagcgtgacagcaggagcgcccgggtctccatcccggagagatgtgtccacactccgccgccactgctctcttcatcagcaacttgcttctgcagtcgctgcccaaagtttcgcggagcacccggcgacctggccgtcggtcaatcctgagaagcccagggattcggggcgcggagactgggggctgggccccgggaatcccaaagacgtccccgcggccaggaagggagtgacaggtgcgacgcgcggtcgcgggcggcgggagagcggaccacggaaaccgcgtgtgggcgcgcgagggaggcggcggccacgcgctctccttaggccgctccctgagacgcccccgcgacgtccctagccccgcgctctggaacccgcgaccctcgcgccgctttcggccccgcggcgccccagatcccacggcctcccggagcggcgcagctgggtcgggctcacgctcgcagcgccggaagggttgaggaccgccgggggcaccgtgcgcacggggttcttcccgcgcgaaccggggctgtcggggggtgggcgcacgcgcacccgggcgcgccgccgtaaccccttcctccccgcgcggcccccgcactcccacccacccaccactcaccgtcgatgtctcccagggtcagctcgtcgcccagctccgtgagggtctccatggtctccagaccacccagctcgccgctgtcgtccatcgcccggctcagcgcagaagccccccctgccgtcccgctcagggagacgcgggggcggtgccgtcgccaccgcccatgacacccgacaacccccgcccggcaccgcctcaccgacgggtgccacccgccgccatgtttgcgttgcgcccgggcgccgcacagaaagggcggggcgggattcccccgccccagcccgcgccccctgcggccccgcctccaggccgcgcgcccccctgtttgttgtcaatgggaccaggctcatctcagccaatgggcgagcgaagcggtgcgtggggtgatggcgcgtcatcgatcagcagctcagatttgcatagtgaggtccctccccccgcggcctcggagcgaatgcctggagtagccgtccggtcatcatcttaaccttctccgccttgtttaaaggagccgctgccttctccgttggatctgcgccacacgcaagtccgtccactggcctgggagtgaagggttaacaggccaccctccacctgcgaccgctggccgcctccaggcctggctgggagcacattacgtcatcttcccagctgcctacccccgccctgcccgcctgagaaagccagcggagtcaaacctggaccccagcgctcgggacgggagtccgggtcatccaagtcccgcttctcccagcctccttacaaaggcgggcacggaggcttgacaaggttgcagattgtcccagggcggtcaggattttacgtcttctgctttgcacccgccgtgacctcgcgcttactccagtggtcctcaatctctggcacctcggaaccactgaggacctgaaaaccacgccagtgcccaggcccaccgacggcctcctgagaggggggccccgggcacgagttttttgaaaaagttccaccgggattctgaagtgcagcccacccactccttcaagcacctcactgccccatcttgcagctggtcgtgttgtaaacttctaggaatttatccaaaggaataaaaattacaagtgcttaaagaagtgctgtaactaggaagaagtgagaataaggaaatgaatatgtaaattacatccacacgatggaataccatgggatcattaaaaattacgcacacaaatgtatatttattagcaagaaaaggcgttcacaatatattgataaaagggaaaagttgaagtttcctgccagtttgtgagaggcagctgttgcttagtgatcaataattaagaacacacaggctgtgtggaggcagacacatggatccactaattcactgtgaccttgggttaattgttctaagcctcagtttagtcatctctaaaatggggataaaatagcatccctcatagctgtggttaagtgagattatttgcacattcaattgacaatatttattgaacatctctgtggcagggaaacaaatggttcctgccctctgagagcttccagtctagcaaaaaaaaaaatcagaaatcccacacccgtattaaacataaaaataaattacagatgatggtacaagtgatcaaggaaaggtaatggatgtgatgaaactaacaagggccctgacttgtgctgtcaagaagcctctgaagaagtgacatttaagatgaaacctaaaattatgagagaactgcagctgttacagccaaaggggaaatgatgacatggacaaaggcctcgaggcaggaggagctgctggcagccagctctcggcataagctttggcatacagtaagtgccttgcatactgctgtattgcaattgaaaaaataaggatctggccaggcgcggtggctcacaccggtaattccagcactttaggaggccgaggtgtgcagatcatttgaggtcaggagttggagaccagcctgaccaacatggtgaaaccccgtctctactaaaaatacaaaaattagccgggtgtggtggcgcatgcctgtaatcccagctaaccggtaggagaactgccggaacctgggagatagaggctgcagtgagctgagatcatgtcgctgcactccagcctgggagacagagcaagactctgtctc

SEQ ID NO: 29668 - protein, 129 aa, Homo sapiens; identical to SEQ ID NO: 5286

SEQ ID NO: 29669 - DNA, 4307 bp, Homo sapiens
gccctttctgtgcggcgcccgggcgcaacgcaaacatggcggcgggtggcacccgtcggtgaggcggtgccgggcgggggttgtcgggtgtcatgggcggtggcgacggcaccgcccccgcgtctccctgagcgggacggcagggggggcttctgcgctgagccgggcgatggacgacagcggcgagctgggtggtctggagaccatggagaccctcacggagctgggcgacgagctgaccctgggagacatcgacgagatgctgcaatttgtcagtaatcaagtgggagagttccctgacttgttttcagaacagctgtgtagctcctttcctggcagtggtggtagtggtagcagcagcggcagcagtggcagcagcagcagcagcagcaatggcaggggcagcagcagcggagctgtggacccttcagtgcaacggtcattcacccaggtcacattaccttccttctctccctcggcggcctccccacaggctccaactctgcaagtcaaggtttctcccacctcagttcccaccacacccagggcaactcctattcttcagccccgcccccagccccagcctcaacctcaaactcagctgcaacaacagacggtaatgatcacgccaacattcagcaccactccgcagacgaggatcatccagcagcctttgatataccagaatgcagctactagctttcaagtccttcagcctcaagtccaaagcctggtgacatcctcccaggtacagccggtcaccattcagcagcaggtgcagacagtacaggcccagcgggtgctgacacaaacggccaatggcacgctgcagacccttgccccggctacggtgcagacagttgctgcgccacaggtgcagcaggtcccggtcctggtccagcctcagatcatcaagacagattcccttgttttgaccacactgaagacagatggcagccctgttatggctgcggtccagaacccggccctcaccgccctcaccacccctatccagacggctgcccttcaagtaccaaccctggtgggcagcagtgggaccattctgaccacaatgcctgtaatgatggggcaagagaaagtgcccattaagcaggtacctgggggagtcaagcagcttgagccccccaaagaaggagaaaggcggacaacccataatatcattgagaaacgatatcgctcctccatcaatgacaaaatcatcgaattgaaagacctggtcatggggacagacgccaagatgcacaagtctggcgttctgaggaaggccattgattacatcaaatacttgcagcaggtcaatcataaactgcgccaggagaacatggtgctgaagctggcaaatcaaaagaacaagcttctaaagggcatcgacctaggcagtctggtggacaatgaggtggacctgaagatcgaggactttaatcagaatgtccttctgatgtcccccccagcctctgactcagggtcccaggctggcttctctccctactccattgactctgagccaggaagccctctattggatgatgcaaaggtcaaagatgagccagactctcctcctgtggcgctgggcatggtagaccgctcacggattcttctgtgtgtcctcaccttcctgtgcctctcctttaaccccctgacttccctgctgcagtggggaggggcccacgactctgaccagcacccacactcaggctctggccgcagtgtcctgtcattcgagtcaggttctgggggctggtttgactggatgatgcctactcttctcttatggctggtaaatggtgtgattgtcctgagcgtctttgtgaagctgctggttcatggggagccagtgatccggccacactcgcgctcctcggtcaccttctggaggcaccggaaacaggcagatctggatctcgccagaggagattttgcagctgctgccggcaacctacaaacctgcctggcagttttgggccgggcactgcccacctcccgcctggacctggcctgcagcctctcctggaacgtgatccgctacagcctgcagaagctacgcctggtgcgctggctgctcaagaaagtcttccagtgccggcgggccacgccagccactgaggcaggctttgaagacgaagctaagaccagcgcccgggatgcggctctggcctatcaccggctgcaccagctgcacatcacagggaagcttcctgcaggatccgcctgttccgatgtacacatggcgttgtgtgccgtgaacctggctgaatgtgcagaggagaagatcccaccgagcacactggttgagatccatctgactgctgccatggggctcaagacccggtgtggaggcaagctgggcttcctggccagctacttcctcagccgagcccagagcctgtgtggccccgagcacagtgctgttcctgactccctgcgctggctctgccaccccctgggccagaagtttttcatggagcggagctggtctgtgaagtcagctgccaaggagagtctatactgtgcccagaggaacccagctgaccccattgcgcaggtccaccaggccttctgcaagaacctgctggagcgagctatagagtccttggtgaaacctcaggccaagaagaaggctggagaccaggaagaagagagctgtgaattctccagtgctctggagtacttgaaattacttcattcttttgtggactctgtgggggttatgagccccccactctccaggagctccgtgctcaagtccgccctgggtccagacatcatctgtcggtggtggacgtctgcaatcactgtggccatcagctggctccagggagacgatgcagctgtgcgctctcattttaccaaagtggaacgcatccccaaggccctggaagtgacagagagccccctggtgaaggccatcttccatgcctgcagagccatgcatgcctcactccctgggaaagcagatgggcagcagagttccttctgccattgcgagagggccagtggccacctatggagcagcctcaacgtcagtggggccacctctgaccctgccctcaaccacgtggtccagctgctcacctgtgacctgctactgtcgctacggacagcgctctggcaaaaacaggccagtgccagccaggctgtgggggagacctaccacgcgtcaggcgctgaactggcgggcttccaacgggacctgggcagcctgcgcaggctggcacacagcttccgcccagcataccgcaaggtgttcctgcatgaagccaccgtgcgcctgatggcaggagccagccccacccgcacccaccagctgctggaacacagcctgcggcggcgcaccacgcagagcaccaagcacggagaggtggatgcctggcccggccagcgagagcgggccaccgccatcctgctggcctgccgccacctgcccctctccttcctctcctccccgggccagcgggcagtgctgctggccgaagctgcccgcaccctggagaaggtgggcgaccggcgctcctgcaacgactgccagcagatgattgttaagctgggtggtggcactgccattgccgcctcctgaccaccaggctcagcccacccctccacctctctctcgatttctctctctccccctcagcatcttcccgctgagagtggtggggaagagccttgtcttcttagctgtcacctgccgaggcttctgggccactcaggccagtgcacccctgggcagagccccttaaagctgctgtcactagatgcccatggtccagggcctggtgggcgtgagaggataggtggcagggcagaaactgggcagccctgacttgatagcagcagggggagctcccaagctgccaagcccctgcctccagccttcctgagtttctctctcctgaaccctactctctcctttttgcttcctcagtttttatcaggctttctctgggggacagcagtctctgagcaccagggagcagttgccctcaggcctgtgcccagcatgccctcccctttttatacgaatgttttctaccagtgtgcttgggtttgccatgatgcgaggctgagttgctgtagcgtcttgattctctccctgggtctgcgttccctcccctgggcctgactgagcctgctcattgtttttccctttattacacaggacagccaggggaggaggggggcccagccctgggaggctggtgggaggcagggggcaggcctgcggatgcatgaaataatgttggcattattttttaattttttaaaaaataaatggtatcttatttaat

SEQ ID NO: 29670 - protein, 1141 aa, Homo sapiens; identical to SEQ ID NO: 4081

SEQ ID NO: 29671 - DNA, 5234 bp, Homo sapiens
gtgcggcgcccgggcgcaacgcaaacatggcggcgggtggcacccgtcggtgaggcggtgccgggcgggggttgtcgggtgtcatgggcggtggcgacggcaccgcccccgcgtctccctgagcgggacggcagggggggcttctgcgctgagccgggcgatggacgacagcggcgagctgggtggtctggagaccatggagaccctcacggagctgggcgacgagctgaccctgggagacatcgacgagatgctgcaatttgtcagtaatcaagtgggagagttccctgacttgttttcagaacagctgtgtagctcctttcctggcagtggtggtagtggtagcagcagcggcagcagtggcagcagcagcagcagcagcaatggcaggggcagcagcagcggagctgtggacccttcagtgcaacggtcattcacccaggtcacattaccttccttctctccctcggcggcctccccacaggctccaactctgcaagtcaaggtttctcccacctcagttcccaccacacccagggcaactcctattcttcagccccgcccccagccccagcctcaacctcaaactcagctgcaacaacagacggtaatgatcacgccaacattcagcaccactccgcagacgaggatcatccagcagcctttgatataccagaatgcagctactagctttcaagtccttcagcctcaagtccaaagcctggtgacatcctcccaggtacagccggtcaccattcagcagcaggtgcagacagtacaggcccagcgggtgctgacacaaacggccaatggcacgctgcagacccttgccccggctacggtgcagacagttgctgcgccacaggtgcagcaggtcccggtcctggtccagcctcagatcatcaagacagattcccttgttttgaccacactgaagacagatggcagccctgttatggctgcggtccagaacccggccctcaccgccctcaccacccctatccagacggctgcccttcaagtaccaaccctggtgggcagcagtgggaccattctgaccacaatgcctgtaatgatggggcaagagaaagtgcccattaagcaggtacctgggggagtcaagcagcttgagccccccaaagaaggagaaaggcggacaacccataatatcattgagaaacgatatcgctcctccatcaatgacaaaatcatcgaattgaaagacctggtcatggggacagacgccaagatgcacaagtctggcgttctgaggaaggccattgattacatcaaatacttgcagcaggtcaatcataaactgcgccaggagaacatggtgctgaagctggcaaatcaaaagaacaagcttctaaagggcatcgacctaggcagtctggtggacaatgaggtggacctgaagatcgaggactttaatcagaatgtccttctgatgtcccccccagcctctgactcagggtcccaggctggcttctctccctactccattgactctgagccaggaagccctctattggatgatgcaaaggtcaaagatgagccagactctcctcctgtggcgctgggcatggtagaccgctcacggattcttctgtgtgtcctcaccttcctgtgcctctcctttaaccccctgacttccctgctgcagtggggaggggcccacgactctgaccagcacccacactcaggctctggccgcagtgtcctgtcattcgagtcaggttctgggggctggtttgactggatgatgcctactcttctcttatggctggtaaatggtgtgattgtcctgagcgtctttgtgaagctgctggttcatggggagccagtgatccggccacactcgcgctcctcggtcaccttctggaggcaccggaaacaggcagatctggatctcgccagaggagattttgcagctgctgccggcaacctacaaacctgcctggcagttttgggccgggcactgcccacctcccgcctggacctggcctgcagcctctcctggaacgtgatccgctacagcctgcagaagctacgcctggtgcgctggctgctcaagaaagtcttccagtgccggcgggccacgccagccactgaggcaggctttgaagacgaagctaagaccagcgcccgggatgcggctctggcctatcaccggctgcaccagctgcacatcacagggaagcttcctgcaggatccgcctgttccgatgtacacatggcgttgtgtgccgtgaacctggctgaatgtgcagaggagaagatcccaccgagcacactggttgagatccatctgactgctgccatggggctcaagacccggtgtggaggcaagctgggcttcctggccagctacttcctcagccgagcccagagcctgtgtggccccgagcacagtgctgttcctgactccctgcgctggctctgccaccccctgggccagaagtttttcatggagcggagctggtctgtgaagtcagctgccaaggagagtctatactgtgcccagaggaacccagctgaccccattgcgcaggtccaccaggccttctgcaagaacctgctggagcgagctatagagtccttggtgaaacctcaggccaagaagaaggctggagaccaggaagaagagagctgtgaattctccagtgctctggagtacttgaaattacttcattcttttgtggactctgtgggggttatgagccccccactctccaggagctccgtgctcaagtccgccctgggtccagacatcatctgtcggtggtggacgtctgcaatcactgtggccatcagctggctccagggagacgatgcagctgtgcgctctcattttaccaaagtggaacgcatccccaaggccctggaagtgacagagagccccctggtgaaggccatcttccatgcctgcagagccatgcatgcctcactccctgggaaagcagatgggcagcagagttccttctgccattgcgagagggccagtggccacctatggagcagcctcaacgtcagtggggccacctctgaccctgccctcaaccacgtggtccagctgctcacctgtgacctgctactgtcgctacggacagcgctctggcaaaaacaggccagtgccagccaggctgtgggggagacctaccacgcgtcaggcgctgaactggcgggcttccaacgggacctgggcagcctgcgcaggctggcacacagcttccgcccagcataccgcaaggtgttcctgcatgaagccaccgtgcgcctgatggcaggagccagccccacccgcacccaccagctgctggaacacagcctgcggcggcgcaccacgcagagcaccaagcacggagaggtggatgcctggcccggccagcgagagcgggccaccgccatcctgctggcctgccgccacctgcccctctccttcctctcctccccgggccagcgggcagtgctgctggccgaagctgcccgcaccctggagaaggtgggcgaccggcgctcctgcaacgactgccagcagatgattgttaagctgggtggtggcactgccattgccgcctcctgaccaccaggctcagcccacccctccacctctctctcgatttctctctctccccctcagcatcttcccgctgagagtggtggggaagagccttgtcttcttagctgtcacctgccgaggcttctgggccactcaggccagtgcacccctgggcagagccccttaaagctgctgtcactagatgcccatggtccagggcctggtgggcgtgagaggataggtggcagggcagaaactgggcagccctgacttgatagcagcagggggagctcccaagctgccaagcccctgcctccagccttcctgagtttctctctcctgaaccctactctctcctttttgcttcctcagtttttatcaggctttctctgggggacagcagtctctgagcaccagggagcagttgccctcaggcctgtgcccagcatgccctcccctttttatacgaatgttttctaccagtgtgcttgggtttgccatgatgcgaggctgagttgctgtagcgtcttgattctctccctgggtctgcgttccctcccctgggcctgactgagcctgctcattgtttttccctttattacacaggacagccaggggaggaggggggcccagccctgggaggctggtgggaggcagggggcaggcctgcggatgcatgaaataatgttggcattattttttaattttttaaaaaataaatggtatcttatttaattgtcctgttccttcccactccccgcctcctaggatgttagcccaagctcagggtaggcccagggggctgggagaaatgaagccacccatggggactggggaccaggggccttcagcatggcttctaggttccctcctccccctaccccatctcctacctccacagtacagactgtccccaacttaacagtggttcaacttaaaccatgtttcaactttacaattggtctgttggggtattaaatgaatttgtgacttaggatattttcatttatgatgggtttatcaggaagtaaccccatggtaagttgaggcatatctgtatatatttaaacctaattaattcttgagctgaaaataaataaaccaggatggcagggaccaacccctaatccctccccagcggcaagcccctcttttcagagtgggcagagggttgcctatggtgggcactaggaatgaggtcccctgcctcgatgcgggtcctaggagaaaaagtcctacttttctgggtccccaggtgcagcacctcccggagactgtttctcccatggcctcctgagtgatgggccctgcctccctgtgcctcatcctcaggctggttggagcagagggtgggcaggagccccagcacagactggggggtgctcacagcagggccaccttgatgcaggctggaatgttatccctggggtgtgcttggaccccacctgctttctttctctcctgcccctcccctactctcactgtaatttatggaccctgcccgcctgcgtgttgtgtgtatgtcctgtgccttttctcactattgtttgggtgtgggagggggtggtttttcactgaaaaggggggtacacctatagctttcttgatgttcaatcaatcagtcactgtgtcccagacatattcaataaacacagattggtaccacccagca

SEQ ID NO: 29672 - protein, 1141 aa, Homo sapiens; identical to SEQ ID NO: 4081

SEQ ID NO: 29673 - DNA, 5754 bp, Homo sapiens
gtgcggcgcccgggcgcaacgcaaacatggcggcgggtggcacccgtcggtgaggcggtgccgggcgggggttgtcgggtgtcatgggcggtggcgacggcaccgcccccgcgtctccctgagcgggacggcagggggggcttctgcgctgagccgggcgatggacgacagcggcgagctgggtggtctggagaccatggagaccctcacggagctgggcgacgagctgaccctgggagacatcgacgagatgctgcaatttgtcagtaatcaagtgggagagttccctgacttgttttcagaacagctgtgtagctcctttcctggcagtggtggtagtggtagcagcagcggcagcagtggcagcagcagcagcagcagcaatggcaggggcagcagcagcggagctgtggacccttcagtgcaacggtcattcacccaggtcacattaccttccttctctccctcggcggcctccccacaggctccaactctgcaagtcaaggtttctcccacctcagttcccaccacacccagggcaactcctattcttcagccccgcccccagccccagcctcaacctcaaactcagctgcaacaacagacggtaatgatcacgccaacattcagcaccactccgcagacgaggatcatccagcagcctttgatataccagaatgcagctactagctttcaagtccttcagcctcaagtccaaagcctggtgacatcctcccaggtacagccggtcaccattcagcagcaggtgcagacagtacaggcccagcgggtgctgacacaaacggccaatggcacgctgcagacccttgccccggctacggtgcagacagttgctgcgccacaggtgcagcaggtcccggtcctggtccagcctcagatcatcaagacagattcccttgttttgaccacactgaagacagatggcagccctgttatggctgcggtccagaacccggccctcaccgccctcaccacccctatccagacggctgcccttcaagtaccaaccctggtgggcagcagtgggaccattctgaccacaatgcctgtaatgatggggcaagagaaagtgcccattaagcaggtacctgggggagtcaagcagcttgagccccccaaagaaggagaaaggcggacaacccataatatcattgagaaacgatatcgctcctccatcaatgacaaaatcatcgaattgaaagacctggtcatggggacagacgccaagatgcacaagtctggcgttctgaggaaggccattgattacatcaaatacttgcagcaggtcaatcataaactgcgccaggagaacatggtgctgaagctggcaaatcaaaagaacaagcttctaaagggcatcgacctaggcagtctggtggacaatgaggtggacctgaagatcgaggactttaatcagaatgtccttctgatgtcccccccagcctctgactcagggtcccaggctggcttctctccctactccattgactctgagccaggaagccctctattggatgatgcaaaggtcaaagatgagccagactctcctcctgtggcgctgggcatggtagaccgctcacggattcttctgtgtgtcctcaccttcctgtgcctctcctttaaccccctgacttccctgctgcagtggggaggggcccacgactctgaccagcacccacactcaggctctggccgcagtgtcctgtcattcgagtcaggttctgggggctggtttgactggatgatgcctactcttctcttatggctggtaaatggtgtgattgtcctgagcgtctttgtgaagctgctggttcatggggagccagtgatccggccacactcgcgctcctcggtcaccttctggaggcaccggaaacaggcagatctggatctcgccagaggagtttacggaaaaaaatctggggcaactcacagcattgaggaagagttaaacatccacatttcaagaggaacaagaaccagaacactcctcagcagcaggagattttgcagctgctgccggcaacctacaaacctgcctggcagttttgggccgggcactgcccacctcccgcctggacctggcctgcagcctctcctggaacgtgatccgctacagcctgcagaagctacgcctggtgcgctggctgctcaagaaagtcttccagtgccggcgggccacgccagccactgaggcaggctttgaagacgaagctaagaccagcgcccgggatgcggctctggcctatcaccggctgcaccagctgcacatcacagggaagcttcctgcaggatccgcctgttccgatgtacacatggcgttgtgtgccgtgaacctggctgaatgtgcagaggagaagatcccaccgagcacactggttgagatccatctgactgctgccatggggctcaagacccggtgtggaggcaagctgggcttcctggccagctacttcctcagccgagcccagagcctgtgtggccccgagcacagtgctgttcctgactccctgcgctggctctgccaccccctgggccagaagtttttcatggagcggagctggtctgtgaagtcagctgccaaggagagtctatactgtgcccagaggaacccagctgaccccattgcgcaggtccaccaggccttctgcaagaacctgctggagcgagctatagagtccttggtgaaacctcaggccaagaagaaggctggagaccaggaagaagagagctgtgaattctccagtgctctggagtacttgaaattacttcattcttttgtggactctgtgggggttatgagccccccactctccaggagctccgtgctcaagtccgccctgggtccagacatcatctgtcggtggtggacgtctgcaatcactgtggccatcagctggctccagggagacgatgcagctgtgcgctctcattttaccaaagtggaacgcatccccaaggccctggaagtgacagaccacctccacccccaccatcaaccctggcaactttgtcctgtaactaaaatagcctttagcacatggcataaccggagagcttttgacattcctctttggagattcatgtctgcgtcttgggggcattcggcactagtgatgggcagccctgcctgctgactccccggctgtttctaattggatctgagtattctaagagaaactgtaaaatgctccaagacagaaaggccccacgaggtcctatccttagagccaaggctgtagcatttcctatcaagcagacccttaaccggcgcacaggaaggagctgagaagagtaaggaaactgaggcacacgttggaatgactatcttgggtggcttcttagcagcagacgtgatggtgaagcctgtgtctctgacttccagcattgaatgaaggagccccctggtgaaggccatcttccatgcctgcagagccatgcatgcctcactccctgggaaagcagatgggcagcagagttccttctgccattgcgagagggccagtggccacctatggagcagcctcaacgtcagtggggccacctctgaccctgccctcaaccacgtggtccagctgctcacctgtgacctgctactgtcgctacggacagcgctctggcaaaaacaggccagtgccagccaggctgtgggggagacctaccacgcgtcaggcgctgaactggcgggcttccaacgggacctgggcagcctgcgcaggctggcacacagcttccgcccagcataccgcaaggtgttcctgcatgaagccaccgtgcgcctgatggcaggagccagccccacccgcacccaccagctgctggaacacagcctgcggcggcgcaccacgcagagcaccaagcacggagaggtggatgcctggcccggccagcgagagcgggccaccgccatcctgctggcctgccgccacctgcccctctccttcctctcctccccgggccagcgggcagtgctgctggccgaagctgcccgcaccctggagaaggtgggcgaccggcgctcctgcaacgactgccagcagatgattgttaagctgggtggtggcactgccattgccgcctcctgaccaccaggctcagcccacccctccacctctctctcgatttctctctctccccctcagcatcttcccgctgagagtggtggggaagagccttgtcttcttagctgtcacctgccgaggcttctgggccactcaggccagtgcacccctgggcagagccccttaaagctgctgtcactagatgcccatggtccagggcctggtgggcgtgagaggataggtggcagggcagaaactgggcagccctgacttgatagcagcagggggagctcccaagctgccaagcccctgcctccagccttcctgagtttctctctcctgaaccctactctctcctttttgcttcctcagtttttatcaggctttctctgggggacagcagtctctgagcaccagggagcagttgccctcaggcctgtgcccagcatgccctcccctttttatacgaatgttttctaccagtgtgcttgggtttgccatgatgcgaggctgagttgctgtagcgtcttgattctctccctgggtctgcgttccctcccctgggcctgactgagcctgctcattgtttttccctttattacacaggacagccaggggaggaggggggcccagccctgggaggctggtgggaggcagggggcaggcctgcggatgcatgaaataatgttggcattattttttaattttttaaaaaataaatggtatcttatttaattgtcctgttccttcccactccccgcctcctaggatgttagcccaagctcagggtaggcccagggggctgggagaaatgaagccacccatggggactggggaccaggggccttcagcatggcttctaggttccctcctccccctaccccatctcctacctccacagtacagactgtccccaacttaacagtggttcaacttaaaccatgtttcaactttacaattggtctgttggggtattaaatgaatttgtgacttaggatattttcatttatgatgggtttatcaggaagtaaccccatggtaagttgaggcatatctgtatatatttaaacctaattaattcttgagctgaaaataaataaaccaggatggcagggaccaacccctaatccctccccagcggcaagcccctcttttcagagtgggcagagggttgcctatggtgggcactaggaatgaggtcccctgcctcgatgcgggtcctaggagaaaaagtcctacttttctgggtccccaggtgcagcacctcccggagactgtttctcccatggcctcctgagtgatgggccctgcctccctgtgcctcatcctcaggctggttggagcagagggtgggcaggagccccagcacagactggggggtgctcacagcagggccaccttgatgcaggctggaatgttatccctggggtgtgcttggaccccacctgctttctttctctcctgcccctcccctactctcactgtaatttatggaccctgcccgcctgcgtgttgtgtgtatgtcctgtgccttttctcactattgtttgggtgtgggagggggtggtttttcactgaaaaggggggtacacctatagctttcttgatgttcaatcaatcagtcactgtgtcccagacatattcaataaacacagattggtaccacccagca

SEQ ID NO: 29674 - protein, 684 aa, Homo sapiens
MDDSGELGGLETMETLTELGDELTLGDIDEMLQFVSNQVGEFPDLFSEQLCSSFPGSGGSGSSSGSSGSSSSSSNGRGSSSGAVDPSVQRSFTQVTLPSFSPSAASPQAPTLQVKVSPTSVPTTPRATPILQPRPQPQPQPQTQLQQQTVMITPTFSTTPQTRIIQQPLIYQNAATSFQVLQPQVQSLVTSSQVQPVTIQQQVQTVQAQRVLTQTANGTLQTLAPATVQTVAAPQVQQVPVLVQPQIIKTDSLVLTTLKTDGSPVMAAVQNPALTALTTPIQTAALQVPTLVGSSGTILTTMPVMMGQEKVPIKQVPGGVKQLEPPKEGERRTTHNIIEKRYRSSINDKIIELKDLVMGTDAKMHKSGVLRKAIDYIKYLQQVNHKLRQENMVLKLANQKNKLLKGIDLGSLVDNEVDLKIEDFNQNVLLMSPPASDSGSQAGFSPYSIDSEPGSPLLDDAKVKDEPDSPPVALGMVDRSRILLCVLTFLCLSFNPLTSLLQWGGAHDSDQHPHSGSGRSVLSFESGSGGWFDWMMPTLLLWLVNGVIVLSVFVKLLVHGEPVIRPHSRSSVTFWRHRKQADLDLARGVYGKKSGATHSIEEELNIHISRGTRTRTLLSSRRFCSCCRQPTNLPGSFGPGTAHLPPGPGLQPLLERDPLQPAEATPGALAAQESLPVPAGHASH

SEQ ID NO: 29675 - DNA, 306 bp, Homo sapiens
cctagctaatttatatatatatggtagagccagtctcactgtgttgcccaggctagtcttcaacttccaggcacatgcagtcctcctgtcttggcctttttgctgggtccaaatagatgggtggcaggagcagcctgacaagtatgtgggaggagttagaacaagctgcctttggaaatgaaagtttactagagatttcttggaatatagtgtgtgtgaggaaacagtagaagatgaggtctgagaggtgaggtggagctaaattgtactgtagatgcaaggtgttttatggaagatagggaattg

SEQ ID NO: 29676 - protein, 37 aa, Homo sapiens
MGGRSSLTSMWEELEQAAFGNESLLEISWNIVCVRKQ

SEQ ID NO: 29677 - DNA, 454 bp, Homo sapiens
cagattaaagatgagagttgctgaaaggacagatgagaggaaattagaaggtggaattgactggactggggactcattggactgatggatggggacagtagtcagctaagacggttccctggttcttccttgggagtttgggtgagcgatggtgccaccaacaaaggtaaagaaaatagaaggaagagcaactttccaggaaaagggtggtgagttcccttttggacacttgcctgtgagatgtggaggtgagctggacatgcaggatctacagcccaaagaagactacaggtgagagtgaaaagcaagggagcctatgagagtggataggtgaaaaggagaccctcagggccattcagaagaacaccctcatctaaagaacaggtgtgagccactggcacccagccacattgtgaaggttttttaatgaaaataaattcaaatcagttcatct

SEQ ID NO: 29678 - protein, 48 aa, Homo sapiens [sequence omitted]

SEQ ID NO: 29679 - DNA, 1431 bp, Homo sapiens
ttacctagccaggagttaagatgcagaagcagttatgaacccccttccccatcaggtgctgcccacctggaggggtaggcaggcattcattcagtcgctcatttcaccaggactcccagcaaccgataaaacagaccaaaattcctccccttgtggccttaataccataagccttgtaggcaggacattttggtcccctgaggtaatatgaggtaatatgaagattggttcagcaatagcagagctactgtacttgggggttaatatgcaacttttctgttcttcaagtggtcataaaaattcttagaatcccctggttatgtctcatggttctttcatttactcagaaggtatttattgggcatcttgtattgatcacagcactgtgaatccagaaataaaagccagtgcctttgccaagctacagagttaaagaaaagaaaaatgaaatgaataaaagtaaaagaaaacctgtgcctgtctacaaggagctcaggtcagacgagggcagggattgtggctatcaagcacctcccatatgcctagctaggagccaggcttgggaactctcaaatgggtaattcccggtccttgttatcagctagctcacaacatgctgacctcaggctttctcttactctagcagaaacaggtatgttttactttgtgtcccactatggatagactgctgaatacatcaggtatgttcaagcattaccacatctctatttgtttccgtatctcagtaacagcagagatgagctgagaatgaatcagaacgtgccctgtagtgacattgatatatttcctgaggtacatcacgatagtctaggggacaaagggcgcagggaagcccagtgtactctttatgtctacacttgatcttagccagaaggctgagaagtgatactttttatgtcttacctctgtttctggtgactacagataagagactcatcccttgattcactcattcagcaaatatgactgagcaccgtctctaagcaggacatttgccttgtcctcagggagcatagttggcaaggaatctagacagcagcccttcttgagcttgacattgatcttctcatgaggaggactgggctccaggtggggaaagaaccccatcctcacttgtgggctagacgacctgggagtccacagacactgaagacacatcattcttcctattcatttcaaccttccctcgacagatcttcctgggaccaggtcttcaggacagtgtgagctaggtttattgaagtgctctgggctgatgtcattacatttgtaacttccatgccccccaaaaatgttttgaagacattcattttatcaaaatacaacatacatgcagaaaaatgcccacattttaacttacggcttgaagtgaagttacccatgcaacacccacccacatcaagaagtaga

SEQ ID NO: 29680 - protein, 58 aa, Homo sapiens
MNPLPHQVLPTWRGRQAFIQSLISPGLPATDKTDQNSSPCGLNTISLVGRTFWSPEVI

SEQ ID NO: 29681 - DNA, 3650 bp, Homo sapiens
ttacctagccaggagttaagatgcagaagcagttatgaacccccttccccatcaggtgctgcccacctggaggggtaggcaggcattcattcagtcgctcatttcaccaggactcccagcaaccgataaaacagaccaaaattcctccccttgtggccttaataccataagccttgtaggcaggacattttggtcccctgaggtaatatgaggtaatatgaagattggttcagcaatagcagagctactgtacttgggggttaatatgcaacttttctgttcttcaagtggtcataaaaattcttagaatcccctggttatgtctcatggttctttcatttactcagaaggtatttattgggcatcttgtattgatcacagcactgtgaatccagaaataaaagccagtgcctttgccaagctacagagttaaagaaaagaaaaatgaaatgaataaaagtaaaagaaaacctgtgcctgtctacaaggagctcaggtcagacgagggcagggattgtggctatcaagcacctcccatatgcctagctaggagccaggcttgggaactctcaaatgggtaattcccggtccttgttatcagctagctcacaacatgctgacctcaggctttctcttactctagcagaaacaggtatgttttactttgtgtcccactatggatagactgctgaatacatcaggtatgttcaagcattaccacatctctatttgtttccgtatctcagtaacagcagagatgagctgagaatgaatcagaacgtgccctgtagtgacattgatatatttcctgaggtacatcacgatagtctaggggacaaagggcgcagggaagcccagtgtactctttatgtctacacttgatcttagccagaaggctgagaagtgatactttttatgtcttacctctgtttctggtgactacagataagagactcatcccttgattcactcattcagcaaatatgactgagcaccgtctctaagcaggacatttgccttgtcctcagggagcatagttggcaaggaatctagacagcagcccttcttgagcttgacattgatcttctcatgaggaggactgggctccagatcttcctgggaccaggtcttcaggacagtgtgagctaggttatcagctcagattcagtgagtgctttgtggaaggttggcagagggtcgcgagggtcctctacatttgttctccagtatccagtatcaacactggttaccaaagaggaaggacggactattggtgcccctggtcccagtgattagaaatagctacttcctcagccgagcccagagcctgtgtggccccgagcacagtgctgttcctgactccctgcgctggctctgccaccccctgggccagaagtttttcatggagcggagctggtctgtgaagtcagctgccaaggagagtctatactgtgcccagaggaacccagctgaccccattgcgcaggtccaccaggccttctgcaagaacctgctggagcgagctatagagtccttggtgaaacctcaggccaagaagaaggctggagaccaggaagaagagagctgtgaattctccagtgctctggagtacttgaaattacttcattcttttgtggactctgtgggggttatgagccccccactctccaggagctccgtgctcaagtccgccctgggtccagacatcatctgtcggtggtggacgtctgcaatcactgtggccatcagctggctccagggagacgatgcagctgtgcgctctcattttaccaaagtggaacgcatccccaaggccctggaagtgacagaccacctccacccccaccatcaaccctggcaactttgtcctgtaactaaaatagcctttagcacatggcataaccggagagcttttgacattcctctttggagattcatgtctgcgtcttgggggcattcggcactagtgatgggcagccctgcctgctgactccccggctgtttctaattggatctgagtattctaagagaaactgtaaaatgctccaagacagaaaggccccacgaggtcctatccttagagccaaggctgtagcatttcctatcaagcagacccttaaccggcgcacaggaaggagctgagaagagtaaggaaactgaggcacacgttggaatgactatcttgggtggcttcttagcagcagacgtgatggtgaagcctgtgtctctgacttccagcattgaatgaaggagccccctggtgaaggccatcttccatgcctgcagagccatgcatgcctcactccctgggaaagcagatgggcagcagagttccttctgccattgcgagagggccagtggccacctatggagcagcctcaacgtcagtggggccacctctgaccctgccctcaaccacgtggtccagctgctcacctgtgacctgctactgtcgctacggacagcgctctggcaaaaacaggccagtgccagccaggctgtgggggagacctaccacgcgtcaggcgctgaactggcgggcttccaacgggacctgggcagcctgcgcaggctggcacacagcttccgcccagcataccgcaaggtgttcctgcatgaagccaccgtgcgcctgatggcaggagccagccccacccgcacccaccagctgctggaacacagcctgcggcggcgcaccacgcagagcaccaagcacggagaggtggatgcctggcccggccagcgagagcgggccaccgccatcctgctggcctgccgccacctgcccctctccttcctctcctccccgggccagcgggcagtgctgctggccgaagctgcccgcaccctggagaaggtgggcgaccggcgctcctgcaacgactgccagcagatgattgttaagctgggtggtggcactgccattgccgcctcctgaccaccaggctcagcccacccctccacctctctctcgatttctctctctccccctcagcatcttcccgctgagagtggtggggaagagccttgtcttcttagctgtcacctgccgaggcttctgggccactcaggccagtgcacccctgggcagagccccttaaagctgctgtcactagatgcccatggtccagggcctggtgggcgtgagaggataggtggcagggcagaaactgggcagccctgacttgatagcagcagggggagctcccaagctgccaagcccctgcctccagccttcctgagtttctctctcctgaaccctactctctcctttttgcttcctcagtttttatcaggctttctctgggggacagcagtctctgagcaccagggagcagttgccctcaggcctgtgcccagcatgccctcccctttttatacgaatgttttctaccagtgtgcttgggtttgccatgatgcgaggctgagttgctgtagcgtcttgattctctccctgggtctgcgttccctcccctgggcctgactgagcctgctcattgtttttccctttattacacaggacagccaggggaggaggggggcccagccctgggaggctggtgggaggcagggggcaggcctgcggatgcatgaaataatgttggcattattttttaattttttaaaaaataaatggtatcttatttaat

SEQ ID NO: 29682 - protein, 215 aa, Homo sapiens
MHASLPGKADGQQSSFCHCERASGHLWSSLNVSGATSDPALNHVVQLLTCDLLLSLRTALWQKQASASQAVGETYHASGAELAGFQRDLGSLRRLAHSFRPAYRKVFLHEATVRLMAGASPTRTHQLLEHSLRRRTTQSTKHGEVDAWPGQRERATAILLACRHLPLSFLSSPGQRAVLLAEAARTLEKVGDRRSCNDCQQMIVKLGGGTAIAAS

SEQ ID NO: 29683 - DNA, 801 bp, Homo sapiens
acccgcacacctctagactctcttcctttctaaagatacggaaagaggataccaaacctctctggtaccagcccaactgtccctcctgaccaccaggctcagcccacccctccacctctctctcgatttctctctctccccctcagcatcttcccgctgagagtggtggggaagagccttgtcttcttagctgtcacctgccgaggcttctgggccactcaggccagtgcacccctgggcagagccccttaaagctgctgtcactagatgcccatggtccagggcctggtgggcgtgagaggataggtggcagggcagaaactgggcagccctgacttgatagcagcagggggagctcccaagctgccaagcccctgcctccagccttcctgagtttctctctcctgaaccctactctctcctttttgcttcctcagtttttatcaggctttctctgggggacagcagtctctgagcaccagggagcagttgccctcaggcctgtgcccagcatgccctcccctttttatacgaatgttttctaccagtgtgcttgggtttgccatgatgcgaggctgagttgctgtagcgtcttgattctctccctgggtctgcgttccctcccctgggcctgactgagcctgctcattgtttttccctttattacacaggacagccaggggaggaggggggcccagccctgggaggctggtgggaggcagggggcaggcctgcggatgcatgaaataatgttggcattattttttaattttttaaaaaataaatggtatcttatttaat

SEQ ID NO: 29684 - protein, 40 aa, Homo sapiens
MPSPFYTNVFYQCAWVCHDARLSCCSVLILSLGLRSLPWA

SEQ ID NO: 29685 - DNA, 1737 bp, Homo sapiens
acccgcacacctctagactctcttcctttctaaagatacggaaagaggataccaaacctctctggtaccagcccaactgtccctcctgaccaccaggctcagcccacccctccacctctctctcgatttctctctctccccctcagcatcttcccgctgagagtggtggggaagagccttgtcttcttagctgtcacctgccgaggcttctgggccactcaggccagtgcacccctgggcagagccccttaaagctgctgtcactagatgcccatggtccagggcctggtgggcgtgagaggataggtggcagggcagaaactgggcagccctgacttgatagcagcagggggagctcccaagctgccaagcccctgcctccagccttcctgagtttctctctcctgaaccctactctctcctttttgcttcctcagtttttatcaggctttctctgggggacagcagtctctgagcaccagggagcagttgccctcaggcctgtgcccagcatgccctcccctttttatacgaatgttttctaccagtgtgcttgggtttgccatgatgcgaggctgagttgctgtagcgtcttgattctctccctgggtctgcgttccctcccctgggcctgactgagcctgctcattgtttttccctttattacacaggacagccaggggaggaggggggcccagccctgggaggctggtgggaggcagggggcaggcctgcggatgcatgaaataatgttggcattattttttaattttttaaaaaataaatggtatcttatttaattgtcctgttccttcccactccccgcctcctaggatgttagcccaagctcagggtaggcccagggggctgggagaaatgaagccacccatggggactggggaccaggggccttcagcatggcttctaggttccctcctccccctaccccatctcctacctccacagtacagactgtccccaacttaacagtggttcaacttaaaccatgtttcaactttacaattggtctgttggggtattaaatgaatttgtgacttaggatattttcatttatgatgggtttatcaggaagtaaccccatggtaagttgaggcatatctgtatatatttaaacctaattaattcttgagctgaaaataaataaaccaggatggcagggaccaacccctaatccctccccagcggcaagcccctcttttcagagtgggcagagggttgcctatggtgggcactaggaatgaggtcccctgcctcgatgcgggtcctaggagaaaaagtcctacttttctgggtccccaggtgcagcacctcccggagactgtttctcccatggcctcctgagtgatgggccctgcctccctgtgcctcatcctcaggctggttggagcagagggtgggcaggagccccagcacagactggggggtgctcacagcagggccaccttgatgcaggctggaatgttatccctggggtgtgcttggaccccacctgctttctttctctcctgcccctcccctactctcactgtaatttatggaccctgcccgcctgcgtgttgtgtgtatgtcctgtgccttttctcactattgtttgggtgtgggagggggtggtttttcactgaaaaggggggtacacctatagctttcttgatgttcaatcaatcagtcactgtgtcccagacatattcaataaacacagattggtaccacccagca

SEQ ID NO: 29686 - protein, 123 aa, Homo sapiens
MGPASLCLILRLVGAEGGQEPQHRLGGAHSRATLMQAGMLSLGCAWTPPAFFLSCPSPTLTVIYGPCPPACCVYVLCLFSLLFGCGRGWFFTEKGGTPIAFLMFNQSVTVSQTYSINTDWYHP

SEQ ID NO: 29687 - DNA, 1463 bp, Homo sapiens
ttcccgctgagagtggtggggaagagccttgtcttcttagctgtcacctgccgaggcttctgggccactcaggccagtgcacccctgggcagagccccttaaagctgctgtcactagatgcccatggtccagggcctggtgggcgtgagaggataggtggcagggcagaaactgggcagccctgacttgatagcagcagggggagctcccaagctgccaagcccctgcctccagccttcctgagtttctctctcctgaaccctactctctcctttttgcttcctcagtttttatcaggctttctctgggggacagcagtctctgagcaccagggagcagttgccctcaggcctgtgcccagcatgccctcccctttttatacgaatgttttctaccagtgtgcttgggtttgccatgatgcgaggctgagttgctgtagcgtcttgattctctccctgggtctgcgttccctcccctgggcctgactgagcctgctcattgtttttccctttattacacaggacagccaggggaggaggggggcccagccctgggaggctggtgggaggcagggggcaggcctgcggatgcatgaaataatgttggcattattttttaattttttaaaaaataaatggtatcttatttaattgtcctgttccttcccactccccgcctcctaggatgttagcccaagctcagggtaggcccagggggctgggagaaatgaagccacccatggggactggggaccaggggccttcagcatggcttctaggttccctcctccccctaccccatctcctacctccacagtacagactgtccccaacttaacagtggttcaacttaaaccatgtttcaactttacaattggtctgttggggtattaaatgaatttgtgacttaggatattttcatttatgatgggtttatcaggaagtaaccccatggtaagttgaggcatatctgtatatatttaaacctaattaattcttgagctgaaaataaataaaccaggatggcagggaccaacccctaatccctccccagcggcaagcccctcttttcagagtgggcagagggttgcctatggtgggcactaggaatgaggtcccctgcctcgatgcgggtcctaggagaaaaagtcctacttttctgggtccccaggtgctcacagcagggccaccttgatgcaggctggaatgttatccctggggtgtgcttggaccccacctgctttctttctctcctgcccctcccctactctcactgtaatttatggaccctgcccgcctgcgtgttgtgtgtatgtcctgtgccttttctcactattgtttgggtgtgggagggggtggtttttcactgaaaaggggggtacacctatagctttcttgatgttcaatcaatcagtcactgtgtcccagacatattcaataaacacagattggtaccacccagca

SEQ ID NO: 29688 - protein, 86 aa, Homo sapiens
MRSPASMRVLGEKVLLFWVPRCSQQGHLDAGWNVIPGVCLDPTCFLSLLPLPYSHCNLWTLPACVLCVCPVPFLTIVWVWEGVVFH

SEQ ID NO: 29689 - DNA, 486 bp, Homo sapiens
agggtgggaggcagtggctcctgggggcccggctgcttcagaagctctgtcagcgccctggtcactgtgcgccgcgcgcgcgggctgtgcgccctctccagtcccaggcgcgccccgatgccggccagcaccagcagcgctgcgacgccgcacacagcgtagacggccgtatggctgcgctcgcggccggggtcccggggcgctgcggtgtcgcgggcgcgggcgggcggccggcctgtctggacccaggccggcgtgtcgtagttggaacagcggctctggtcgaggcgccgcggcccgtcgtggcagcagaagcggtagccgcacgtgccgcagcagaagctgtaggctccggagctgcagttgaagggcgggtcccactggcccatcacgtcgtagtagccgcggcagcggtcgcccccctccggggctgtcgtgccgggcgccgcgggaccctgcgcctcgggggctcccgcgcggcccgac

SEQ ID NO: 29690 - protein, 104 aa, Homo sapiens
MAALAAGVPGRCGVAGAGGRPACLDPGRRVVVGTAALVEAPRPVVAAEAVAARAAAEAVGSGAAVEGRVPLAHHVVVAAAAVAPLRGCRAGRRGTLRLGGSRAA

SEQ ID NO: 29691 - DNA, 886 bp, Homo sapiens
gcaccatgaggcgagggccccggagcctgcggggcagggacgcgccagcccccacgccctgcgtcccggccgagtgcttcgacctgctggtccgccactgcgtggcctgcgggctcctgcgcacgccgcggccgaaaccggccggggccagcagccctgcgcccaggacggcgctgcagccgcaggagtcggtgggcgcgggggccggcgaggcggcgctgcccctgcccgggctgctctttggcgcccccgcgctgctgggcctggcactggtcctggcgctggtcctggtgggtctggtgagctggaggcggcgacagcggcggcttcgcggcgcgtcctccgcagaggcccccgacggagacaaggacgccccagagcccctggacaaggtcatcattctgtctccgggaatctctgatgccacagctcctgcctggcctcctcctggggaagacccaggaaccaccccacctggccacagtgtccctgtgccagccacagagctgggctccactgaactggtgaccaccaagacggccggccctgagcaacaatagcagggagccggcaggaggtggcccctgccctccctctggacccccagccaggggcttggaaatcaaattcagctcttcactccagcatgcacatgccctctttctgggaccaggctaactctgcagaagcacagacactacagaccacagcattcagcccccatggagtttggtgtgcttgcctttggcttcagacctcaccatctttgacagcccttgaaggtggtagcccagctcctgttcctgtgccttcaaaaggctggggcactatgagtaaaagaccgcttttaaaatggggaaggcaccattaagccaaaatgaatctg

SEQ ID NO: 29692 - protein, 184 aa, Homo sapiens; identical to SEQ ID NO: 4085

SEQ ID NO: 29693 - DNA, 634 bp, Homo sapiens
gttcaggtactactgcataattacaacgaaaactgattttgaagtacagagtgcatcccaggccccagagcagtttcacatccagatctgggggactgggcctctctgtccccaaggactgctccccatgacactgtgcttgtcccatccccagagtgctctcactttccccaaccccgtccctgaagcatgtagggcccaggccacgcttcacagtcaggtggacacagaccccctgcaggcccctcccatctgctggctcatcttgagagggcccttgccccttaaagcctctgttttctcatctggaaaatgtcctaatagtacctgcatcagatccttgtgagggtgtcttcaggagaattggggcacaaaaatcgacagaaacccccttctctctgaagaccccaaactatcttgttattttattattattttttttttttctgagatggggtctcgcttccagcctgggtgacagagccagactccgtctcaaaaaaaaaagggacgcggtggctcacgtctgtaatcccatcactttgggagggcgaggcgggcagatctcgaggtgaggagatcaagaccatcctggctaacggtgaaaccccgtctctactaaaaatacaaaaaa

SEQ ID NO: 29694 - protein, 72 aa, Homo sapiens
MTLCLSHPQSALTFPNPVPEACRAQATLHSQVDTDPLQAPPICWLILRGPLPLKASVFSSGKCPNSTCIRSL

SEQ ID NO: 29695 - DNA, 750 bp, Homo sapiens
ggcaggcaggccacggagatacctcgtggaaggaggaacagcaagtgcatgggccgagtgtgggacttgcctggtgtgctcaaggtggaaggctttagggccaccatggcgcagcgcctggtgcgcgtgctgcagatctgtgctggccacgtgcccggtgtctcagctctgaacctgctgtccctgctgagaagctctgagggcccctccctggaggacctgtgagggtggctggcccctgggctgccccttctcatggcttcgtgctgactccataaacattctctgttgaggatgtccagtcagggcttgacaggcccaggctcagcccgccgtggctgggaaggttccctgcagtgccagtgctgcagcagggagagctgggcagaagcagcgagggggcccagctggcgagactgtagccccctcccactcccacactcactcttgcagagcctgtgtctttaagcagctggcgtgttacatctccatttaaggtttcctttgaacaaaaggtctgtggctaaaaaaagtttaaaaatcactggtctcattcaccactttgactttgtagatgaggaaactgactcagaacaattaagagtagggcagggtgggccaggtgcagaggctcacgcctgtaatcccagcactttgggaggccgaggtgggtggatcacttgaagtcaggaattcgagaccatcctggccaacatggtgtatccctgtctctacaaaaatacaaaaatt

SEQ ID NO: 29696 - protein, 58 aa, Homo sapiens
MGRVWDLPGVLKVEGFRATMAQRLVRVLQICAGHVPGVSALNLLSLLRSSEGPSLEDL

SEQ ID NO: 29697 - DNA, 1116 bp, Homo sapiens
gtgcccacaggcctgcagcgggtccaaacctcaggcccccagcccgtgccgcttcgcggggtccacttctcgggaaatgtcctccgagccgcctgctggcggtgtcccgatccccccgggagtgggtcgaagggccaggccctccccagggggtgctgtgcctagggctcgactgtccgctctctctccctgcgcagctggtgggcacggaggatgctcttctgcagcagctggcggactcgatgctcaaagaggactgcgcctccgagctgaaggtccacttggcaaagtccctccctttgccctccagtgtgaatcggccccgaattgacctgatcgtgtttgtggttaatcttcacagcaaatacagtctccagaacacagaggagtccctgcgccatgtggatgccagcttcttcttggggaaggtgtgtttcctcgccacaggtggtggaaggctttagggccaccatggcgcagcgcctggtgcgcgtgctgcagatctgtgctggccacgtgcccggtgtctcagctctgaacctgctgtccctgctgagaagctctgagggcccctccctggaggacctgtgagggtggctggcccctgggctgccccttctcatggcttcgtgctgactccataaacattctctgttgaggatgtccagtcagggcttgacaggcccaggctcagcccgccgtggctgggaaggttccctgcagtgccagtgctgcagcagggagagctgggcagaagcagcgagggggcccagctggcgagactgtagccccctcccactcccacactcactcttgcagagcctgtgtctttaagcagctggcgtgttacatctccatttaaggtttcctttgaacaaaaggtctgtggctaaaaaaagtttaaaaatcactggtctcattcaccactttgactttgtagatgaggaaactgactcagaacaattaagagtagggcagggtgggccaggtgcagaggctcacgcctgtaatcccagcactttgggaggccgaggtgggtggatcacttgaagtcaggaattcgagaccatcctggccaacatggtgtatccctgtctctacaaaaatacaaaaatt

SEQ ID NO: 29698 - protein, 84 aa, Homo sapiens
MSSEPPAGGVPIPPGVGRRARPSPGGAVPRARLSALSPCAAGGHGGCSSAAAGGLDAQRGLRLRAEGPLGKVPPFALQCESAPN

SEQ ID NO: 29699 - DNA, 1146 bp, Homo sapiens
ggtcgggtagtagagagtgcggtgcccacaggcctgcagcgggtccaaacctcaggcccccagcccgtgccgcttcgcggggtccacttctcgggaaatgtcctccgagccgcctgctggcggtgtcccgatccccccgggagtgggtcgaagggccaggccctccccagggggtgctgtgcctagggctcgactgtccgctctctctccctgcgcagctggtgggcacggaggatgctcttctgcagcagctggcggactcgatgctcaaagaggactgcgcctccgagctgaaggtgtaagtagcctctccagaacacagaggagtccctgcgccatgtggatgccagcttcttcttggggaaggtgtgtttcctcgccacaggtgctgggcgggagagccactgcagcattcaccggcacaccgtggtgaagctggcccacacctatcaaagccccctgctctactgtgacctggaggtggaaggctttagggccaccatggcgcagcgcctggtgcgcgtgctgcagatctgtgctggccacgtgcccggtgtctcagctctgaacctgctgtccctgctgagaagctctgagggcccctccctggaggacctgtgagggtggctggcccctgggctgccccttctcatggcttcgtgctgactccataaacattctctgttgaggatgtccagtcagggcttgacaggcccaggctcagcccgccgtggctgggaaggttccctgcagtgccagtgctgcagcagggagagctgggcagaagcagcgagggggcccagctggcgagactgtagccccctcccactcccacactcactcttgcagagcctgtgtctttaagcagctggcgtgttacatctccatttaaggtttcctttgaacaaaaggtctgtggctaaaaaaagtttaaaaatcactggtctcattcaccactttgactttgtagatgaggaaactgactcagaacaattaagagtagggcagggtgggccaggtgcagaggctcacgcctgtaatcccagcactttgggaggccgaggtgggtggatcacttgaagtcaggaattcgagaccatcctggccaacatggtgtatccctgtctctacaaaaatacaaaaatt

SEQ ID NO: 29700 - protein, 111 aa, Homo sapiens [sequence omitted]

SEQ ID NO: 29701 - DNA, 1039 bp, Homo sapiens
gactcagggcggtttgaaagatcggcgcgcaccgcaggagcaacggttggtcctgcggctgtgatgtcggtgttgaggcccctggacaagctgcccggcctgaacacggccaccatcttgctggtgggcacggaggatgctcttctgcagcagctggcggactcgatgctcaaagaggactgcgcctccgagctgaaggtccacttggcaaagtccctccctttgccctccagtgtgaatcggccccgaattgacctgatcgtgtttgtggttaatcttcacagcaaatacagtctccagaacacagaggagtccctgcgccatgtggatgccagcttcttcttggggaaggtgtgtttcctcgccacaggtggtggaaggctttagggccaccatggcgcagcgcctggtgcgcgtgctgcagatctgtgctggccacgtgcccggtgtctcagctctgaacctgctgtccctgctgagaagctctgagggcccctccctggaggacctgtgagggtggctggcccctgggctgccccttctcatggcttcgtgctgactccataaacattctctgttgaggatgtccagtcagggcttgacaggcccaggctcagcccgccgtggctgggaaggttccctgcagtgccagtgctgcagcagggagagctgggcagaagcagcgagggggcccagctggcgagactgtagccccctcccactcccacactcactcttgcagagcctgtgtctttaagcagctggcgtgttacatctccatttaaggtttcctttgaacaaaaggtctgtggctaaaaaaagtttaaaaatcactggtctcattcaccactttgactttgtagatgaggaaactgactcagaacaattaagagtagggcagggtgggccaggtgcagaggctcacgcctgtaatcccagcactttgggaggccgaggtgggtggatcacttgaagtcaggaattcgagaccatcctggccaacatggtgtatccctgtctctacaaaaatacaaaaatt

SEQ ID NO: 29702 - protein, 107 aa, Homo sapiens; identical to SEQ ID NO: 4087

SEQ ID NO: 29703 - DNA, 2179 bp, Homo sapiens
ctctaggggctggactcagggcggtttgaaagatcggcgcgcaccgcaggagcaacggttggtcctgcggctgtgatgtcggtgttgaggcccctggacaagctgcccggcctgaacacggccaccatcttgctggtgggcacggaggatgctcttctgcagcagctggcggactcgatgctcaaagaggactgcgcctccgagctgaaggtccacttggcaaagtccctccctttgccctccagtgtgaatcggccccgaattgacctgatcgtgtttgtggttaatcttcacagcaaatacagtctccagaacacagaggagtccctgcgccatgtggatgccagcttcttcttggggaaggtgtgtttcctcgccacaggtggtaagtacgttcctcgcctgttactgcccacccccagccaagggaaagctggggcggccgtaggcttcttgctgaggcaccctgggtgatggaaagagcatgtattttacacacactggggcctatcggagggtggagggcaggaagaaggagaagatctggaaaaataactaatgggtactaggcttaatacctgggtgacaatgatctgtacaacaaaccccatgacacaagttttaactacataacaaatctgcacatgtacccctgaacttaaaataaaagttaaatttaaaaaccgaaagaacacatatacacatactttggaatctgacctgttgtcagcctttctaagagtgaatatgagcagataactctgccattacttggagttgcctagtggttgcctgtggctttcggtaaaatccaaactctaaagacataaaacactttgcagtttggcctctgccttctgagctagtctcatctccggtgactctccttctctgggtcagcttatcgttctctgaaaaagtcctgctgttcctgagactttgtaatattaacagtgaaaataataatggctgacatcttttgagctgtcactgtgaggcagacacggtaattgctttgttttcatattcctattggaggtaggtgttattacctctgttttacagtcatgaggttaagttgccccaggcccctagatgaaaagtggtagagccaaggtttacacctaggtaagtcctgttacagggcccgtcccttttttttttttttttttttgagacggagtctcgctcagccgcccaggctggagtgctatggcgtgatctcagctcaccgcaaccaccgtctccctggttcaagcaattctcccatctcagcctcccgagtagctgggattacaggcacccgccatcatgcccagctaatttttgtattttagtagagatggggtttcaccatgttggccaggctggtcttgaactcctgacctcaggtatccgcctgcctcagatagtgctgggattacaggcctgaagccactgcagcattcaccggcacaccgtggtgaagctggcccacacctatcaaagccccctgctctactgtgacctggaggtggaaggctttagggccaccatggcgcagcgcctggtgcgcgtgctgcagatctgtgctggccacgtgcccggtgtctcagctctgaacctgctgtccctgctgagaagctctgagggcccctccctggaggacctgtgagggtggctggcccctgggctgccccttctcatggcttcgtgctgactccataaacattctctgttgaggatgtccagtcagggcttgacaggcccaggctcagcccgccgtggctgggaaggttccctgcagtgccagtgctgcagcagggagagctgggcagaagcagcgagggggcccagctggcgagactgtagccccctcccactcccacactcactcttgcagagcctgtgtctttaagcagctggcgtgttacatctccatttaaggtttcctttgaacaaaaggtctgtggctaaaaaaagtttaaaaatcactggtctcattcaccactttgactttgtagatgaggaaactgactcagaacaattaagagtagggcagggtgggccaggtgcagaggctcacgcctgtaatcccagcactttgggaggccgaggtgggtggatcacttgaagtcaggaattcgagaccatcctggccaacatggtgtatccctgtctctacaaaaatacaaaaatt

SEQ ID NO: 29704 - protein, 132 aa, Homo sapiens
MSVLRPLDKLPGLNTATILLVGTEDALLQQLADSMLKEDCASELKVHLAKSLPLPSSVNRPRIDLIVFVVNLHSKYSLQNTEESLRHVDASFFLGKVCFLATGGKYVPRLLLPTPSQGKAGAAVGFLLRHPG

SEQ ID NO: 29705 - DNA, 559 bp, Homo sapiens
ggcaggcaggccacggagatacctcgtggaaggaggaacagcaagtgcatgggccgagtgtgggacttgcctggtgtgctcaaggtggaaggctttagggccaccatggcgcagcgcctggtgcgcgtgctgcagatctgtgctggccacgtgcccggtgtctcagctctgaacctgctgtccctgctgagaagctctgagggcccctccctggaggacctgtgagggtggctggcccctgggctgccccttctcatggcttcgtgctgactccataaacattctctgttgaggatgtccagtcagggcttgacaggcccaggctcagcccgccgtggctgggaaggttccctgcagtgccagtgctgcagcagggagagctgggcagaagcagcgagggggcccagctggcgagactgtagccccctcccactcccacactcactcttgcagagcctgtgtctttaagcagctggcgtgttacatctccatttaaggtttcctttgaacaaaaggtctgtggctaaaaaaagtttaaaaatcactggtctcattcacc

SEQ ID NO: 29706 - protein, 58 aa, Homo sapiens; identical to SEQ ID NO: 29696

SEQ ID NO: 29707 - DNA, 925 bp, Homo sapiens
gtgcccacaggcctgcagcgggtccaaacctcaggcccccagcccgtgccgcttcgcggggtccacttctcgggaaatgtcctccgagccgcctgctggcggtgtcccgatccccccgggagtgggtcgaagggccaggccctccccagggggtgctgtgcctagggctcgactgtccgctctctctccctgcgcagctggtgggcacggaggatgctcttctgcagcagctggcggactcgatgctcaaagaggactgcgcctccgagctgaaggtccacttggcaaagtccctccctttgccctccagtgtgaatcggccccgaattgacctgatcgtgtttgtggttaatcttcacagcaaatacagtctccagaacacagaggagtccctgcgccatgtggatgccagcttcttcttggggaaggtgtgtttcctcgccacaggtggtggaaggctttagggccaccatggcgcagcgcctggtgcgcgtgctgcagatctgtgctggccacgtgcccggtgtctcagctctgaacctgctgtccctgctgagaagctctgagggcccctccctggaggacctgtgagggtggctggcccctgggctgccccttctcatggcttcgtgctgactccataaacattctctgttgaggatgtccagtcagggcttgacaggcccaggctcagcccgccgtggctgggaaggttccctgcagtgccagtgctgcagcagggagagctgggcagaagcagcgagggggcccagctggcgagactgtagccccctcccactcccacactcactcttgcagagcctgtgtctttaagcagctggcgtgttacatctccatttaaggtttcctttgaacaaaaggtctgtggctaaaaaaagtttaaaaatcactggtctcattcacc

SEQ ID NO: 29708 - protein, 84 aa, Homo sapiens; identical to SEQ ID NO: 29698

SEQ ID NO: 29709 - DNA, 955 bp, Homo sapiens
ggtcgggtagtagagagtgcggtgcccacaggcctgcagcgggtccaaacctcaggcccccagcccgtgccgcttcgcggggtccacttctcgggaaatgtcctccgagccgcctgctggcggtgtcccgatccccccgggagtgggtcgaagggccaggccctccccagggggtgctgtgcctagggctcgactgtccgctctctctccctgcgcagctggtgggcacggaggatgctcttctgcagcagctggcggactcgatgctcaaagaggactgcgcctccgagctgaaggtgtaagtagcctctccagaacacagaggagtccctgcgccatgtggatgccagcttcttcttggggaaggtgtgtttcctcgccacaggtgctgggcgggagagccactgcagcattcaccggcacaccgtggtgaagctggcccacacctatcaaagccccctgctctactgtgacctggaggtggaaggctttagggccaccatggcgcagcgcctggtgcgcgtgctgcagatctgtgctggccacgtgcccggtgtctcagctctgaacctgctgtccctgctgagaagctctgagggcccctccctggaggacctgtgagggtggctggcccctgggctgccccttctcatggcttcgtgctgactccataaacattctctgttgaggatgtccagtcagggcttgacaggcccaggctcagcccgccgtggctgggaaggttccctgcagtgccagtgctgcagcagggagagctgggcagaagcagcgagggggcccagctggcgagactgtagccccctcccactcccacactcactcttgcagagcctgtgtctttaagcagctggcgtgttacatctccatttaaggtttcctttgaacaaaaggtctgtggctaaaaaaagtttaaaaatcactggtctcattcacc

SEQ ID NO: 29710 - protein, 111 aa, Homo sapiens [sequence omitted]

SEQ ID NO: 29711 - DNA, 1093 bp, Homo sapiens
ggttttcccgcgtctgggggtctggcctcctggagaggccggcggtgggagcgagggtcgggtagtagagagtgcggtgcccacaggcctgcagcgggtccaaacctcaggcccccagcccgtgccgcttcgcggggtccacttctcgggaaatgtcctccgagccgcctgctggcggtgtcccgatccccccgggagtgggtcgaagggccaggccctccccagggggtgctgtgcctagggctcgactgtccgctctctctccctgcgcagctggtgggcacggaggatgctcttctgcagcagctggcggactcgatgctcaaagaggactgcgcctccgagctgaaggtccacttggcaaagtccctccctttgccctccagtgtgaatcggccccgaattgacctgatcgtgtttgtggttaatcttcacagcaaatacagtctccagaacacagaggagtccctgcgccatgtggatgccagcttcttcttggggaaggtgtgtttcctcgccacaggtgctgggcgggagagccactgcagcattcaccggcacaccgtggtgaagctggcccacacctatcaaagccccctgctctactgtgacctggaggtggaaggctttagggccaccatggcgcagcgcctggtgcgcgtgctgcagatctgtgctggccacgtgcccggtgtctcagctctgaacctgctgtccctgctgagaagctctgagggcccctccctggaggacctgtgagggtggctggcccctgggctgccccttctcatggcttcgtgctgactccataaacattctctgttgaggatgtccagtcagggcttgacaggcccaggctcagcccgccgtggctgggaaggttccctgcagtgccagtgctgcagcagggagagctgggcagaagcagcgagggggcccagctggcgagactgtagccccctcccactcccacactcactcttgcagagcctgtgtctttaagcagctggcgtgttacatctccatttaaggtttcctttgaacaaaaggtctgtggctaaaaaaagtttaaaaatcactggtctcattcacc

SEQ ID NO: 29712 - protein, 146 aa, Homo sapiens
MLKEDCASELKVHLAKSLPLPSSVNRPRIDLIVFVVNLHSKYSLQNTEESLRHVDASFFLGKVCFLATGAGRESHCSIHRHTVVKLAHTYQSPLLYCDLEVEGFRATMAQRLVRVLQICAGHVPGVSALNLLSLLRSSEGPSLEDL

SEQ ID NO: 29713 - DNA, 848 bp, Homo sapiens
gactcagggcggtttgaaagatcggcgcgcaccgcaggagcaacggttggtcctgcggctgtgatgtcggtgttgaggcccctggacaagctgcccggcctgaacacggccaccatcttgctggtgggcacggaggatgctcttctgcagcagctggcggactcgatgctcaaagaggactgcgcctccgagctgaaggtccacttggcaaagtccctccctttgccctccagtgtgaatcggccccgaattgacctgatcgtgtttgtggttaatcttcacagcaaatacagtctccagaacacagaggagtccctgcgccatgtggatgccagcttcttcttggggaaggtgtgtttcctcgccacaggtggtggaaggctttagggccaccatggcgcagcgcctggtgcgcgtgctgcagatctgtgctggccacgtgcccggtgtctcagctctgaacctgctgtccctgctgagaagctctgagggcccctccctggaggacctgtgagggtggctggcccctgggctgccccttctcatggcttcgtgctgactccataaacattctctgttgaggatgtccagtcagggcttgacaggcccaggctcagcccgccgtggctgggaaggttccctgcagtgccagtgctgcagcagggagagctgggcagaagcagcgagggggcccagctggcgagactgtagccccctcccactcccacactcactcttgcagagcctgtgtctttaagcagctggcgtgttacatctccatttaaggtttcctttgaacaaaaggtctgtggctaaaaaaagtttaaaaatcactggtctcattcacc

SEQ ID NO: 29714 - protein, 107 aa, Homo sapiens; identical to SEQ ID NO: 4087

SEQ ID NO: 29715 - DNA, 1988 bp, Homo sapiens
ctctaggggctggactcagggcggtttgaaagatcggcgcgcaccgcaggagcaacggttggtcctgcggctgtgatgtcggtgttgaggcccctggacaagctgcccggcctgaacacggccaccatcttgctggtgggcacggaggatgctcttctgcagcagctggcggactcgatgctcaaagaggactgcgcctccgagctgaaggtccacttggcaaagtccctccctttgccctccagtgtgaatcggccccgaattgacctgatcgtgtttgtggttaatcttcacagcaaatacagtctccagaacacagaggagtccctgcgccatgtggatgccagcttcttcttggggaaggtgtgtttcctcgccacaggtggtaagtacgttcctcgcctgttactgcccacccccagccaagggaaagctggggcggccgtaggcttcttgctgaggcaccctgggtgatggaaagagcatgtattttacacacactggggcctatcggagggtggagggcaggaagaaggagaagatctggaaaaataactaatgggtactaggcttaatacctgggtgacaatgatctgtacaacaaaccccatgacacaagttttaactacataacaaatctgcacatgtacccctgaacttaaaataaaagttaaatttaaaaaccgaaagaacacatatacacatactttggaatctgacctgttgtcagcctttctaagagtgaatatgagcagataactctgccattacttggagttgcctagtggttgcctgtggctttcggtaaaatccaaactctaaagacataaaacactttgcagtttggcctctgccttctgagctagtctcatctccggtgactctccttctctgggtcagcttatcgttctctgaaaaagtcctgctgttcctgagactttgtaatattaacagtgaaaataataatggctgacatcttttgagctgtcactgtgaggcagacacggtaattgctttgttttcatattcctattggaggtaggtgttattacctctgttttacagtcatgaggttaagttgccccaggcccctagatgaaaagtggtagagccaaggtttacacctaggtaagtcctgttacagggcccgtcccttttttttttttttttttttgagacggagtctcgctcagccgcccaggctggagtgctatggcgtgatctcagctcaccgcaaccaccgtctccctggttcaagcaattctcccatctcagcctcccgagtagctgggattacaggcacccgccatcatgcccagctaatttttgtattttagtagagatggggtttcaccatgttggccaggctggtcttgaactcctgacctcaggtatccgcctgcctcagatagtgctgggattacaggcctgaagccactgcagcattcaccggcacaccgtggtgaagctggcccacacctatcaaagccccctgctctactgtgacctggaggtggaaggctttagggccaccatggcgcagcgcctggtgcgcgtgctgcagatctgtgctggccacgtgcccggtgtctcagctctgaacctgctgtccctgctgagaagctctgagggcccctccctggaggacctgtgagggtggctggcccctgggctgccccttctcatggcttcgtgctgactccataaacattctctgttgaggatgtccagtcagggcttgacaggcccaggctcagcccgccgtggctgggaaggttccctgcagtgccagtgctgcagcagggagagctgggcagaagcagcgagggggcccagctggcgagactgtagccccctcccactcccacactcactcttgcagagcctgtgtctttaagcagctggcgtgttacatctccatttaaggtttcctttgaacaaaaggtctgtggctaaaaaaagtttaaaaatcactggtctcattcacc

SEQ ID NO: 29716 - protein, 132 aa, Homo sapiens; identical to SEQ ID NO: 29704

SEQ ID NO: 29717 - DNA, 965 bp, Homo sapiens
cccccaggccgcgctctaggggctggactcagggcggtttgaaagatcggcgcgcaccgcaggagcaacggttggtcctgcggctgtgatgtcggtgttgaggcccctggacaagctgcccggcctgaacacggccaccatcttgctggtgggcacggaggatgctcttctgcagcagctggcggactcgatgctcaaagaggactgcgcctccgagctgaaggtccacttggcaaagtccctccctttgccctccagtgtgaatcggccccgaattgacctgatcgtgtttgtggttaatcttcacagcaaatacagtctccagaacacagaggagtccctgcgccatgtggatgccagcttcttcttggggaaggtgtgtttcctcgccacaggtgctgggcgggagagccactgcagcattcaccggcacaccgtggtgaagctggcccacacctatcaaagccccctgctctactgtgacctggaggtggaaggctttagggccaccatggcgcagcgcctggtgcgcgtgctgcagatctgtgctggccacgtgcccggtgtctcagctctgaacctgctgtccctgctgagaagctctgagggcccctccctggaggacctgtgagggtggctggcccctgggctgccccttctcatggcttcgtgctgactccataaacattctctgttgaggatgtccagtcagggcttgacaggcccaggctcagcccgccgtggctgggaaggttccctgcagtgccagtgctgcagcagggagagctgggcagaagcagcgagggggcccagctggcgagactgtagccccctcccactcccacactcactcttgcagagcctgtgtctttaagcagctggcgtgttacatctccatttaaggtttcctttgaacaaaaggtctgtggctaaaaaaagtttaaaaatcactggtctcattcacc

SEQ ID NO: 29718 - protein, 180 aa, Homo sapiens; identical to SEQ ID NO: 4089

SEQ ID NO: 29719 - DNA, 1582 bp, Homo sapiens
gcctcctgagtagctggaactacaggcaagtgccaccatggggatctggccatgttgcccaggtgggtcgtaaactcctggcctcaagcagccctcctgcttcagcctcctgagtagctgggactaccgctgcacaccagcaggccctgccaattgactgcttttacagtgagtgcacccagggcggccgcagatggcagtgtctctggggacagcagctgcgaatgagtccacgggccaatgctgagctgctcaggctgaggcggtgtgctcagcacagagcccccggaactggcatctgcagggcgtgagccaaggccgccgcgatgccgcacttcctggactggttcgtgccggtctacttggtcatctcggtcctcattctggtgggcttcggcgcctgcatctactacttcgagccgggcctgcaggaggcgcacaagtggcgcatgcagcgccccctggtggaccgcgacctccgcaagacgctaatggtgcgcgacaacctggccttcggcggcccggaggtctgagccgacttgcaaaggggataggcgggcggcaccgggcgccctcccccagcccgccccgcccgcccagcccggagacccccaaggcagagggaggccggcctgttggccctccacgctatccctctgcagcctgggccctcccgacagaggccccaggtgcgctggcagtggaggtggggcacttaggtgcctggctggcccagggcttgctctccgtgtcaagccgactcacccagagcccaccctcccaagctcaggggcatcctccgctgggccccagtgcctttgcgctgcgcagcactctgccctccactggactcaggcatgtctatggctgcctgtcctgaggctccggagccctcatttcttcgtgaagtccccagctcccctgcctccactcaatggcaccggccctgcaactttaggcaggtcgaagccaacccaaggaaagaacctaagaacctcgtttggagggatgtcagcttgggccagaccagccgcaccccgcggggctcaggcttggaactggtgagggtgtgtggtgggggtatgcagagggataagaccgtggtagaggagagggttggtgaggagagagagagagagagagagagagtctggggggagcgggcaagcatggggagatgagatgtgtatatgtgagagagagtgtgggggccccaggcagggcaggaggtggtggaaacggggtgaactccgtgggctgtgtgaggactgtccatagtgggtcccaaccccctccctctgctggagtttcctagcccttccccctccccaagactgtggcagcaggcaggagcccctgccctccctccctgtcctgtgccacacttctggggccaaacccagcccccttgagccaggccctgccagactccaagcccaccctagaaccctcctcctgtgtggagactctgttgccccactttggacacagattggcaacctgcctcaccccgccccccttcgctggggcttccatcttaatttattctcaataataaagacttcatgatgatctctgcagg

SEQ ID NO: 29720 - protein, 107 aa, Homo sapiens; identical to SEQ ID NO: 5292

SEQ ID NO: 29721 - DNA, 1505 bp, Homo sapiens
agtccaggactgccccctcctggcccactcagagcccctgggtgtgagaagctcgtctcccgtgggttgcattggctctgccctatctctgcctccagcacccagggcggccgcagatggcagtgtctctggggacagcagctgcgaatgagtccacgggccaatgctgagctgctcaggctgaggcggtgtgctcagcacagagcccccggaactggcatctgcagggcgtgagccaaggccgccgcgatgccgcacttcctggactggttcgtgccggtctacttggtcatctcggtcctcattctggtgggcttcggcgcctgcatctactacttcgagccgggcctgcaggaggcgcacaagtggcgcatgcagcgccccctggtggaccgcgacctccgcaagacgctaatggtgcgcgacaacctggccttcggcggcccggaggtctgagccgacttgcaaaggggataggcgggcggcaccgggcgccctcccccagcccgccccgcccgcccagcccggagacccccaaggcagagggaggccggcctgttggccctccacgctatccctctgcagcctgggccctcccgacagaggccccaggtgcgctggcagtggaggtggggcacttaggtgcctggctggcccagggcttgctctccgtgtcaagccgactcacccagagcccaccctcccaagctcaggggcatcctccgctgggccccagtgcctttgcgctgcgcagcactctgccctccactggactcaggcatgtctatggctgcctgtcctgaggctccggagccctcatttcttcgtgaagtccccagctcccctgcctccactcaatggcaccggccctgcaactttaggcaggtcgaagccaacccaaggaaagaacctaagaacctcgtttggagggatgtcagcttgggccagaccagccgcaccccgcggggctcaggcttggaactggtgagggtgtgtggtgggggtatgcagagggataagaccgtggtagaggagagggttggtgaggagagagagagagagagagagagagtctggggggagcgggcaagcatggggagatgagatgtgtatatgtgagagagagtgtgggggccccaggcagggcaggaggtggtggaaacggggtgaactccgtgggctgtgtgaggactgtccatagtgggtcccaaccccctccctctgctggagtttcctagcccttccccctccccaagactgtggcagcaggcaggagcccctgccctccctccctgtcctgtgccacacttctggggccaaacccagcccccttgagccaggccctgccagactccaagcccaccctagaaccctcctcctgtgtggagactctgttgccccactttggacacagattggcaacctgcctcaccccgccccccttcgctggggcttccatcttaatttattctcaataataaagacttcatgatgatctctgcagg

SEQ ID NO: 29722 - protein, 107 aa, Homo sapiens; identical to SEQ ID NO: 5292

SEQ ID NO: 29723 - DNA, 4636 bp, Homo sapiens
ggcggcggcaacggtgcgcgcggacaggggcggcgcggcgccgagcgagccgaggcgaggtcccggggaggccccgcgcccggagcatctccctggaggaacggagacaaaggaggattcatgtccaaagggctcccagagaccaggacggacgcagccatgtcagagctggtgcctgagcccaggcctaagccagcggtgcccatgaagcccatgagcatcaactccaacctgctgggctacatcggcatcgacaccatcatcgagcagatgcgcaagaagaccatgaagaccggtttcgacttcaacatcatggtcgttggccagagtggactgggcaaatcaacgctggtcaacacgctcttcaaatcccaagtgagccgcaaggcctccagctggaaccgggaggagaagatccccaagacagtggagatcaaagctatcgggcatgtgatagaggaaggcggtgtcaaaatgaagctgaccgtcatcgacaccccaggctttggagaccaaatcaacaatgaaaactgctgggagcccattgagaagtacatcaatgagcagtacgagaagttcctgaaggaggaggtcaacatcgccaggaagaaacgcatccctgacactcgtgtccactgctgcctttacttcatctctcccacaggacactccttgcgacctctggatcttgagttcatgaaacacctcagcaaggttgtgaacatcatccctgtcattgctaaggctgacaccatgaccctggaggagaagtctgaattcaagcaaagggttcgcaaggagcttgaagtaaatggcattgaattctacccccagaaggaatttgatgaggatttggaggataagacggagaatgacaaaatcaggcaggagagcatgccttttgctgtggtgggaagtgacaaggagtaccaagtgaatggcaagagggtcctcggccgaaaaactccatgggggatcatcgaagtggaaaacctcaaccactgtgagtttgccctgcttcgagactttgtcatcaggacccacctccaggacctcaaggaagtgacacacaacatccactatgagacttacagggccaagcggctcaatgacaatggaggcctccctccggtgagcgtggacacagaggaaagccacgacagtaacccatgacgaccacttctctgtgtcatcacacatacccacttcacacacacacatcccaaataccaccaccaaccaccttcttcctctcaactctgtcccacaggcctgtctggtatttgtggagcatcttgtctgtgtgtgtgtgtgtgtgtgtgtgtgtgtgtgtgtgtgtgacagagagagagcgagagagcctgtgtgtgtgcatgcaggggtgaggtattttcactgccctccctggagagtcccttgtaagtttggctcctccatgcctgtccattatctgtctcctttccttgtgtcccaaaacaaagctgtttgcctcactcaggagatctgggggaggtttcatttaaaagtgctgggagcaggtgagccacaggcaactcttctctcggaacctgcacacaaactggggctatagagattctccaaggacagatggcagtggagctagacctgagtagggggcagggagttcaggacaaccctcctgtaagttgggggtggtctgggggtaaggctggggcttcctgggaaaaggaaggccatgagaaggcagagaagtaggccagagctgggttcttgcagaaagcatcagtgcctacaaatggagctccacccttcagtctgtgtcgtgttcagtgtcacaaagctaccacctgtcaccagagcctactgctgctctccactcaactggcctctgctgccaggccactgcctgtctctgcttccgactttgtcttctttctccctttccctccttccctcatacattgctttctctccctctcctgcgtgtctctgacatctctcacttccttttagatgaatctactttaggttcattcctatatttagcatttatgcccagtctacttccagaaatgactttagactgcctttcacataaaatcacaaaactacaggacagtacaaacagattgccagagaaatctgggtcaaagaaaggaataggaaagaaagtttctgtagtcaagcacctgaacaggccctgagctcacaggcagccaatgtaaagagggaaacacagtgagttatgcagttcccagtgtccagttaaaggaagcacacatgctagtcatgtgagacaaccttttattgggacatcaggttctagaactaattctaaagaagtatcagaaacaatatacataatttgtctttcttagtaatttggcttcaaagacaaatttttgaccacacctccgttttctccgtcagacttctctcccttctaagcaggcttctctgttgctccatttgcttcatacatacttgacctctcttttctattccccatcacttttgtgctgaagctaatcatatttatgtctgtctttctctacttttccctaattccctctcctcctgactcctgtagacattcccaatgatacccaccgtcatacatttaggcttttcttgcctttccctgaagccctgtatttattaatgcatatatttcccctgcttgttgtacaagtaagttactcttttcctttaatctgtaagattcatgaaattcggggccagggaaacagtttagccttagggaagggaaaacactaagtgaaactgtttacaataacctcatacaaccttctgtcccatctcctggttcagcctaggtgtttcactggtcctctatgaatcccagcacttataatcccagtcttttatcactcaggtgctaggaaaaaaaacatagactcaagacccaagattcaatggaccaggagaaaggggggcggtgatcaggtcaccagtgaccccaacctatgctctcggtctttcctggaggctgccaacccagccctcatcctcccttgctcacaaagttacagggtaggcacctgtcaggacagaacagcagcagcgctacagcccagaggttatacatttcaacagaacagggatccttggctactgtagaagcagtcctgtatggagaccttggaccagcaggggaagatctatgggcatgggaggtgggcgttggaaaggctgagtaggaatggtgcctggcacccctgaaccatgatctgagcctccctggagaaggtattttatatgtctgctgccagctgctggtctccacaccctcaaccgttctcaacccccctgcagggagaaggcctcctgggcactgtccttccacctgtgccagccaccccctgccccactgctgaatgaaggccatttcaagcgctgcttctcactccattcctctcagctgttattgctgcagggccaagccctttttagtgctgtgctcgtccagctcaccaccacagcccctctcagccctcagtaggtgggaggggccagctgcctctttaggccagttgcatcctccatttatccaaaccactcctctcctcccagtggagtggggttctgccagtacagccctactgcatcatctgcgtcagccggtcctagcccatctgcagggtgaaagaactcatcaagagctccttctgcccttgtaagcccatcccagctacttgtaaccatctctaagggcaatggcattgctccctacccattcatctgcatgagctactcttggcttccttaaagggtcaagaaagcaatttttctgcttactagattcattgagatcagctgtgtgagccccaaagtgggacaagggtgtctccttcattacttaaagatattcatgagggtgggtcactacagatgttggggagcaagggctaggatcactttttaaaaaatcaccacttgtggctgtcccagagtgcggttgtacatcctccccacctcataacgcagccactgaggaagagtggttttcctaagaagacattgctggagttgactttcttctgtccaaacaaacaaacaaaaactaaacacacacacaaacccccagaaacccacaatatgtacacgctaaggaaaaactagcacccttctgtccactcagcaataagagggatctcttcccacctaccctacctactcctacccccaacccccttccccattaatgtgagtaatgaattagcctgaccacaggtggtcactgtaggctaatggaaaatacccaagggagggcaaagccccccatcagatgcatgaatgtttgcgaatgttgactgccactgccccacacactgtgtctttatagaattcccctttgcccaccctcttcctgtctccacctggacacaacttgctcaaaggctggtgacttgtgggccattcatctacaaccaagtcctgatggagcaagaggcccacgcctaggggatgcaagaacaacccgtttcttaaatgttaccagtcccagccaatcttacggtgacattacagttaaatttcccaattgaaaacaagcaaacagacactcaaactggtcctgtaattgttgctagactttatgtgttgtacaactaaacattgctgtttgaacagt

SEQ ID NO: 29724 - protein, 350 aa, Homo sapiens
MSKGLPETRTDAAMSELVPEPRPKPAVPMKPMSINSNLLGYIGIDTIIEQMRKKTMKTGFDFNIMVVGQSGLGKSTLVNTLFKSQVSRKASSWNREEKIPKTVEIKAIGHVIEEGGVKMKLTVIDTPGFGDQINNENCWEPIEKYINEQYEKFLKEEVNIARKKRIPDTRVHCCLYFISPTGHSLRPLDLEFMKHLSKVVNIIPVIAKADTMTLEEKSEFKQRVRKELEVNGIEFYPQKEFDEDLEDKTENDKIRQESMPFAVVGSDKEYQVNGKRVLGRKTPWGIIEVENLNHCEFALLRDFVIRTHLQDLKEVTHNIHYETYRAKRLNDNGGLPPVSVDTEESHDSNP

SEQ ID NO: 29725 - DNA, 2449 bp, Homo sapiens
ggcggcggcaacggtgcgcgcggacaggggcggcgcggcgccgagcgagccgaggcgaggtcccggggaggccccgcgcccggagcatctccctggaggaacggagacaaaggaggattcatgtccaaagggctcccagagaccaggacggacgcagccatgtcagagctggtgcctgagcccaggcctaagccagcggtgcccatgaagcccatgagcatcaactccaacctgctgggctacatcggcatcgacaccatcatcgagcagatgcgcaagaagaccatgaagaccggtttcgacttcaacatcatggtcgttggccagagtggactgggcaaatcaacgctggtcaacacgctcttcaaatcccaagtgagccgcaaggcctccagctggaaccgggaggagaagatccccaagacagtggagatcaaagctatcgggcatgtgatagaggaaggcggtgtcaaaatgaagctgaccgtcatcgacaccccaggctttggagaccaaatcaacaatgaaaactgctgggagcccattgagaagtacatcaatgagcagtacgagaagttcctgaaggaggaggtcaacatcgccaggaagaaacgcatccctgacactcgtgtccactgctgcctttacttcatctctcccacaggacactccttgcgacctctggatcttgagttcatgaaacacctcagcaaggttgtgaacatcatccctgtcattgctaaggctgacaccatgaccctggaggagaagtctgaattcaagcaaagggttcgcaaggagcttgaagtaaatggcattgaattctacccccagaaggaatttgatgaggatttggaggataagacggagaatgacaaaatcaggcaggagagcatgccttttgctgtggtgggaagtgacaaggagtaccaagtgaatggcaagagggtcctcggccgaaaaactccatgggggatcatcgaagtggaaaacctcaaccactgtgagtttgccctgcttcgagactttgtcatcaggacccacctccaggacctcaaggaagtgacacacaacatccactatgagacttacagggccaagcggctcaatgacaatggaggcctccctccgggagaaggcctcctgggcactgtccttccacctgtgccagccaccccctgccccactgctgaatgaaggccatttcaagcgctgcttctcactccattcctctcagctgttattgctgcagggccaagccctttttagtgctgtgctcgtccagctcaccaccacagcccctctcagccctcagtaggtgggaggggccagctgcctctttaggccagttgcatcctccatttatccaaaccactcctctcctcccagtggagtggggttctgccagtacagccctactgcatcatctgcgtcagccggtcctagcccatctgcagggtgaaagaactcatcaagagctccttctgcccttgtaagcccatcccagctacttgtaaccatctctaagggcaatggcattgctccctacccattcatctgcatgagctactcttggcttccttaaagggtcaagaaagcaatttttctgcttactagattcattgagatcagctgtgtgagccccaaagtgggacaagggtgtctccttcattacttaaagatattcatgagggtgggtcactacagatgttggggagcaagggctaggatcactttttaaaaaatcaccacttgtggctgtcccagagtgcggttgtacatcctccccacctcataacgcagccactgaggaagagtggttttcctaagaagacattgctggagttgactttcttctgtccaaacaaacaaacaaaaactaaacacacacacaaacccccagaaacccacaatatgtacacgctaaggaaaaactagcacccttctgtccactcagcaataagagggatctcttcccacctaccctacctactcctacccccaacccccttccccattaatgtgagtaatgaattagcctgaccacaggtggtcactgtaggctaatggaaaatacccaagggagggcaaagccccccatcagatgcatgaatgtttgcgaatgttgactgccactgccccacacactgtgtctttatagaattcccctttgcccaccctcttcctgtctccacctggacacaacttgctcaaaggctggtgacttgtgggccattcatctacaaccaagtcctgatggagcaagaggcccacgcctaggggatgcaagaacaacccgtttcttaaatgttaccagtcccagccaatcttacggtgacattacagttaaatttcccaattgaaaacaagcaaacagacactcaaactggtcctgtaattgttgctagactttatgtgttgtacaactaaacattgctgtttgaacagt

SEQ ID NO: 29726 - protein, 358 aa, Homo sapiens
MSKGLPETRTDAAMSELVPEPRPKPAVPMKPMSINSNLLGYIGIDTIIEQMRKKTMKTGFDFNIMVVGQSGLGKSTLVNTLFKSQVSRKASSWNREEKIPKTVEIKAIGHVIEEGGVKMKLTVIDTPGFGDQINNENCWEPIEKYINEQYEKFLKEEVNIARKKRIPDTRVHCCLYFISPTGHSLRPLDLEFMKHLSKVVNIIPVIAKADTMTLEEKSEFKQRVRKELEVNGIEFYPQKEFDEDLEDKTENDKIRQESMPFAVVGSDKEYQVNGKRVLGRKTPWGIIEVENLNHCEFALLRDFVIRTHLQDLKEVTHNIHYETYRAKRLNDNGGLPPGEGLLGTVLPPVPATPCPTAE

SEQ ID NO: 29727 - DNA, 2783 bp, Homo sapiens
ggcggcggcaacggtgcgcgcggacaggggcggcgcggcgccgagcgagccgaggcgaggtcccggggaggccccgcgcccggagcatctccctggaggaacggagacaaaggaggattcatgtccaaagggctcccagagaccaggacggacgcagccatgtcagagctggtgcctgagcccaggcctaagccagcggtgcccatgaagcccatgagcatcaactccaacctgctgggctacatcggcatcgacaccatcatcgagcagatgcgcaagaagaccatgaagaccggtttcgacttcaacatcatggtcgttggccagagtggactgggcaaatcaacgctggtcaacacgctcttcaaatcccaagtgagccgcaaggcctccagctggaaccgggaggagaagatccccaagacagtggagatcaaagctatcgggcatgtgatagaggaaggcggtgtcaaaatgaagctgaccgtcatcgacaccccaggctttggagaccaaatcaacaatgaaaactgctgggagcccattgagaagtacatcaatgagcagtacgagaagttcctgaaggaggaggtcaacatcgccaggaagaaacgcatccctgacactcgtgtccactgctgcctttacttcatctctcccacaggacactccttgcgacctctggatcttgagttcatgaaacacctcagcaaggttgtgaacatcatccctgtcattgctaaggctgacaccatgaccctggaggagaagtctgaattcaagcaaagggttcgcaaggagcttgaagtaaatggcattgaattctacccccagaaggaatttgatgaggatttggaggataagacggagaatgacaaaatcaggcaggagagcatgccttttgctgtggtgggaagtgacaaggagtaccaagtgaatggcaagagggtcctcggccgaaaaactccatgggggatcatcgaagtggaaaacctcaaccactgtgagtttgccctgcttcgagactttgtcatcaggacccacctccaggacctcaaggaagtgacacacaacatccactatgagacttacagggccaagcggctcaatgacaatggaggcctccctccgggagaaggcctcctgggcactgtccttccacctgtgccagccaccccctgccccactgctgaatgaaggccatttcaagcgctgcttctcactccattcctctcagctgttattgctgcagggccaagccctttttagtgctgtgctcgtccagctcaccaccacagcccctctcagccctcagtaggtgggaggggccagctgcctctttaggccagttgcatcctccatttatccaaaccactcctctcctcccagtggagtggggttctgccagtacagccctactgcatcatctgcgtcagccggtcctagcccatctgcagggtgaaagaactcatcaagagctccttctgcccttgtaagcccatcccagctacttgtaaccatctctaagggcaatggcattgctccctacccattcatctgcatgagctactcttggcttccttaaagggtcaagaaagcaatttttctgcttactagattcattgagatcagctgtgtgagccccaaagtgggacaagggtgtctccttcattacttaaagatattcatgagggtgggtcactacagatgttggggagcaagggctaggatcactttttaaaaaatcaccacttgtggctgtcccagagtgcggttgtacatcctccccacctcataacgcagccactgaggaagagtggttttcctaagaagacattgctggagttgactttcttctgtccaaacaaacaaacaaaaactaaacacacacacaaacccccagaaacccacaatatgtacacgctaaggaaaaactagcacccttctgtccactcagcaataagagggatctcttcccacctaccctacctactcctacccccaacccccttccccattaatgtgagtaatgaattagcctgaccacaggtggtcactgtaggctaatggaaaatacccaagggagggcaaagccccccatcagatgcatgaatgtttgcgaatgttgactgccactgccccacacactgtgtctttatagaattcccctttgcccaccctcttcctgtctccacctggacacaacttgctcaaaggctggtgacttgtgggccattcatctacaaccaagtcctgatggagcaagaggcccacgcctaggggatgcaagaacaacccgtttcttaaatgttaccagtcccagccaatcttacggtgacattacagttaaatttcccaattgaaaacaagcaaacagacactcaaactggtcctgtaattgttgctagactttatgtgttgtacaactaaacattgctgtttgaacagtaactgcctggcctgtcttatttgtgctccttgaccaaatcagccattatgtcatctcacccatgtgtggagggtgagactctcttggtaagaaatagccacagatattagagatgaaaacactttgtgaggtcagttcatcttcagttggcgtcaggtcgggcctcagtcattattttctagtgtttcataaccaaagtgagtaatggatgggaggttgaggtgggaagatggcttgagcatgggaggttggaggtgcagtgagctgagatcattcctgacaggaccaacccaagtccatacctaaaggcagggggctaagggggcaggtgagg

SEQ ID NO: 29728 - protein, 358 aa, Homo sapiens; identical to SEQ ID NO: 29726

SEQ ID NO: 29729 - DNA, 2107 bp, Homo sapiens
cccgcgccccgctcagccttgcagccccgcgcccggagcatctccctggaggaacggagacaaaggaggattcatgtccaaagggctcccagagaccaggacggacgcagccatgtcagagctggtgcctgagcccaggcctaagccagcggtgcccatgaagcccatgagcatcaactccaacctgctgggctacatcggcatcgacaccatcatcgagcagatgcgcaagaagaccatgaagaccggtttcgacttcaacatcatggtcgttgctgggagcccattgagaagtacatcaatgagcagtacgagaagttcctgaaggaggaggtcaacatcgccaggaagaaacgcatccctgacactcgtgtccactgctgcctttacttcatctctcccacaggacactccttgcgacctctggatcttgagttcatgaaacacctcagcaaggagcttgaagtaaatggcattgaattctacccccagaaggaatttgatgaggatttggaggataagacggagaatgacaaaatcaggcaggagagcatgccttttgctgtggtgggaagtgacaaggagtaccaagtgaatggcaagagggtcctcggccgaaaaactccatgggggatcatcgaagtggaaaacctcaaccactgtgagtttgccctgcttcgagactttgtcatcaggacccacctccaggacctcaaggaagtgacacacaacatccactatgagacttacagggccaagcggctcaatgacaatggaggcctccctccgggagaaggcctcctgggcactgtccttccacctgtgccagccaccccctgccccactgctgaatgaaggccatttcaagcgctgcttctcactccattcctctcagctgttattgctgcagggccaagccctttttagtgctgtgctcgtccagctcaccaccacagcccctctcagccctcagtaggtgggaggggccagctgcctctttaggccagttgcatcctccatttatccaaaccactcctctcctcccagtggagtggggttctgccagtacagccctactgcatcatctgcgtcagccggtcctagcccatctgcagggtgaaagaactcatcaagagctccttctgcccttgtaagcccatcccagctacttgtaaccatctctaagggcaatggcattgctccctacccattcatctgcatgagctactcttggcttccttaaagggtcaagaaagcaatttttctgcttactagattcattgagatcagctgtgtgagccccaaagtgggacaagggtgtctccttcattacttaaagatattcatgagggtgggtcactacagatgttggggagcaagggctaggatcactttttaaaaaatcaccacttgtggctgtcccagagtgcggttgtacatcctccccacctcataacgcagccactgaggaagagtggttttcctaagaagacattgctggagttgactttcttctgtccaaacaaacaaacaaaaactaaacacacacacaaacccccagaaacccacaatatgtacacgctaaggaaaaactagcacccttctgtccactcagcaataagagggatctcttcccacctaccctacctactcctacccccaacccccttccccattaatgtgagtaatgaattagcctgaccacaggtggtcactgtaggctaatggaaaatacccaagggagggcaaagccccccatcagatgcatgaatgtttgcgaatgttgactgccactgccccacacactgtgtctttatagaattcccctttgcccaccctcttcctgtctccacctggacacaacttgctcaaaggctggtgacttgtgggccattcatctacaaccaagtcctgatggagcaagaggcccacgcctaggggatgcaagaacaacccgtttcttaaatgttaccagtcccagccaatcttacggtgacattacagttaaatttcccaattgaaaacaagcaaacagacactcaaactggtcctgtaattgttgctagactttatgtgttgtacaactaaacattgctgtttgaacagt

SEQ ID NO: 29730 - protein, 138 aa, Homo sapiens
MKHLSKELEVNGIEFYPQKEFDEDLEDKTENDKIRQESMPFAVVGSDKEYQVNGKRVLGRKTPWGIIEVENLNHCEFALLRDFVIRTHLQDLKEVTHNIHYETYRAKRLNDNGGLPPGEGLLGTVLPPVPATPCPTAE

SEQ ID NO: 29731 - DNA, 2441 bp, Homo sapiens
cccgcgccccgctcagccttgcagccccgcgcccggagcatctccctggaggaacggagacaaaggaggattcatgtccaaagggctcccagagaccaggacggacgcagccatgtcagagctggtgcctgagcccaggcctaagccagcggtgcccatgaagcccatgagcatcaactccaacctgctgggctacatcggcatcgacaccatcatcgagcagatgcgcaagaagaccatgaagaccggtttcgacttcaacatcatggtcgttgctgggagcccattgagaagtacatcaatgagcagtacgagaagttcctgaaggaggaggtcaacatcgccaggaagaaacgcatccctgacactcgtgtccactgctgcctttacttcatctctcccacaggacactccttgcgacctctggatcttgagttcatgaaacacctcagcaaggagcttgaagtaaatggcattgaattctacccccagaaggaatttgatgaggatttggaggataagacggagaatgacaaaatcaggcaggagagcatgccttttgctgtggtgggaagtgacaaggagtaccaagtgaatggcaagagggtcctcggccgaaaaactccatgggggatcatcgaagtggaaaacctcaaccactgtgagtttgccctgcttcgagactttgtcatcaggacccacctccaggacctcaaggaagtgacacacaacatccactatgagacttacagggccaagcggctcaatgacaatggaggcctccctccgggagaaggcctcctgggcactgtccttccacctgtgccagccaccccctgccccactgctgaatgaaggccatttcaagcgctgcttctcactccattcctctcagctgttattgctgcagggccaagccctttttagtgctgtgctcgtccagctcaccaccacagcccctctcagccctcagtaggtgggaggggccagctgcctctttaggccagttgcatcctccatttatccaaaccactcctctcctcccagtggagtggggttctgccagtacagccctactgcatcatctgcgtcagccggtcctagcccatctgcagggtgaaagaactcatcaagagctccttctgcccttgtaagcccatcccagctacttgtaaccatctctaagggcaatggcattgctccctacccattcatctgcatgagctactcttggcttccttaaagggtcaagaaagcaatttttctgcttactagattcattgagatcagctgtgtgagccccaaagtgggacaagggtgtctccttcattacttaaagatattcatgagggtgggtcactacagatgttggggagcaagggctaggatcactttttaaaaaatcaccacttgtggctgtcccagagtgcggttgtacatcctccccacctcataacgcagccactgaggaagagtggttttcctaagaagacattgctggagttgactttcttctgtccaaacaaacaaacaaaaactaaacacacacacaaacccccagaaacccacaatatgtacacgctaaggaaaaactagcacccttctgtccactcagcaataagagggatctcttcccacctaccctacctactcctacccccaacccccttccccattaatgtgagtaatgaattagcctgaccacaggtggtcactgtaggctaatggaaaatacccaagggagggcaaagccccccatcagatgcatgaatgtttgcgaatgttgactgccactgccccacacactgtgtctttatagaattcccctttgcccaccctcttcctgtctccacctggacacaacttgctcaaaggctggtgacttgtgggccattcatctacaaccaagtcctgatggagcaagaggcccacgcctaggggatgcaagaacaacccgtttcttaaatgttaccagtcccagccaatcttacggtgacattacagttaaatttcccaattgaaaacaagcaaacagacactcaaactggtcctgtaattgttgctagactttatgtgttgtacaactaaacattgctgtttgaacagtaactgcctggcctgtcttatttgtgctccttgaccaaatcagccattatgtcatctcacccatgtgtggagggtgagactctcttggtaagaaatagccacagatattagagatgaaaacactttgtgaggtcagttcatcttcagttggcgtcaggtcgggcctcagtcattattttctagtgtttcataaccaaagtgagtaatggatgggaggttgaggtgggaagatggcttgagcatgggaggttggaggtgcagtgagctgagatcattcctgacaggaccaacccaagtccatacctaaaggcagggggctaagggggcaggtgagg

SEQ ID NO: 29732 - protein, 138 aa, Homo sapiens; identical to SEQ ID NO: 29730

SEQ ID NO: 29733 - DNA, 740 bp, Homo sapiens
agttttaaagcactacaaaagagtagaaataagaccacccttcatccaatccttccaccagctctcagagctcatcttagaagagccagggtcacagccatttgggggaaagaaatgggatccttggtgctgcccgccaccaggcctgcagcagccccacagccttccgtaccaacgaccatgatgttgaagtcgaaaccggtcttcatggtcttcttgcgcatctgctcgatgatggtgtcgatgccgatgtagcccagcagaatcatacaaagttgggcctggaagggatcttagtatcatccagtccaggtccctcatttcatagacaaagagactgaggcctggaggagaaagaactcaactaagaacacagagcaggtcagaggtaaaatctgggccagtgccaggttctctggttgctgggcactttcaaatgcacctcactgctctgaagcccacatctgtgcatctaacccaggggctgctccatcttggcactaatgacatttgagtaattattgtgggaggctgtcacatgcattacaggatgattagtggcacccctgatcttagtagccccccaggctgtgacaacccaaaatgtctctagatggtaccaaatgtcccctgggaagcaccattgccctggctgagaaccactggtctaagaaatgtctggggttgttcagacctgagtcatgcctccctccccgaataaagggcaaagactttttagg

SEQ ID NO: 29734 - protein, 46 aa, Homo sapiens
MGSLVLPATRPAAAPQPSVPTTMMLKSKPVFMVFLRICSMMVSMPM

SEQ ID NO: 29735 - DNA, 1442 bp, Homo sapiens
gtccagttaaaggaagcacacatgctagtcatgtgagacaaccttttattgggacatcaggttctagaactaattctaaagaagtatcagaaacaatatacataatttgtctttcttagtaatttggcttcaaagacaaatttttgaccacacctccgttttctccgtcagacttctctcccttctaagcaggcttctctgttgctccatttgcttcatacatacttgacctctcttttctattccccatcacttttgtgctgaagctaatcatatttatgtctgtctttctctacttttccctaattccctctcctcctgactcctgtagacattcccaatgatacccaccgtcatacatttaggcttttcttgcctttccctgaagccctgtatttattaatgcatatatttcccctgcttgttgtacaagtaagttactcttttcctttaatctgtaagattcatgaaattcggggccagggaaacagtttagccttagggaagggaaaacactaagtgaaactgtttacaataacctcatacaaccttctgtcccatctcctggttcagcctaggtgtttcactggtcctctatgaatcccagcacttataatcccagtcttttatcactcaggtgctaggaaaaaaaacatagactcaagacccaagattcaatggaccaggagaaaggggggcggtgatcaggtggtcactgtaggctaatggaaaatacccaagggagggcaaagccccccatcagatgcatgaatgtttgcgaatgttgactgccactgccccacacactgtgtctttatagaattcccctttgcccaccctcttcctgtctccacctggacacaacttgctcaaaggctggtgacttgtgggccattcatctacaaccaagtcctgatggagcaagaggcccacgcctaggggatgcaagaacaacccgtttcttaaatgttaccagtcccagccaatcttacggtgacattacagttaaatttcccaattgaaaacaagcaaacagacactcaaactggtcctgtaattgttgctagactttatgtgttgtacaactaaacattgctgtttgaacagtaactgcctggcctgtcttatttgtgctccttgaccaaatcagccattatgtcatctcacccatgtgtggagggtgagactctcttggtaagaaatagccacagatattagagatgaaaacactttgtgaggtcagttcatcttcagttggcgtcaggtcgggcctcagtcattattttctagtgtttcataaccaaagtgagtaatggatgggaggttgaggtgggaagatggcttgagcatgggaggttggaggtgcagtgagctgagatcattcctgacaggaccaacccaagtccatacctaaaggcagggggctaagggggcaggtgagg

SEQ ID NO: 29736 - protein, 55 aa, Homo sapiens
MFANVDCHCPTHCVFIEFPFAHPLPVSTWTQLAQRLVTCGPFIYNQVLMEQEAHA

SEQ ID NO: 29737 - DNA, 3403 bp, Homo sapiens
ataatctccgccctccccttcagaaccgcgccccacagctcggcgcaggtcccgcccctttccatctacggggcggcaggaggcccgaagcaagatggcggtgaatcagagccacaccgagaaccgccgcggagccctcatccctaacggtgaaagtctcttgaagcggtctccgaatgtggagctctccttcccacagcgatcagaaggctcaaatgtctttagtggtagaaagacaggaacattgtttctcacttcataccgggtgattttcataacttcatgctccatcagtgatcccatgttgtcttttatgatgccatttgatctgatgacgaacctcactgttgaacaaccagtatttgctgcaaacttcattaagggaactattcaggcagctccatatggtggctgggaaggacaagctacttttaaattagtcttcagaaatggagatgccattgaatttgcccagttgatggtgaaagctgcctctgctgctgcccgaggatttccacttagaaccttaaatgactggttcagctctatgggaatttatgtaattactggggaagggaatatgtgcactccacagatgccttgttcagttattgtctatggagccccacctgcaggatatggagccccacctcccggatacggagccccacctgcaggatatggagcccaacccgtaggaaatgaaggcccgcctgtgggatacagagcctcacctgtgcgatatggagccccacctcttggatacggagccccacctgcaggatatggagccccacctctaggatatggagccccacctcttggatatggaaccccacctctcggatatggagccccacctctcggatatggagccccacctgcaggaaatgaaggcccgcctgcgggatacagagcctcacctgctggatcaggagccaggcctcaggaatctacagcagcccaggctcctgaaaacgaggcttctcttccctctgcctcctcttctcaggtccattcttaaccttctaagatgtaaaccttgaagactcaccaagcaaagaggtaccctaaaattgaagtcaggataaggaggacgactcagcttagagtcattgattgatctgcattgtgaaaattaggaaaccagatgctcccatgttctcaaggacagcctttcttaaggaagtcagtacgtgggcaacagtgatgagaggaagagaggagagactcaaccaactagagcagggataaggtttcccttgttcagcttttcagtgtctgctggaatgtgatggtaagttgagaacagggtgaatgggtgaggccttttttatatcagaaagttttccgagtaactgatctctggcaaatatttggggattagaattctaaaagaatacaaactagacttctcttctgctcttcatgttagttatacttgtaccaggtagatttgaggtggggtccagttacctgaaaagcgtagcaggttcgagtttcttaaaggtggaattccaccatgttctcctgtgcaaagggtacctgtttacctggtccaccaaactgccccagtacaaccaaaggctgtgactgtgtaaggatagaaccaagtggagccacagtttggacccacgtggtgctgcgtggcacacctactgttagttagctcccactgtctggtacagttgtttcccccaaaggctcagtccaatttgttctataagaagagctttgtgtcctgtatattcaaaggaccctggtttttgctttgctgaggacaaatccagtcagaattcagctgagccttctgcatgctgagagcactcatgtgctgagttcctcagctcctcactgacgttttgagtactttctttctgactcactcactgtgctggtggattccgctcttcctgtctcttccccagctgcaatacagaaactatactctgttgtctactctttcatttcctattagaaatataaagggatagaaataagaagaccttttagtcctggactatctggtattggcccctaaaatgagcctccaaatactccttttcatgggtaagtggatgctccccagcctgctggagcagaaccttcctggctcagctaccctgagatatcaggacaaaaacatatagttggtgtgattttcctctttttgtttttttttttttcaagatagaatctggctctgtcccccaggctggagtgcagtggcgcgatctcggctcactgcaacctttgccccacaggtttaagcgattctcctgcttcagcctcctgaatagcttggatgacaggtgcctgccaccatgctcggctaatttttgtgtttttagtggagacagggtttcaccatgttggccaggctggtttcgaactcctgacctcaagtgatccacccgcctcggcctcccaaagtgctgggattacaggcatcggcctgtgcctggccgatttttcaatccatagattaatatgttcaagaaatattgcatgtctttgttttctgtaaatttatttctgttaccaagatccccaccaccatctgctttgttggtgggcttctcacaaatcctaagattatgcaaaggtatccagattttatttggcaccaagatgctgagaagtttcttctggtcatcagactgcttctgaaacagccactatccagtcctggcagtcccgtcaagtctaaaagcttgttgccttgggaccccagaatcttaggtagggcttagaaccagggtgtcagagatccaactctgtgtaccatattgctccttagaactggggagtaggaccccaaaggcctccttatccttgagagtctgacaattccttaaacttccagattctgccctctcagctgtgctgttggtctgcatcacctctatctcttaagcatctatcctaatccaaatctcaggatttgggtttacccaaaaggtaatagaaagcctttgccttcatgttgacttggctttccttgcctagcacttggttgcttgcttgaaaatcatgtatgtatatatataaaatgtagaagcccaattcaaattaataatgtaaaaatttattctgttacacagattacctcattgtcaggtaggaagtgaaacgtatgatattcttcctggcctttgccttgagagtcttctggagcctgaagagggtggggcagacaaccatggactgctagagaataaactttctttgaagcttcctaaatggattagaaagaaggggttctgtcaaagggaaagggtctatacagatgtgaccagcagtttgattagtttagatgtatgatttagtagccaatataagaaacttgtaatttttagtaattagaatttattataaataataaaacagggtattaattatt

SEQ ID NO: 29738 - protein, 309 aa, Homo sapiens
MAVNQSHTENRRGALIPNGESLLKRSPNVELSFPQRSEGSNVFSGRKTGTLFLTSYRVIFITSCSISDPMLSFMMPFDLMTNLTVEQPVFAANFIKGTIQAAPYGGWEGQATFKLVFRNGDAIEFAQLMVKAASAAARGFPLRTLNDWFSSMGIYVITGEGNMCTPQMPCSVIVYGAPPAGYGAPPPGYGAPPAGYGAQPVGNEGPPVGYRASPVRYGAPPLGYGAPPAGYGAPPLGYGAPPLGYGTPPLGYGAPPLGYGAPPAGNEGPPAGYRASPAGSGARPQESTAAQAPENEASLPSASSSQVHS

SEQ ID NO: 29739 - DNA, 1903 bp, Homo sapiens
aggtcccgcccctttccatctacggggcggcaggaggcccgaagcaagatggcggtgaatcagagccacaccgagaaccgccgcggagccctcatccctaacggtgaaagtctcttgaagcggtctccgaatgtggagctctccttcccacagcgatcagaaggctcaaatgtctttagtggtagaaagacaggaacattgtttctcacttcataccgggtgattttcataacttcatgctccatcagtgatcccatgttgtcttttatgatgccatttgatctgatgacgaacctcactgttgaacaaccagtatttgctgcaaacttcattaagggaactattcaggcagctccatatggtggctgggaaggacaagctacttttaaattagtcttcagaaatggagatgccattgaatttgcccagttgatggtgaaagctgcctctgctgctgcccgaggatttccacttagaaccttaaatgactggttcagctctatgggaatttatgtaattactggggaagggaatatgtgcactccacagatgccttgttcagttattgtctatggagccccacctgcaggatatggagccccacctcccggatacggagccccacctgcaggatatggagcccaacccgtaggaaatgaaggcccgcctgtgggatacagagcctcacctgtgcgatatggagccccacctcttggatacggagccccacctgcaggatatggagccccacctctaggatatggagccccacctcttggatatggaaccccacctctcggatatggagccccacctctcggatatggagccccacctgcaggaaatgaaggcccgcctgcgggatacagagcctcacctgctggatcaggagccaggcctcaggaatctacagcagcccaggctcctgaaaacgaggcttctcttccctctgcctcctcttctcaggtccattcttaaccttctaagatgtaaaccttgaagactcaccaagcaaagaggtaccctaaaattgaagtcaggataaggaggacgactcagcttagagtcattgattgatctgcattgtgaaaattaggaaaccagatgctcccatgttctcaaggacagcctttcttaaggaagtcagtacgtgggcaacagtgatgagaggaagagaggagagactcaaccaactagagcagggataaggtttcccttgttcagcttttcagtgtctgctggaatgtgatgatactctagctcacacatcagaagagcatgtgcaggaagagagatgaaataatggtacacgttgatggttactggagctggatgctgggtacatggaggttcactctaccattttatttttgtatttgaaagttttcatgataaaaagtttttaaaaagagaaagggtaccttgcgtccaaacaagtctgtatttaactgaaaaaaaaaaataattgcattcctaactggccttgaatagaagggaataaatgtcctgggagatagatggcatgtttgttgaaagaatgaagggtgaagagataggatcaatcaggcacccccaggacaaaaggaaaacttatacagcaagtaaagacatgtagctatcttgggctgaaaggtaagggaattaattggtcaagtccaggctcaactctggcccccaactcccaagtccatggtctcaactcatttcccacaaagccttcctggagctagcaagagaaggtgttcccacctgagactattccattttgcctgaacagcactatgaacaagacccaaaggcagagctatgcacggaggggcaggcctgggatgaggtaggcttctgtcctaagtttctcaacagcctcaagacatcaactggggaaaggaactttctctggtga

SEQ ID NO: 29740 - protein, 309 aa, Homo sapiens; identical to SEQ ID NO: 29738

SEQ ID NO: 29741 - DNA, 2251 bp, Homo sapiens
atctacggggcggcaggaggcccgaagcaagatggcggtgaatcagagccacaccgagaaccgccgcggagccctcatccctaacggtgaaagtctcttgaagcggtctccgaatgtggagctctccttcccacagcgatcagaaggctcaaatgtctttagtggtagaaagacaggaacattgtttctcacttcataccgggtgattttcataacttcatgctccatcagtgatcccatgttgtcttttatgatgccatttgatctgatgacgaacctcactgttgaacaaccagtatttgctgcaaacttcattaagggaactattcaggcagctccatatggtggctgggaaggacaagctacttttaaattagtcttcagaaatggagatgccattgaatttgcccagttgatggtgaaagctgcctctgctgctgcccgaggatttccacttagaaccttaaatgactggttcagctctatgggaatttatgtaattactggggaagggaatatgtgcactccacagatgccttgttcagttattgtctatggagccccacctgcaggatatggagccccacctcccggatacggagccccacctgcaggatatggagcccaacccgtaggaaatgaaggcccgcctgtgggatacagagcctcacctgtgcgatatggagccccacctcttggatacggagccccacctgcaggatatggagccccacctctaggatatggagccccacctcttggatatggaaccccacctctcggatatggagccccacctctcggatatggagccccacctgcaggaaatgaaggcccgcctgcgggatacagagcctcacctgctggatcaggagccaggcctcaggaatctacagcagcccaggctcctgaaaacgaggcttctcttccctctgcctcctcttctcaggtccattcttaaccttctaagatgtaaaccttgaagactcaccaagcaaagaggtaccctaaaattgaagtcaggataaggaggacgactcaggtatgtgatcacaggcttctcgcaggtagttgttccaccctttggaagggcaatcttatgggggaaggtgaaactttacttctgtgcctagattttagaagcagaatcaactcttaaatagctggctaaaggaagaataccattgtggggctaattccccagtaatttggttgacattgggttgcatttttaaacataactttttccacactcgcattcaaggttcctgtcttcccatcctcattcaagaaacatttattatgctccgtttgctaggcactaagatgcgtgctaaaaacgtcatgttgaacacttagttgtttgagaaagctaaattttcaatagtaagagtgttataaattacggtggatccacaaaatggagtattatacacctgttgaaaactatgtctagaggtagagaaagccttctttgaggagaccaaaaccaacaaataaaagcatgataaattgactatatcaaaatttaaaacttctctatgacagaagttaaaagataggcaacagaataggaaaaagtgattttcaacatatatattaatttatagtcagaatacgtgaataactacaaatcaattctccccaaaatgacagaaatatgaattgccgaataaccaaggcaatagcatggccagaaaacgtttgaaaagatgttcagcttgactagtgttagggaaatgcaacctgagatgagaaaacatttttatctccaaagatttacaaatattaaaactcttgatatggcactttcacattttaaaatatgcctgcgagaaaacttgcatgtgtgcacaaagatgcatgtgggaagatttcattatattcattgtttctaacagcacaaaattagaaataacctatatgtccattaataggaaatatatgaataggctatggtatgcccatactacgtatgcagaaatttctaagacttgttgataaggagaaaagcaagttgtagggagcatatactatagtgattttcagcctcatcagactgaatgccccattttataacaaatatttatattttataacaaacgtttatatttgtatatttataacaaatattttgtaatgtctccttcacttcaatgaagtttgtagataattgcatatgattccacaccatttcaaccaaaattaataggccataaatgtgatagaggaaataaaaggagtttgtagt

SEQ ID NO: 29742 - protein, 309 aa, Homo sapiens; identical to SEQ ID NO: 29738

SEQ ID NO: 29743 - DNA, 1306 bp, Homo sapiens
cggggcggcaggaggcccgaagcaagatggcggtgaatcagagccacaccgagaaccgccgcggagccctcatccctaacggtgaaagacaagcacaaaagcaccacccatgcctctgagaacactggaccatgcacccttgaaaacagctttgcttccttcatcatgagtaatcttcctccagcagtcaaatgtgcctgtgtacatgatgtcagttcctttgcatcctgactgcatcatcatgtagcagcaaatggtgttaaatgaataggaagtcaacccagcaacggcagtgacagtctgtgcatcatccaactgatgacaatctccagctttgcccacatcagctgctacacgagtatgggcaaaatcaagagggtacacaaaacacaaggatgtggccccagtggcaccgcctgatgccagattccctgcaaagtagcgccaaaactgggatctcttgtccacaccatccaggaagatctgcttgtatttatctttgaaggtgggaaaacaaaaagaagtcatttgcttaaagcgcatgtgggagagcttggatttggatttgaacttaggtactgtgcataaactcctgtactccagctgtccctctagaaagaaaaggactctttctctgttttcttctcaccaaagaagatcctattagtaccctagcttcctggatagaaactactttaaagaaccagagatagtggtgcacatctgtagtcccacctattcgagaggctaaggtgggaggatcacttgaggccaggagttcaagaccacgctgagcaaaatagtgggacctcatctcacagaataaaatttaagaaaagaaaaaaaagaaactatagccaggcatggtggcacatgcctgtaatcccagctgcttgggagactgaggcaggagaatcgcttgaacccaaggaggcagaggttacagtgaacagagatcacgccattgcactccagcctgggcaacaagagtgaaactccatctcaaaaaaaaaaaaaaagtgccagcttatgaggtaattacattggttctctccagaggggtaacctgccaagaagagatgctatagatgttactcttatactgtaaaacattgtgaaatcagattgcttaaaaatgatgtattacaaagttatggaaaaaagcagttgtgactatggaagcccaaggcttatatcctagctctgtcttacactaaatgtgggtacagtgtttccactttttgtaaaatgggagctaatatcctccaacctgtgtgcctgacatggtgattaaaaggattaatcg

SEQ ID NO: 29744 - protein, 33 aa, Homo sapiens
MTISSFAHISCYTSMGKIKRVHKTQGCGPSGTA

SEQ ID NO: 29745 - DNA, 4006 bp, Homo sapiens
atgtgggtatcacgttcatacacgggtgtgtggaggtgcgggtgtgtgcacactcagtttctttttttgataacctggttttgtagccagccatacaacatggatccttttagtatttcatcatagggatgttacacaagggagcatgtggcagatgtcctaggattgcagctttgccccctcattgtgcccatggtggctttgcggggtccgcagcgggcctgctctgggtgctctgtgctttgccccaccctgctgccctactagaggttggccagcaccataattgttcatctcttgtcctcatttctattcttttttttgagacagagtttcactcttgttgcccaggctggagtgcaatggtgcgatctcagctcactgcaaccttgcctcccaggttcaagtgattctcctgcctcagcctcctgagtagctgggattacaggcatgcgccaccacgcctggctaacattgtagttttagtagagacgggatttctccatgttgttcagactggtctcgaacttccgacctcagatgattcgcccacctcggcctcccaaagtgctgggattacaggcatgagccaccacgcctggccatctcatttctattcttcctccaaatattttctggtacatgggtgtctgaccttgacccttaggaccagttgatagtcctggaatccacttccagaaggccttggggctctgtttgcccctaatgcagaagcttctggtagaggcagctttgaggcctgggctgcctgggagaggttggtgggccccctgcacacctgatcctgagtggcgtttgcaccgtctttcctgcgatttgcctctgctcacacgtgtagggacgggtctctccttgaggcagctgctctgtgctggaacactgctcaggtcggagagttctcgtactgagccgagatgggcatctgtgatgtcctgccctgttggagaggtctgttgtccccctctaagtgatgacaccatccacatgtggactttgccacgtttggatgtaagcgcctctgcagcgccgaccttccgcatggcttcttcacactccctctcctggccatgctgggtactggggaccccacagggagtgcaccctcaggacgctgggtttggttccagctccgactggaactgattatgtgatcgtccctggcctgagcgtaagacccacttaacaagacctcaggggttttagtctcagctccttccctggcccaatctggctcttagccagcccccctcctcctctgccactgtcccagccactgaccatgccctgggtgcccaccctgtgcagggtggaagcctggctttgggctcttggagttcctgggcagggaaggctcccactttctgccctgtgaagcccacctcagtcctggctgccccatttcccaaggggctctcaggtgcagtggcttctgcagcccctctcttgggatgcaggcctgggcacgtgcagccttgtctagctctgccccagtttgcccatccagccctcaagttcttcctgccccttcaggccactgcttgagctgatggcagagatggattcctccctccccgtcctgtctggcatcctccctttgggaccctgggttcattccctgttctggccaccttgtttgtggcccctctaggccagcaggacagacacacccagcgtgcgcctggcctcagcacctcacacgcagcgtgcatgtgtgtgcatctgtgcttggcgtcggcgtcacgtcttacaaggacaagcaggcactggggaagggtggggacacaaaggaggaatgggatgggggctccgaggcctgggagccgccctgggaggcctctgccctggggaccgttcagcagctttgggcctctctccagatcatcagccatgacacccggcgcttccgctttgccctgccgtcaccccagcacatcctgggcctccctgtcggtgagtcacgcccctgctgggcccattcggagcccggcaggctgctggggcactagatcagagagatggaagctttacatttccaccagggagagcagggaagccttcaggaggaggtgacagctgccctgggcctttgagggcgagtctgttggaatgagagtgggaaggcccagagtccctggcagtggcaccagcaggagtgaaggcatggaggcaggaagctgggacgtgaggggaatccccgggaggggtgggagggggccgtgggagctgacgccaggccaggctttgaatgccgggtggggtgcaggggagtgggttgacaagacccaggggtcacccgcaggatgatctctggcccagagtgaccccgttctgtcctgcaggccagcacatctacctctcggctcgaattgatggaaacctggtcgtccggccctatacacccatctccagcgatgatgacaagggcttcgtggacctggtcatcaaggtttacttcaaggacacccatcccaagtttcccgctggagggaagatgtctcagtacctggagagcatgcagattggagacaccattgagttccggggccccagtgggctgctggtctaccagggcaaagggaagttcgccatccgacctgacaaaaagtccaaccctatcatcaggacagtgaagtctgtgggcatgatcgcgggagggacaggcatcaccccgatgctgcaggtgatccgcgccatcatgaaggaccctgatgaccacactgtgtgccacctgctctttgccaaccagaccgagaaggacatcctgctgcgacctgagctggaggaactcaggaacaaacattctgcacgcttcaagctctggtacacgctggacagagcccctgaagcctgggactacggccagggcttcgtgaatgaggagatgatccgggaccaccttccacccccagaggaggagccgctggtgctgatgtgtggccccccacccatgatccagtacgcctgccttcccaacctggaccacgtgggccaccccacggagcgctgcttcgtcttctgagggccgggcacggtcacacggccacccgccccgcgcaccccacgccctgttcacgctcacccagtcacctccccacatcgcacactggggccccgggttcagcctggcctgcccgtgccctggtgaatcacctggctgagcagttcccctggagccccttcgggagcagggctgtgtcccagatgggccacggctgagccttcagagtacgtcctgcctggcacttactggtccttaccagagacgcccagccccatccctgtcctcatgacccctcgtccaccccccacacacactataaggctgagggctgccagcagccccgtctgcccaccattcccggccgtggaccatagtcgggatgtcagcagacacacatgggcagcccaaagctgcaggtgccagggcccaccccagcctcgcctgtcacccccactcccgcctcagggccaggcccaggcctcaccacctgacgctgcatgagacattgacaccagaaagccctcttgggggcactgctccctaccccagggccctggccagccgggagcttggctctcctctggctagagtgggaagagggggctggccatggggccctcccagaacctcagcatttccttccagcccatccaaacactgaggcagccttggggaaccccgagctggggggttggcagcccactgcaccgcctcagggttttggggtcctgggctggggccaccatccctgatggcagaactcccacaaccacatgtatttattcctctgtcctaaaccgtcccctccttccctcacccccagcacagggggattctgagcagtgcctcttgtctgagggacatatcagtgacctcgacgttgcctttagactacagttgtgttagcctcttgcgtattggctttttcagagtcatttatgagcagaaaaaaaaaaagtaaaactttgctaatattaacccttc

SEQ ID NO: 29746 - protein, 257 aa, Homo sapiens
MPGGVQGSGLTRPRGHPQDDLWPRVTPFCPAGQHIYLSARIDGNLVVRPYTPISSDDDKGFVDLVIKVYFKDTHPKFPAGGKMSQYLESMQIGDTIEFRGPSGLLVYQGKGKFAIRPDKKSNPIIRTVKSVGMIAGGTGITPMLQVIRAIMKDPDDHTVCHLLFANQTEKDILLRPELEELRNKHSARFKLWYTLDRAPEAWDYGQGFVNEEMIRDHLPPPEEEPLVLMCGPPPMIQYACLPNLDHVGHPTERCFVF

SEQ ID NO: 29747 - DNA, 987 bp, Homo sapiens
ggccatatggtgctcttcccagtctggttcctgtacagtctgctcatgaagctgttccagcgctccacgccagccatcaccccagtcacctccccacatcgcacactggggccccgggttcagcctggcctgcccgtgccctggtgaatcacctggctgagcagttcccctggagccccttcgggagcagggctgtgtcccagatgggccacggctgagccttcagagtacgtcctgcctggcacttactggtccttaccagagacgcccagccccatccctgtcctcatgacccctcgtccaccccccacacacactataaggctgagggctgccagcagccccgtctgcccaccattcccggccgtggaccatagtcgggatgtcagcagacacacatgggcagcccaaagctgcaggtgccagggcccaccccagcctcgcctgtcacccccactcccgcctcagggccaggcccaggcctcaccacctgacgctgcatgagacattgacaccagaaagccctcttgggggcactgctccctaccccagggccctggccagccgggagcttggctctcctctggctagagtgggaagagggggctggccatggggccctcccagaacctcagcatttccttccagcccatccaaacactgaggcagccttggggaaccccgagctggggggttggcagcccactgcaccgcctcagggttttggggtcctgggctggggccaccatccctgatggcagaactcccacaaccacatgtatttattcctctgtcctaaaccgtcccctccttccctcacccccagcacagggggattctgagcagtgcctcttgtctgagggacatatcagtgacctcgacgttgcctttagactacagttgtgttagcctcttgcgtattggctttttcagagtcatttatgagcagaaaaaaaaaaagtaaaactttgctaatattaacccttc

SEQ ID NO: 29748 - protein, 46 aa, Homo sapiens
MVLFPVWFLYSLLMKLFQRSTPAITPVTSPHRTLGPRVQPGLPVPW

SEQ ID NO: 29749 - DNA, 1987 bp, Homo sapiens
tctgccatcctgaactgtggttcccctgcctcccagcccggctgtgagtgctcagcgaccctgacaggctgacaggaccaggagggaggtgccgctcagattctggcaggaccgctggcgggcaggcaggggacagttgggccatatggtgctcttcccagtctggttcctgtacagtctgctcatgaagctgttccagcgctccacgccagccatcaccctcgagagcccggacatcaagtacccgctgcggctcatcgaccgggagatcatcagccatgacacccggcgcttccgctttgccctgccgtcaccccagcacatcctgggcctccctgtcggccagcacatctacctctcggctcgaattgatggaaacctggtcgtccggccctatacacccatctccagcgatgatgacaagggcttcgtggacctggtcatcaaggtttacttcaaggacacccatcccaagtttcccgctggagggaagatgtctcagtacctggagagcatgcagattggagacaccattgagttccggggccccagtgggctgctggtctaccagggcaaagggaagttcgccatccgacctgacaaaaagtccaaccctatcatcaggacagtgaagtctgtgggcatgatcgcgggagggacaggcatcaccccgatgctgcaggtgatccgcgccatcatgaaggaccctgatgaccacactgtgtgccacctgctctttgccaaccagaccgagaaggacatcctgctgcgacctgagctggaggaactcaggaacaaacattctgcacgcttcaagctctggtacacgctggacagagcccctgaagcctgggactacggccagggcttcgtgaatgaggagatgatccgggaccaccttccacccccagaggaggagccgctggtgctgatgtgtggccccccacccatgatccagtacgcctgccttcccaacctggaccacgtgggccaccccacggagcgctgcttcgtcttctgagggccgggcacggtcacacggccacccgccccgcgcaccccacgccctgttcacgctcacccagtcacctccccacatcgcacactggggccccgggttcagcctggcctgcccgtgccctggtgaatcacctggctgagcagttcccctggagccccttcgggagcagggctgtgtcccagatgggccacggctgagccttcagagtacgtcctgcctggcacttactggtccttaccagagacgcccagccccatccctgtcctcatgacccctcgtccaccccccacacacactataaggctgagggctgccagcagccccgtctgcccaccattcccggccgtggaccatagtcgggatgtcagcagacacacatgggcagcccaaagctgcaggtgccagggcccaccccagcctcgcctgtcacccccactcccgcctcagggccaggcccaggcctcaccacctgacgctgcatgagacattgacaccagaaagccctcttgggggcactgctccctaccccagggccctggccagccgggagcttggctctcctctggctagagtgggaagagggggctggccatggggccctcccagaacctcagcatttccttccagcccatccaaacactgaggcagccttggggaaccccgagctggggggttggcagcccactgcaccgcctcagggttttggggtcctgggctggggccaccatccctgatggcagaactcccacaaccacatgtatttattcctctgtcctaaaccgtcccctccttccctcacccccagcacagggggattctgagcagtgcctcttgtctgagggacatatcagtgacctcgacgttgcctttagactacagttgtgttagcctcttgcgtattggctttttcagagtcatttatgagcagaaaaaaaaaaagtaaaactttgctaatattaacccttc

SEQ ID NO: 29750 - protein, 291 aa, Homo sapiens
MVLFPVWFLYSLLMKLFQRSTPAITLESPDIKYPLRLIDREIISHDTRRFRFALPSPQHILGLPVGQHIYLSARIDGNLVVRPYTPISSDDDKGFVDLVIKVYFKDTHPKFPAGGKMSQYLESMQIGDTIEFRGPSGLLVYQGKGKFAIRPDKKSNPIIRTVKSVGMIAGGTGITPMLQVIRAIMKDPDDHTVCHLLFANQTEKDILLRPELEELRNKHSARFKLWYTLDRAPEAWDYGQGFVNEEMIRDHLPPPEEEPLVLMCGPPPMIQYACLPNLDHVGHPTERCFVF

SEQ ID NO: 29751 - DNA, 1978 bp, Homo sapiens
aggggttggccctggagtctgccagccacactgggaaaacattggagcttggtctgccatcctgaactgtggttcccctgcctcccagcccggctgtgagtgctcagcgaccctgacaggctgacagttgggccatatggtgctcttcccagtctggttcctgtacagtctgctcatgaagctgttccagcgctccacgccagccatcaccctcgagagcccggacatcaagtacccgctgcggctcatcgaccgggagatcatcagccatgacacccggcgcttccgctttgccctgccgtcaccccagcacatcctgggcctccctgtcggccagcacatctacctctcggctcgaattgatggaaacctggtcgtccggccctatacacccatctccagcgatgatgacaagggcttcgtggacctggtcatcaaggtttacttcaaggacacccatcccaagtttcccgctggagggaagatgtctcagtacctggagagcatgcagattggagacaccattgagttccggggccccagtgggctgctggtctaccagggcaaagggaagttcgccatccgacctgacaaaaagtccaaccctatcatcaggacagtgaagtctgtgggcatgatcgcgggagggacaggcatcaccccgatgctgcaggtgatccgcgccatcatgaaggaccctgatgaccacactgtgtgccacctgctctttgccaaccagaccgagaaggacatcctgctgcgacctgagctggaggaactcaggaacaaacattctgcacgcttcaagctctggtacacgctggacagagcccctgaagcctgggactacggccagggcttcgtgaatgaggagatgatccgggaccaccttccacccccagaggaggagccgctggtgctgatgtgtggccccccacccatgatccagtacgcctgccttcccaacctggaccacgtgggccaccccacggagcgctgcttcgtcttctgagggccgggcacggtcacacggccacccgccccgcgcaccccacgccctgttcacgctcacccagtcacctccccacatcgcacactggggccccgggttcagcctggcctgcccgtgccctggtgaatcacctggctgagcagttcccctggagccccttcgggagcagggctgtgtcccagatgggccacggctgagccttcagagtacgtcctgcctggcacttactggtccttaccagagacgcccagccccatccctgtcctcatgacccctcgtccaccccccacacacactataaggctgagggctgccagcagccccgtctgcccaccattcccggccgtggaccatagtcgggatgtcagcagacacacatgggcagcccaaagctgcaggtgccagggcccaccccagcctcgcctgtcacccccactcccgcctcagggccaggcccaggcctcaccacctgacgctgcatgagacattgacaccagaaagccctcttgggggcactgctccctaccccagggccctggccagccgggagcttggctctcctctggctagagtgggaagagggggctggccatggggccctcccagaacctcagcatttccttccagcccatccaaacactgaggcagccttggggaaccccgagctggggggttggcagcccactgcaccgcctcagggttttggggtcctgggctggggccaccatccctgatggcagaactcccacaaccacatgtatttattcctctgtcctaaaccgtcccctccttccctcacccccagcacagggggattctgagcagtgcctcttgtctgagggacatatcagtgacctcgacgttgcctttagactacagttgtgttagcctcttgcgtattggctttttcagagtcatttatgagcagaaaaaaaaaaagtaaaactttgctaatattaacccttc

SEQ ID NO: 29752 - protein, 291 aa, Homo sapiens; identical to SEQ ID NO: 29750

SEQ ID NO: 29753 - DNA, 867 bp, Homo sapiens
gcggggccaccatgggggcccagctcagcacgctggctgagcagttcccctggagccccttcgggagcagggctgtgtcccagatgggccacggctgagccttcagagtacgtcctgcctggcacttactggtccttaccagagacgcccagccccatccctgtcctcatgacccctcgtccaccccccacacacactataaggctgagggctgccagcagccccgtctgcccaccattcccggccgtggaccatagtcgggatgtcagcagacacacatgggcagcccaaagctgcaggtgccagggcccaccccagcctcgcctgtcacccccactcccgcctcagggccaggcccaggcctcaccacctgacgctgcatgagacattgacaccagaaagccctcttgggggcactgctccctaccccagggccctggccagccgggagcttggctctcctctggctagagtgggaagagggggctggccatggggccctcccagaacctcagcatttccttccagcccatccaaacactgaggcagccttggggaaccccgagctggggggttggcagcccactgcaccgcctcagggttttggggtcctgggctggggccaccatccctgatggcagaactcccacaaccacatgtatttattcctctgtcctaaaccgtcccctccttccctcacccccagcacagggggattctgagcagtgcctcttgtctgagggacatatcagtgacctcgacgttgcctttagactacagttgtgttagcctcttgcgtattggctttttcagagtcatttatgagcagaaaaaaaaaaagtaaaactttgctaatattaacccttc

SEQ ID NO: 29754 - protein, 98 aa, Homo sapiens [sequence omitted]

SEQ ID NO: 29755 - DNA, 1812 bp, Homo sapiens
cgcgggcccgggcgcgacggtctcggcggcggcggcggcggcgacagagcgagcgcggcgcggggccaccatgggggcccagctcagcacgttgggccatatggtgctcttcccagtctggttcctgtacagtctgctcatgaagctgttccagcgctccacgccagccatcaccctcgagagcccggacatcaagtacccgctgcggctcatcgaccgggagatcatcagccatgacacccggcgcttccgctttgccctgccgtcaccccagcacatcctgggcctccctgtcggccagcacatctacctctcggctcgaattgatggaaacctggtcgtccggccctatacacccatctccagcgatgatgacaagggcttcgtggacctggtcatcaagggaagttcgccatccgacctgacaaaaagtccaaccctatcatcaggacagtgaagtctgtgggcatgatcgcgggagggacaggcatcaccccgatgctgcaggtgatccgcgccatcatgaaggaccctgatgaccacactgtgtgccacctgctctttgccaaccagaccgagaaggacatcctgctgcgacctgagctggaggaactcaggaacaaacattctgcacgcttcaagctctggtacacgctggacagagcccctgaagcctgggactacggccagggcttcgtgaatgaggagatgatccgggaccaccttccacccccagaggaggagccgctggtgctgatgtgtggccccccacccatgatccagtacgcctgccttcccaacctggaccacgtgggccaccccacggagcgctgcttcgtcttctgagggccgggcacggtcacacggccacccgccccgcgcaccccacgccctgttcacgctcacccagtcacctccccacatcgcacactggggccccgggttcagcctggcctgcccgtgccctggtgaatcacctggctgagcagttcccctggagccccttcgggagcagggctgtgtcccagatgggccacggctgagccttcagagtacgtcctgcctggcacttactggtccttaccagagacgcccagccccatccctgtcctcatgacccctcgtccaccccccacacacactataaggctgagggctgccagcagccccgtctgcccaccattcccggccgtggaccatagtcgggatgtcagcagacacacatgggcagcccaaagctgcaggtgccagggcccaccccagcctcgcctgtcacccccactcccgcctcagggccaggcccaggcctcaccacctgacgctgcatgagacattgacaccagaaagccctcttgggggcactgctccctaccccagggccctggccagccgggagcttggctctcctctggctagagtgggaagagggggctggccatggggccctcccagaacctcagcatttccttccagcccatccaaacactgaggcagccttggggaaccccgagctggggggttggcagcccactgcaccgcctcagggttttggggtcctgggctggggccaccatccctgatggcagaactcccacaaccacatgtatttattcctctgtcctaaaccgtcccctccttccctcacccccagcacagggggattctgagcagtgcctcttgtctgagggacatatcagtgacctcgacgttgcctttagactacagttgtgttagcctcttgcgtattggctttttcagagtcatttatgagcagaaaaaaaaaaagtaaaactttgctaatattaacccttc

SEQ ID NO: 29756 - protein, 128 aa, Homo sapiens
MGAQLSTLGHMVLFPVWFLYSLLMKLFQRSTPAITLESPDIKYPLRLIDREIISHDTRRFRFALPSPQHILGLPVGQHIYLSARIDGNLVVRPYTPISSDDDKGFVDLVIKGSSPSDLTKSPTLSSGQ

SEQ ID NO: 29757 - DNA, 1642 bp, Homo sapiens
cgcgggcccgggcgcgacggtctcggcggcggcggcggcggcgacagagcgagcgcggcgcggggccaccatgggggcccagctcagcacgttgggccatatggtgctcttcccagtctggttcctgtacagtctgctcatgaagctgttccagcgctccacgccagccatcaccctcgagagcccggacatcaagtacccgctgcggctcatcgaccgggagatcatcagccatgacacccggcgcttccgctttgccctgccgtcaccccagcacatcctgggcctccctgtcggccagcacatctacctctcggctcgaattgatggaaacctggtcgtccggccctatacacccatctccagcgatgatgacaagggcttcgtggacctggtcatcaagaccgagaaggacatcctgctgcgacctgagctggaggaactcaggaacaaacattctgcacgcttcaagctctggtacacgctggacagagcccctgaagcctgggactacggccagggcttcgtgaatgaggagatgatccgggaccaccttccacccccagaggaggagccgctggtgctgatgtgtggccccccacccatgatccagtacgcctgccttcccaacctggaccacgtgggccaccccacggagcgctgcttcgtcttctgagggccgggcacggtcacacggccacccgccccgcgcaccccacgccctgttcacgctcacccagtcacctccccacatcgcacactggggccccgggttcagcctggcctgcccgtgccctggtgaatcacctggctgagcagttcccctggagccccttcgggagcagggctgtgtcccagatgggccacggctgagccttcagagtacgtcctgcctggcacttactggtccttaccagagacgcccagccccatccctgtcctcatgacccctcgtccaccccccacacacactataaggctgagggctgccagcagccccgtctgcccaccattcccggccgtggaccatagtcgggatgtcagcagacacacatgggcagcccaaagctgcaggtgccagggcccaccccagcctcgcctgtcacccccactcccgcctcagggccaggcccaggcctcaccacctgacgctgcatgagacattgacaccagaaagccctcttgggggcactgctccctaccccagggccctggccagccgggagcttggctctcctctggctagagtgggaagagggggctggccatggggccctcccagaacctcagcatttccttccagcccatccaaacactgaggcagccttggggaaccccgagctggggggttggcagcccactgcaccgcctcagggttttggggtcctgggctggggccaccatccctgatggcagaactcccacaaccacatgtatttattcctctgtcctaaaccgtcccctccttccctcacccccagcacagggggattctgagcagtgcctcttgtctgagggacatatcagtgacctcgacgttgcctttagactacagttgtgttagcctcttgcgtattggctttttcagagtcatttatgagcagaaaaaaaaaaagtaaaactttgctaatattaacccttc

SEQ ID NO: 29758 - protein, 201 aa, Homo sapiens
MGAQLSTLGHMVLFPVWFLYSLLMKLFQRSTPAITLESPDIKYPLRLIDREIISHDTRRFRFALPSPQHILGLPVGQHIYLSARIDGNLVVRPYTPISSDDDKGFVDLVIKTEKDILLRPELEELRNKHSARFKLWYTLDRAPEAWDYGQGFVNEEMIRDHLPPPEEEPLVLMCGPPPMIQYACLPNLDHVGHPTERCFVF

SEQ ID NO: 29759 - DNA, 1956 bp, Homo sapiens
ctgctccggagtgacgcgggcccgggcgcgacggtctcggcggcggcggcggcggcgacagagcgagcgcggcgcggggccaccatgggggcccagctcagcacgttgggccatatggtgctcttcccagtctggttcctgtacagtctgctcatgaagctgttccagcgctccacgccagccatcaccctcgagagcccggacatcaagtacccgctgcggctcatcgaccgggagatcatcagccatgacacccggcgcttccgctttgccctgccgtcaccccagcacatcctgggcctccctgtcggccagcacatctacctctcggctcgaattgatggaaacctggtcgtccggccctatacacccatctccagcgatgatgacaagggcttcgtggacctggtcatcaaggtttacttcaaggacacccatcccaagtttcccgctggagggaagatgtctcagtacctggagagcatgcagattggagacaccattgagttccggggccccagtgggctgctggtctaccagggcaaagggaagttcgccatccgacctgacaaaaagtccaaccctatcatcaggacagtgaagtctgtgggcatgatcgcgggagggacaggcatcaccccgatgctgcaggtgatccgcgccatcatgaaggaccctgatgaccacactgtgtgccacctgctctttgccaaccagaccgagaaggacatcctgctgcgacctgagctggaggaactcaggaacaaacattctgcacgcttcaagctctggtacacgctggacagagcccctgaagcctgggactacggccagggcttcgtgaatgaggagatgatccgggaccaccttccacccccagaggaggagccgctggtgctgatgtgtggccccccacccatgatccagtacgcctgccttcccaacctggaccacgtgggccaccccacggagcgctgcttcgtcttctgagggccgggcacggtcacacggccacccgccccgcgcaccccacgccctgttcacgctcacccagtcacctccccacatcgcacactggggccccgggttcagcctggcctgcccgtgccctggtgaatcacctggctgagcagttcccctggagccccttcgggagcagggctgtgtcccagatgggccacggctgagccttcagagtacgtcctgcctggcacttactggtccttaccagagacgcccagccccatccctgtcctcatgacccctcgtccaccccccacacacactataaggctgagggctgccagcagccccgtctgcccaccattcccggccgtggaccatagtcgggatgtcagcagacacacatgggcagcccaaagctgcaggtgccagggcccaccccagcctcgcctgtcacccccactcccgcctcagggccaggcccaggcctcaccacctgacgctgcatgagacattgacaccagaaagccctcttgggggcactgctccctaccccagggccctggccagccgggagcttggctctcctctggctagagtgggaagagggggctggccatggggccctcccagaacctcagcatttccttccagcccatccaaacactgaggcagccttggggaaccccgagctggggggttggcagcccactgcaccgcctcagggttttggggtcctgggctggggccaccatccctgatggcagaactcccacaaccacatgtatttattcctctgtcctaaaccgtcccctccttccctcacccccagcacagggggattctgagcagtgcctcttgtctgagggacatatcagtgacctcgacgttgcctttagactacagttgtgttagcctcttgcgtattggctttttcagagtcatttatgagcagaaaaaaaaaaagtaaaactttgctaatattaacccttc

SEQ ID NO: 29760 - protein, 301 aa, Homo sapiens; identical to SEQ ID NO: 4097

SEQ ID NO: 29761 - DNA, 408 bp, Homo sapiens
gcgatgatgacaagggcttcgtggacctggtcatcaaggtgaagcctagaacctcagcatttccttccagcccatccaaacactgaggcagccttggggaaccccgagctggggggttggcagcccactgcaccgcctcagggttttggggtcctgggctggggccaccatccctgatggcagaactcccacaaccacatgtatttattcctctgtcctaaaccgtcccctccttccctcacccccagcacagggggattctgagcagtgcctcttgtctgagggacatatcagtgacctcgacgttgcctttagactacagttgtgttagcctcttgcgtattggctttttcagagtcatttatgagcagaaaaaaaaaaagtaaaactttgctaatattaaccctt

SEQ ID NO: 29762 - protein, 44 aa, Homo sapiens [sequence omitted]

SEQ ID NO: 29763 - DNA, 820 bp, Homo sapiens
cgcgggcccgggcgcgacggtctcggcggcggcggcggcggcgacagagcgagcgcggcgcggggccaccatgggggcccagctcagcacgttgggccatatggtgctcttcccagtctggttcctgtacagtctgctcatgaagctgttccagcgctccacgccagccatcaccctcgagagcccggacatcaagtacccgctgcggctcatcgaccgggagatcatcagccatgacacccggcgcttccgctttgccctgccgtcaccccagcacatcctgggcctccctgtcggccagcacatctacctctcggctcgaattgatggaaacctggtcgtccggccctatacacccatctccagcgatgatgacaagggcttcgtggacctggtcatcaaggtttacttcaaggacacccatcccaagtttcccgctggagggaagatgtctcagtacctggagagcatgcagattggagacaccattgagttccggggccccagtgggctgctggtctaccagggcaaaggtgattcgggtcggaatcccttggttacacggcaggctcagagaattggagagcttgggcgtgctgggtgcagggtgcaggcccctggctctgtgtggatgggtgactctcgtcaggccagctgtccctctctgggaactgagtctccctggctgtagagggggtaagttgctggcacaggggttgcagacaggccactcctgggggccacgtctcacccactgccagcctctatttggctttctcagcatctgaaacaagcaagcaagaggacagagctgagcctc

SEQ ID NO: 29764 - protein, 206 aa, Homo sapiens
MGAQLSTLGHMVLFPVWFLYSLLMKLFQRSTPAITLESPDIKYPLRLIDREIISHDTRRFRFALPSPQHILGLPVGQHIYLSARIDGNLVVRPYTPISSDDDKGFVDLVIKVYFKDTHPKFPAGGKMSQYLESMQIGDTIEFRGPSGLLVYQGKGDSGRNPLVTRQAQRIGELGRAGCRVQAPGSVWMGDSRQASCPSLGTESPWL

SEQ ID NO: 29765 - DNA, 433 bp, Homo sapiens
tctcaacaacaacaaaaaggaacgacagtaacagagccaggcatagtggtgcatgcacatggtcccagctactcagaaggcttgtgcccaggagtttgaggttgcagaaagcagcctgggtgacagagcgagaccttgttctaaaaaaacacaaacaaaaacaaaacaacccaccaataacaataacaagggaaaataccgttaaaaaacaggtttcaaaatgttattatttcatttgggtaagaaaaaaacatgtgtgcctgcttacataagtataaaacatatcacagggccaggcacggtggctcacgcctgtaattcgagcactttgagaggccaagtcgggtggatcacctgaggtcaggagttcgcttgaacctgggaggcagaggttgcagtgagccgagatcacaccattgcactatagcctggg

SEQ ID NO: 29766 - protein, 50 aa, Homo sapiens
MHMVPATQKACAQEFEVAESSLGDRARPCSKKTQTKTKQPTNNNNKGKYR

SEQ ID NO: 29767 - DNA, 799 bp, Homo sapiens
ttcaagaccagcctggccaacatggcgaaacattgtctctactaaaagtacaaaaattagccagacgtggtggtgctcacctgtaatcccagctactcgggaggctgaggcaggaaaatcacttgaacccgggaggcggaggtcacagttagccaagatcacaccactgtactccagcctgggtgatagagtgagactccatctcaaataaataaataaataaataaataaataaataaataaataaataagtgaaccacgcagggtccttccggggggtgaccttcagctggccattcgggatgatggactttccatcccagaaccatggctccatttgtccgtaaccttgtggagaagaccccagcactggtgaatgctgctgtgacttacttgaagcctcgattggccgcattttggtactacaccacggttgagctggttcctcccacccctgctgagatccctagagctattcagagcctgaaaaaaatagtcagtagtgctcagactggtagcttcaaacagctcacagttaaggaagctttgctgaacggtttggtggccactgaggtgtcgacgtggttttatgtcagagagatcacaggcaagcgtggcatcattggctagaatgtttgaagaccagtcttaacatctgattatatttgatttattatttgagtgttgttggaccaggtgtgatcagactgctatctgaataaaataagatttgtcagaaattccaaaaaaaaaaaaaagtgaatcaagcagttccaacccatgttcaagggtcaactgt

SEQ ID NO: 29768 - protein, 100 aa, Homo sapiens
MAPFVRNLVEKTPALVNAAVTYLKPRLAAFWYYTTVELVPPTPAEIPRAIQSLKKIVSSAQTGSFKQLTVKEALLNGLVATEVSTWFYVREITGKRGIIG

SEQ ID NO: 29769 - DNA, 2325 bp, Homo sapiens
tgcacttctgtgcctcaatttcctcatctgtagggtgggggtggtgattgccaccccatagggtggttataaggggccacacatgttcctatgtgtgagatgctgagaaagtcacctggcatggacaggatggacagccagtatttatcgaactatgaatgaatgaatgttaccctttagtgggttccagcgtcctatcctgtcggtgggaagactgaggctcagagagctccgtaacttgccccaggtcacacagccggttcaggcagagttggggtctcatgcctcccaggtgttcccacagtcttttccccaggagcagggtccaagcctgctgctcctccaaccacctgcgaggcacctgggcatgttcctggccaccaggaaagagaggtctaatggcagtagtaccagtcagcgtcatgtgcctggagcgagtgccctaccagccggttcctgctggaagctcctggtctgatctggggataccatgtccaagccccccgacctcctgctgcggctgctccggggcgccccaaggcagcgggtctgcaccctgttcatcatcggcttcaagttcacgtttttcgtctccatcatgatctactggcacgttgtgggagagcccaaggagaaagggcagctctataacctgccagcagagatcccctgccccaccttgacaccccccaccccaccctcccacggccccactccaggcaacatcttcttcctggagacttcagaccggaccaaccccaacttcctgttcatgtgctcggtggagtcggccgccagaactcaccccgaatcccacgtgctggtcctgatgaaagggcttccgggtggcaacgcctctctgccccggcacctgggcatctcacttctgagctgcttcccgaatgtccagatgctcccgctggacctgcgggagctgttccgggacacacccctggccgactggtacgcggccgtgcaggggcgctgggagccctacctgctgcccgtgctctccgacgcctccaggatcgcactcatgtggaagttcggcggcatctacctggacacggacttcattgttctcaagaacctgcggaacctgaccaacgtgctgggcacccagtcccgctacgtcctcaacggcgcgttcctggccttcgagcgccggcacgagttcatggcgctgtgcatgcgggacttcgtggaccactacaacggctggatctggggtcaccagggcccgcagctgctcacgcgggtcttcaagaagtggtgttccatccgcagcctggccgagagccgcgcctgccgcggcgtcaccaccctgccccctgaggccttctaccccatcccctggcaggactggaagaagtactttgaggacatcaaccccgaggagctgccgcggctgctcagtgccacctatgctgtccacgtgtggaacaagaagagccagggcacgcggttcgaggccacgtccagggcactgctggcccagctgcatgcccgctactgccccacgacgcacgaggccatgaaaatgtacttgtgaggggcccgccaggtcacctccccaacctgctcctgatggggcactgggccgcccttcccggggaggcaagattgagggcccgggagagggaggcccgagctgccaccgggcttaggcaggctgttgaggagctgtgggagcaggcccagtgggaggctgtggacaccccgaggacagtgtcctgtctcgaggcagggctgacacatggtgccatagccagcggagggcgctcagtgagtgccccgggccttctagacaacaggcaggaaggatgaacctcagggcacccccaggtggtgcggaaagccaggcagttgggacagaggtgcccacgagggcagaggccggtgctaaggggatggggaagaagggacaagattcccagagaggagaggaggctgttggtaggaaagtggcagggctgggggagacccagccccaagggtccggggcggaggatgctttgttcttttctggttttggttcctctttcgcggggggtgggggaggtcaacagggactgagtggggcagaggcccagaagtgccagcctggggagccgtttgggggcagccccttctgcccaccccatccttcttcctctccagagatgccaggggggcgtgtatgctctgccccttccctcagacaggggctgggtggggaggctctttaggctcaggagaagcattttaaagaaacccccaccctgccgcccgcattataaacacaggagaataatcaatagaataaaagtgaccgactgtcacttc

SEQ ID NO: 29770 - protein, 106 aa, Homo sapiens
MPPRCSHSLFPRSRVQACCSSNHLRGTWACSWPPGKRGLMAVVPVSVMCLERVPYQPVPAGSSWSDLGIPCPSPPTSCCGCSGAPQGSGSAPCSSSASSSRFSSPS

SEQ ID NO: 29771 - DNA, 2595 bp, Homo sapiens
cctgtgtggccagggggacgaggcctctgagagccagcgacctgtttcactctcttcttgccatcttttgcagatggatttgcagccgctgcaagtgtgtggaagggccgtgttcgtgttggcaaagaaggtcggctgctgagccagggcgtgtctcccggaggcctgtgggctgccaggatccccacctctctgcaatgggctgcccaggctggtcagttaccagccagtgacatcagcgaggttccctgctctctaccctgggaagggcccagcctaagttaccaagccccaggctcccagtaccaccctcagcctatgtggattgccaccccaccttctgcctgtccttgggaggggaccgactcttagctccccttagcaatcaggttgcacccagtcccttgactttatgcccaggtttcctggcacctaaagtagaaacgatgcaactgcccctcgggcttgctgagggtcaaagggggtgtgactttgtcatggagcgtagaagtcagagtcgatggtgatcccgctggctgttaacatcgatacagttcaggtcagcatgcaccaagttcctccaacacaccaggtacattggctagccacctctcccaggcagggcggtgcagtggtgagagcagggaccccagccaggtggcctgggtcctaaccccctgcactgtcattgctggctgtgggactctgcacaagaccagccggttcctgctggaagctcctggtctgatctggggataccatgtccaagccccccgacctcctgctgcggctgctccggggcgccccaaggcagcgggtctgcaccctgttcatcatcggcttcaagttcacgtttttcgtctccatcatgatctactggcacgttgtgggagagcccaaggagaaagggcagctctataacctgccagcagagatcccctgccccaccttgacaccccccaccccaccctcccacggccccactccaggcaacatcttcttcctggagacttcagaccggaccaaccccaacttcctgttcatgtgctcggtggagtcggccgccagaactcaccccgaatcccacgtgctggtcctgatgaaagggcttccgggtggcaacgcctctctgccccggcacctgggcatctcacttctgagctgcttcccgaatgtccagatgctcccgctggacctgcgggagctgttccgggacacacccctggccgactggtacgcggccgtgcaggggcgctgggagccctacctgctgcccgtgctctccgacgcctccaggatcgcactcatgtggaagttcggcggcatctacctggacacggacttcattgttctcaagaacctgcggaacctgaccaacgtgctgggcacccagtcccgctacgtcctcaacggcgcgttcctggccttcgagcgccggcacgagttcatggcgctgtgcatgcgggacttcgtggaccactacaacggctggatctggggtcaccagggcccgcagctgctcacgcgggtcttcaagaagtggtgttccatccgcagcctggccgagagccgcgcctgccgcggcgtcaccaccctgccccctgaggccttctaccccatcccctggcaggactggaagaagtactttgaggacatcaaccccgaggagctgccgcggctgctcagtgccacctatgctgtccacgtgtggaacaagaagagccagggcacgcggttcgaggccacgtccagggcactgctggcccagctgcatgcccgctactgccccacgacgcacgaggccatgaaaatgtacttgtgaggggcccgccaggtcacctccccaacctgctcctgatggggcactgggccgcccttcccggggaggcaagattgagggcccgggagagggaggcccgagctgccaccgggcttaggcaggctgttgaggagctgtgggagcaggcccagtgggaggctgtggacaccccgaggacagtgtcctgtctcgaggcagggctgacacatggtgccatagccagcggagggcgctcagtgagtgccccgggccttctagacaacaggcaggaaggatgaacctcagggcacccccaggtggtgcggaaagccaggcagttgggacagaggtgcccacgagggcagaggccggtgctaaggggatggggaagaagggacaagattcccagagaggagaggaggctgttggtaggaaagtggcagggctgggggagacccagccccaagggtccggggcggaggatgctttgttcttttctggttttggttcctctttcgcggggggtgggggaggtcaacagggactgagtggggcagaggcccagaagtgccagcctggggagccgtttgggggcagccccttctgcccaccccatccttcttcctctccagagatgccaggggggcgtgtatgctctgccccttccctcagacaggggctgggtggggaggctctttaggctcaggagaagcattttaaagaaacccccaccctgccgcccgcattataaacacaggagaataatcaatagaataaaagtgaccgactgtcacttc

SEQ ID NO: 29772 - protein, 353 aa, Homo sapiens; identical to SEQ ID NO: 4101

SEQ ID NO: 29773 - DNA, 1996 bp, Homo sapiens
cgcgccgcccgcccgccggggccccgctgtccgccgcccgccgccgctggagctagagatggatttgcagccgctgcaagtgtgtggaagggccgtgttcgtgttggcaaagaagaccagccggttcctgctggaagctcctggtctgatctggggataccatgtccaagccccccgacctcctgctgcggctgctccggggcgccccaaggcagcgggtctgcaccctgttcatcatcggcttcaagttcacgtttttcgtctccatcatgatctactggcacgttgtgggagagcccaaggagaaagggcagctctataacctgccagcagagatcccctgccccaccttgacaccccccaccccaccctcccacggccccactccaggcaacatcttcttcctggagacttcagaccggaccaaccccaacttcctgttcatgtgctcggtggagtcggccgccagaactcaccccgaatcccacgtgctggtcctgatgaaagggcttccgggtggcaacgcctctctgccccggcacctgggcatctcacttctgagctgcttcccgaatgtccagatgctcccgctggacctgcgggagctgttccgggacacacccctggccgactggtacgcggccgtgcaggggcgctgggagccctacctgctgcccgtgctctccgacgcctccaggatcgcactcatgtggaagttcggcggcatctacctggacacggacttcattgttctcaagaacctgcggaacctgaccaacgtgctgggcacccagtcccgctacgtcctcaacggcgcgttcctggccttcgagcgccggcacgagttcatggcgctgtgcatgcgggacttcgtggaccactacaacggctggatctggggtcaccagggcccgcagctgctcacgcgggtcttcaagaagtggtgttccatccgcagcctggccgagagccgcgcctgccgcggcgtcaccaccctgccccctgaggccttctaccccatcccctggcaggactggaagaagtactttgaggacatcaaccccgaggagctgccgcggctgctcagtgccacctatgctgtccacgtgtggaacaagaagagccagggcacgcggttcgaggccacgtccagggcactgctggcccagctgcatgcccgctactgccccacgacgcacgaggccatgaaaatgtacttgtgaggggcccgccaggtcacctccccaacctgctcctgatggggcactgggccgcccttcccggggaggcaagattgagggcccgggagagggaggcccgagctgccaccgggcttaggcaggctgttgaggagctgtgggagcaggcccagtgggaggctgtggacaccccgaggacagtgtcctgtctcgaggcagggctgacacatggtgccatagccagcggagggcgctcagtgagtgccccgggccttctagacaacaggcaggaaggatgaacctcagggcacccccaggtggtgcggaaagccaggcagttgggacagaggtgcccacgagggcagaggccggtgctaaggggatggggaagaagggacaagattcccagagaggagaggaggctgttggtaggaaagtggcagggctgggggagacccagccccaagggtccggggcggaggatgctttgttcttttctggttttggttcctctttcgcggggggtgggggaggtcaacagggactgagtggggcagaggcccagaagtgccagcctggggagccgtttgggggcagccccttctgcccaccccatccttcttcctctccagagatgccaggggggcgtgtatgctctgccccttccctcagacaggggctgggtggggaggctctttaggctcaggagaagcattttaaagaaacccccaccctgccgcccgcattataaacacaggagaataatcaatagaataaaagtgaccgactgtcacttc

SEQ ID NO: 29774 - protein, 87 aa, Homo sapiens
MDLQPLQVCGRAVFVLAKKTSRFLLEAPGLIWGYHVQAPRPPAAAAPGRPKAAGLHPVHHRLQVHVFRLHHDLLARCGRAQGERAAL

SEQ ID NO: 29775 - DNA, 2101 bp, Homo sapiens
caggcactgccctccggccgccgcgccgcccgcccgccggggccccgctgtccgccgcccgccgccgctggagctagagatggatttgcagccgctgcaagtgtgtggaagggccgtgttcgtgttggcaaagaaggtcggctgctgagccagggcgtgtctcccggaggcctgtgggctgccaggatccccacctctctgcaatgggctgcccaggctgaccagccggttcctgctggaagctcctggtctgatctggggataccatgtccaagccccccgacctcctgctgcggctgctccggggcgccccaaggcagcgggtctgcaccctgttcatcatcggcttcaagttcacgtttttcgtctccatcatgatctactggcacgttgtgggagagcccaaggagaaagggcagctctataacctgccagcagagatcccctgccccaccttgacaccccccaccccaccctcccacggccccactccaggcaacatcttcttcctggagacttcagaccggaccaaccccaacttcctgttcatgtgctcggtggagtcggccgccagaactcaccccgaatcccacgtgctggtcctgatgaaagggcttccgggtggcaacgcctctctgccccggcacctgggcatctcacttctgagctgcttcccgaatgtccagatgctcccgctggacctgcgggagctgttccgggacacacccctggccgactggtacgcggccgtgcaggggcgctgggagccctacctgctgcccgtgctctccgacgcctccaggatcgcactcatgtggaagttcggcggcatctacctggacacggacttcattgttctcaagaacctgcggaacctgaccaacgtgctgggcacccagtcccgctacgtcctcaacggcgcgttcctggccttcgagcgccggcacgagttcatggcgctgtgcatgcgggacttcgtggaccactacaacggctggatctggggtcaccagggcccgcagctgctcacgcgggtcttcaagaagtggtgttccatccgcagcctggccgagagccgcgcctgccgcggcgtcaccaccctgccccctgaggccttctaccccatcccctggcaggactggaagaagtactttgaggacatcaaccccgaggagctgccgcggctgctcagtgccacctatgctgtccacgtgtggaacaagaagagccagggcacgcggttcgaggccacgtccagggcactgctggcccagctgcatgcccgctactgccccacgacgcacgaggccatgaaaatgtacttgtgaggggcccgccaggtcacctccccaacctgctcctgatggggcactgggccgcccttcccggggaggcaagattgagggcccgggagagggaggcccgagctgccaccgggcttaggcaggctgttgaggagctgtgggagcaggcccagtgggaggctgtggacaccccgaggacagtgtcctgtctcgaggcagggctgacacatggtgccatagccagcggagggcgctcagtgagtgccccgggccttctagacaacaggcaggaaggatgaacctcagggcacccccaggtggtgcggaaagccaggcagttgggacagaggtgcccacgagggcagaggccggtgctaaggggatggggaagaagggacaagattcccagagaggagaggaggctgttggtaggaaagtggcagggctgggggagacccagccccaagggtccggggcggaggatgctttgttcttttctggttttggttcctctttcgcggggggtgggggaggtcaacagggactgagtggggcagaggcccagaagtgccagcctggggagccgtttgggggcagccccttctgcccaccccatccttcttcctctccagagatgccaggggggcgtgtatgctctgccccttccctcagacaggggctgggtggggaggctctttaggctcaggagaagcattttaaagaaacccccaccctgccgcccgcattataaacacaggagaataatcaatagaataaaagtgaccgactgtcacttc

SEQ ID NO: 29776 - protein, 353 aa, Homo sapiens; identical to SEQ ID NO: 4101

SEQ ID NO: 29777 - DNA, 1960 bp, Homo sapiens
tcccggcaggaggcggtgggatcaggccgacccgggtcccaggggtgacagcgtcccttctccactgcagaatatcgagaccagccggttcctgctggaagctcctggtctgatctggggataccatgtccaagccccccgacctcctgctgcggctgctccggggcgccccaaggcagcgggtctgcaccctgttcatcatcggcttcaagttcacgtttttcgtctccatcatgatctactggcacgttgtgggagagcccaaggagaaagggcagctctataacctgccagcagagatcccctgccccaccttgacaccccccaccccaccctcccacggccccactccaggcaacatcttcttcctggagacttcagaccggaccaaccccaacttcctgttcatgtgctcggtggagtcggccgccagaactcaccccgaatcccacgtgctggtcctgatgaaagggcttccgggtggcaacgcctctctgccccggcacctgggcatctcacttctgagctgcttcccgaatgtccagatgctcccgctggacctgcgggagctgttccgggacacacccctggccgactggtacgcggccgtgcaggggcgctgggagccctacctgctgcccgtgctctccgacgcctccaggatcgcactcatgtggaagttcggcggcatctacctggacacggacttcattgttctcaagaacctgcggaacctgaccaacgtgctgggcacccagtcccgctacgtcctcaacggcgcgttcctggccttcgagcgccggcacgagttcatggcgctgtgcatgcgggacttcgtggaccactacaacggctggatctggggtcaccagggcccgcagctgctcacgcgggtcttcaagaagtggtgttccatccgcagcctggccgagagccgcgcctgccgcggcgtcaccaccctgccccctgaggccttctaccccatcccctggcaggactggaagaagtactttgaggacatcaaccccgaggagctgccgcggctgctcagtgccacctatgctgtccacgtgtggaacaagaagagccagggcacgcggttcgaggccacgtccagggcactgctggcccagctgcatgcccgctactgccccacgacgcacgaggccatgaaaatgtacttgtgaggggcccgccaggtcacctccccaacctgctcctgatggggcactgggccgcccttcccggggaggcaagattgagggcccgggagagggaggcccgagctgccaccgggcttaggcaggctgttgaggagctgtgggagcaggcccagtgggaggctgtggacaccccgaggacagtgtcctgtctcgaggcagggctgacacatggtgccatagccagcggagggcgctcagtgagtgccccgggccttctagacaacaggcaggaaggatgaacctcagggcacccccaggtggtgcggaaagccaggcagttgggacagaggtgcccacgagggcagaggccggtgctaaggggatggggaagaagggacaagattcccagagaggagaggaggctgttggtaggaaagtggcagggctgggggagacccagccccaagggtccggggcggaggatgctttgttcttttctggttttggttcctctttcgcggggggtgggggaggtcaacagggactgagtggggcagaggcccagaagtgccagcctggggagccgtttgggggcagccccttctgcccaccccatccttcttcctctccagagatgccaggggggcgtgtatgctctgccccttccctcagacaggggctgggtggggaggctctttaggctcaggagaagcattttaaagaaacccccaccctgccgcccgcattataaacacaggagaataatcaatagaataaaagtgaccgactgtcacttc

SEQ ID NO: 29778 - protein, 353 aa, Homo sapiens; identical to SEQ ID NO: 4101

SEQ ID NO: 29779 - DNA, 397 bp, Homo sapiens
gatccccacctctctgcaatgggctgcccaggctggtcagttaccagccagtgacatcagcgaggttccctgctctctaccctgggaagggcccagcctaagttaccaagccccaggctcccagtaccaccctcagcctatgtggattgccaccccaccttctgcctgtccttgggaggggaccgacgtttgggggcagccccttctgcccaccccatccttcttcctctccagagatgccaggggggcgtgtatgctctgccccttccctcagacaggggctgggtggggaggctctttaggctcaggagaagcattttaaagaaacccccaccctgccgcccgcattataaacacaggagaataatcaatagaataaaagtgaccgactgtcact

SEQ ID NO: 29780 - protein, 60 aa, Homo sapiens
MWIATPPSACPWEGTDVWGQPLLPTPSFFLSRDARGACMLCPFPQTGAGWGGSLGSGEAF

SEQ ID NO: 29781 - DNA, 311 bp, Homo sapiens
gacttcagaccggaccaaccccaacttcctgttcatgtgctcggtggagtcggccgccagaactcaccccgaatcccacgtgctggtcctgatgaaagggcttccgggtggcaacccccttctgcccaccccatccttcttcctctccagagatgccaggggggcgtgtatgctctgccccttccctcagacaggggctgggtggggaggctctttaggctcaggagaagcattttaaagaaacccccaccctgccgcccgcattataaacacaggagaataatcaatagaataaaagtgaccgactgtca

SEQ ID NO: 29782 - protein, 67 aa, Homo sapiens
MCSVESAARTHPESHVLVLMKGLPGGNPLLPTPSFFLSRDARGACMLCPFPQTGAGWGGSLGSGEAF

SEQ ID NO: 29783 - DNA, 1159 bp, Homo sapiens
tgcgggagctgttccgggacacacccctggccgactggtacgcggccgtgcaggggcgctgggagccctacctgctgcccgtgctctccgacgcctccaggatcgcactcatgtggaagttcggcggcatctacctggacacggacttcattgttctcaagaacctgcggaacctgaccaacgtgctgggcacccagtcccgctacgtcctcaacggcgcgttcctggccttcgagcgccggcacgagttcatggcgctgtgcatgcgggacttcgtggaccactacaacggctggatctggggtcaccagggcccgcagctgctcacgcgggtcttcaagaagtggtgttccatccgcagcctggccgagagccgcgcctgccgcggcgtcaccaccctgccccctgaggccttctaccccatcccctggcaggactggaagaagtactttgaggacatcaaccccgaggagctgccgcggctgctcagtgccacctatgctgtccacgtgtggaacaagaagagccagggcacgcggttcgaggccacgtccagggcactgctggcccagctgcatgcccgctactgccccacgacgcacgaggccatgaaaatgtacttgtgaggggcccgccaggtcacctccccaacctgctcctgatggggcactgggccgcccttcccggggaggcaagattgagggcccgggagagggaggcccgagctgccaccgggcttaggcaggctgttgaggagctgtgggagcaggcccagtgggaggctgtggacaccccgaggacagtgtcctgtctcgaggcagggctgacacatggtgccatagccagcggagggcgctcagtgagtgccccgggccttctagacaacaggcaggaaggatgaacctcagggcacccccaggtggtgcggaaagccaggcagttgggacagaggtgcccacgagggcagaggccggtgctaaggggatggggaagaagggacaagattcccagagaggagaggaggctgttggtaggaaagtggcagggtgggtggggaggctctttaggctcaggagaagcattttaaagaaacccccaccctgccgcccgcattataaacacaggagaataatcaatagaataaaagtgaccgactgtc

SEQ ID NO: 29784 - protein, 86 aa, Homo sapiens
MNLRAPPGGAESQAVGTEVPTRAEAGAKGMGKKGQDSQRGEEAVGRKVAGWVGRLFRLRRSILKKPPPCRPHYKHRRIINRIKVTD

SEQ ID NO: 29785 - DNA, 1404 bp, Homo sapiens
actgccctccggccgccgcgccgcccgcccgccggggccccgctgtccgccgcccgccgccgctggagctagaggtacgaggggccgcgccgatgttgcgggggacgggggctccagggggatcctgcgctgtgcagttggccacaggactaggggagcccccttcccttccagaccagtgtccacataccctcccctgtgcccacacaccttcccctgtgcccgcactgtcacccaccacaagcctactccagcaggagcaccacagccttctgcggtcacgctgtgcagtcagctggcagacagggagccaggtggaccagcacatgagagcgaaacaggaagagtgtctgtcttcacctgtttgaaagtcattgtcccagatatagttacgggacccagagagccctgatcatctgtgaccatcatttgctccttccccttcaggtgggggtaggcctctacccattaagccagacactgttacctgaccttaccagaccctctcagccaccatgctctgttattcccattttacagacaaggagactgagtctcagagtcaagcacctcctcttggccacagtgagattgagcccctagccctggtgcagccccaggcaaatgaggctgggccacaggtagacagacccctttcccccagcaaagggtgtttgaaccccgctctgccgctgcccagcaggccttggtttcctctacacttacactgtagttaatcataagaggacctgccacacaggatggtgagggattgaacaagtcaaagcaggaaaccactttgaccaacggctgcacatggtcagtgctcagaaaatacacgccattgttactattaaaccacacagctccaggcctgacagtgagcttttaataaatgttaactcaacactggagaagccttctcaccccgtcagcagtgcaaacagaaacaacagtgagatcacatttgccactcaccccagtggtggagaggatggtcatgcaccccactcgccctcctatgccctgggagagcctgtggtgaggcaagtgtgccctgagcctggagtaggagtgggagagagcaggttagggctccatatctgaagatttaaattatatttctgaggccgggcgcagtggttcatgcctgtaatcccagcactttgggaggccgaagcgggcggatcacctgaggtcgggagttcgagaccagcctgaccaacatggagaaaccctatctctactaaaaatacaaaattagctgggtgtgctggtgcattcctgtaatcccacctactcaggaggctgaggcagaagaatcgcttgaacgcaggaggcggagtttgcagtgagctgagattgcaccattgcactccagcctgggcaaaaagagcgaaactc

SEQ ID NO: 29786 - protein, 91 aa, Homo sapiens
MLRGTGAPGGSCAVQLATGLGEPPSLPDQCPHTLPCAHTPSPVPALSPTTSLLQQEHHSLLRSRCAVSWQTGSQVDQHMRAKQEECLSSPV

SEQ ID NO: 29787 - DNA, 1024 bp, Homo sapiens
caccgctgggcctgcaggtctctgtcgagccgcggacgcgggtctctgttccgctggatggggtttgttaaagttgttaagaataaggcctactttaacagataccaagtgaaatttagaagacgacgagagggtaaaactgattactatgctcggaaacgcttggtgatacaggataaaaataaatacaacacacccaagtataggatgattgttcgtgtaactgacagagatatcatttgtcagattgcttatgcccgtatagagggggatatgatagtctgcgcggcatatgcacacgaactgccaaaatacggtgtgaaggttggcccgacaaattatgctgctgcatattgtactggcctgctgctggcccgcaggcttcttgataggtttggcatggacaagatctatgacggccaagtggaggtgactggcgataaatacaatgtggaaagtactgatggtcagccaggtgccttcacctgctgtatggatgcaggtcttgccagaactaccactggcaataaagtttttggcgccctgaagggagttgtggatggaggcttgtctgtccctcacagcaccaaatgattccctggttatgattctgaaagcaaggaatttaatgcaggagtacaccagaagcacttcatgggccagaatgttgcagattacatgcgctacttaatggaagaagatgacgatgcttacaagaaacagttctctcaatacataaagaacagcgtaactccagacatgatggaggagatgtataagaaagctcatgctgctatacgagagaatccagtctatgaaaagaagcccaagaaagaagttaaaaaggagaggtggaaccttcccaaaatgccccttgctcagaagaaggatcaggtagctcaaaagaaggcaagcttcctcagagctcaggagcgggctgctgagagctaaaccaaacaattttctatgatgatttttcagatacagacaataaacttagggccagcaaaaaaaaaaaaaaaaa

SEQ ID NO: 29788 - protein, 178 aa, Homo sapiens [sequence omitted]

SEQ ID NO: 29789 - DNA, 328 bp, Homo sapiens
tgccaggaacaccagctggcgagcgggaagctggagcaagctgccagctgatagatcgagtcaggcaagagagccccaagcccttcgacctctaaacagatccctcctcttctcggtgacctccctttcccagcctgcctggacggttgttctgtgacttaacagtggctcccccagccccaaagccagcccccttcatctgtgacttagtctgctgtcgtggtgagctgacacatccaggtgtgaccactggtgaaaacttgtgcctctgttgtacaccctgccctgttctataaatatctatcaatactcatatatagacacacct

SEQ ID NO: 29790 - protein, 51 aa, Homo sapiens
ARNTSWRAGSWSKLPADRSSQAREPQALRPLNRSLLFSVTSLSQPAWTVVL

SEQ ID NO: 29791 - DNA, 3324 bp, Homo sapiens
agcggcgcggctgaagcgagggcggggagggaaagcgagcggcgcctgcgccccggcggtggacgggcccggtcgtgggcggggattggggcggagcctgaccgttacgcgcagccccgcccccgcggcctcgtcgctcctgctgaggcggtagccgcttttcgtcgactcttaccggttggctgggccagctgcgccgcggctcacagctgacgatgggggaccccagcaagcaggacatcttgaccatcttcaagcgcctccgctcggtgcccactaacaaggtgtgttttgattgtggtgccaaaaatcccagctgggcaagcataacctatggagtgttcctttgcattgattgctcagggtcccaccggtcacttggtgttcacttgagttttattcgatctacagagttggattccaactggtcatggtttcagttgcgatgcatgcaagtcggaggaaacgctagtgcatcttccttttttcatcaacatgggtgttccaccaatgacaccaatgccaagtacaacagtcgtgctgctcagctctatagggagaaaatcaaatcgctcgcctctcaagcaacacggaagcatggcactgatctgtggcttgatagttgtgtggttccacctttgtcccctccaccaaaggaggaagatttttttgcctctcacgtttctcctgaggtgagtgacacagcgtgggcatcagcaatagcagaaccatcttctttaacatcaaggcctgtggaaaccactttggaaaataatgaaggtggacaagagcaaggaccaagtgtggaaggtcttaatgtaccaacaaaggctactttagaggtatcctctatcataaaaaagaaaccaaatcaagctaaaaaaggccttggggccaaaaaaggaagtttgggagctcagaaactggcaaacacatgctttaatgaaattgaaaaacaagctcaagctgcggataaaatgaaggagcaggaagacctggccaaggtggtatctaaagaagaatcaattgtttcatcattacgattagcctataaggatcttgaaattcaaatgaagaaagacgaaaagatgaacattagtggcaaaaaaaatgttgactcagacagactcggcatgggatttggaaattgcagaagtgttatttcacattcagtgacttcagatatgcagaccatagagcaggaatcacccattatggcaaaaccaagaaaaaagtataatgatgacagtgacgattcatattttacttccagctcaagttactttgacgagccagtggagttaaggagcagttctttctctagctgggatgacagttcagattcctattggaaaaaagagaccagcaaagatactgaaacagttctgaaaaccacaggctattcagacagacctactgctcgccgcaagccagattatgagccagttgaaaatacagatgaggcccagaagaagtttggcaatgtcaaggccatttcatcagatatgtattttggaagacaatcccaggctgattatgagaccagggcccgcctagagaggctgtcggcaagttcctccataagctcggctgatctgttcgaggagccgaggaagcagccagcagggaactacagcctgtccagtgtgctgcccaacgcccccgacatggcgcagttcaagcagggagtgagatcggttgctggaaaactctccgtctttgctaatggagtcgtgacttcaattcaggatcgctacggttcttaatactgaagtcatgatgtgtatttcctggagaaattcctctttaaatgaacaagtaaccacatctcaggcggcagtgaagtccagatagttttgcagattgttttgctactttttcatatggtatatgtttctgatttttaatatttcttttgagaaattctgagttctgatgtaggagctttcctgtgatttctgtttcacgttccttcctgtcacaccctcctttggcgtctctgtgtatatccttgctttattttcttggaacctttgatttcaacactgagggcctggagacctcggctcctcctgctcctgaaccaggaggcttcatgtgggggaggaggagaggtctccatgtgacacatgggctcagggctgccagaatcagcggatgctggatgggcctgcagaaacaacactcaccacacacacttccttcaaaagaccaaaagtgactggtgtctcgtgtgacagattgcttcatttatgtttctacatagtaaggtgactgccaaataatatttgaagtcatctgtctctttgtaaattattttatatgacctataaatttaaaaatgtttttcagtgagtgcttttaacaaacttaagcttctgccctgccaagggaattaatgttatcttgtgaaaggtgttgctgtttgaattgatgagaaatggaagatgagaactccctaagagttctcataataaatcatctcatcacaaatcaatacggtatacagagttaaagtggaatgaggtaagaagatacagctacagaaaatagttgcgtgtatgggagaacagtcattgtaattgggtagttttgttaataaatatttttaaatcttgcttttcagaaattaccgaatgtgtataaacaaataaagaaaaataatttagctgtgttttagacagcattagaatatattgttcagcacagtaaaatatatttgaaatttgataagccaaaaatgtggttttgaatgaatattttgtgaatctttcttaaaagctcaaatttgtagacttctaaatagaataaacacttgcagcagatggcattgcctacatttttccctgaaagctttcgtaataagtcatcgtaagtcgaggtttttggtgtgacattgatgaacgtttgaattgtggtgactgtaggtggacgtggatttagcgtgcgtgcggggcctgctgtgcagttgtgatgaatttgggatgttgtttgtagcacaggagcaaggcggggtgtcccggttgaaaatggggatgttgggccaggtgaggcggctcacacctgtaatcctagcaccttaggaggctggggcgggaggattgcctgagcccaggagtttgaaaccaggctggacaacacagcaagaccccgcctctaccaaaaaagaaaaaattcagccgggtgcagtggcatgtgcctgtaattccagctactcaggaagctgcagcaggaggatcccttgagcccaggaggtcaaggctgcaatgagctacgacctggacactgcactgcagcctggatgacagagcaagaccctgtctc

SEQ ID NO: 29792 - protein, 516 aa, Homo sapiens
MGDPSKQDILTIFKRLRSVPTNKVCFDCGAKNPSWASITYGVFLCIDCSGSHRSLGVHLSFIRSTELDSNWSWFQLRCMQVGGNASASSFFHQHGCSTNDTNAKYNSRAAQLYREKIKSLASQATRKHGTDLWLDSCVVPPLSPPPKEEDFFASHVSPEVSDTAWASAIAEPSSLTSRPVETTLENNEGGQEQGPSVEGLNVPTKATLEVSSIIKKKPNQAKKGLGAKKGSLGAQKLANTCFNEIEKQAQAADKMKEQEDLAKVVSKEESIVSSLRLAYKDLEIQMKKDEKMNISGKKNVDSDRLGMGFGNCRSVISHSVTSDMQTIEQESPIMAKPRKKYNDDSDDSYFTSSSSYFDEPVELRSSSFSSWDDSSDSYWKKETSKDTETVLKTTGYSDRPTARRKPDYEPVENTDEAQKKFGNVKAISSDMYFGRQSQADYETRARLERLSASSSISSADLFEEPRKQPAGNYSLSSVLPNAPDMAQFKQGVRSVAGKLSVFANGVVTSIQDRYGS

SEQ ID NO: 29793 - DNA, 2849 bp, Homo sapiens
agcggcgcggctgaagcgagggcggggagggaaagcgagcggcgcctgcgccccggcggtggacgggcccggtcgtgggcggggattggggcggagcctgaccgttacgcgcagccccgcccccgcggcctcgtcgctcctgctgaggcggtagccgcttttcgtcgactcttaccggttggctgggccagctgcgccgcggctcacagctgacgatgggggaccccagcaagcaggacatcttgaccatcttcaagcgcctccgctcggtgcccactaacaaggtgtgttttgattgtggtgccaaaaatcccagctgggcaagcataacctatggagtgttcctttgcattgattgctcagggtcccaccggtcacttggtgttcacttgagttttattcgatctacagagttggattccaactggtcatggtttcagttgcgatgcatgcaagtcggaggaaacgctagtgcatcttccttttttcatcaacatgggtgttccaccaatgacaccaatgccaagtacaacagtcgtgctgctcagctctatagggagaaaatcaaatcgctcgcctctcaagcaacacggaagcatggcactgatctgtggcttgatagttgtgtggttccacctttgtcccctccaccaaaggaggaagatttttttgcctctcacgtttctcctgaggtgagtgacacagcgtgggcatcagcaatagcagaaccatcttctttaacatcaaggcctgtggaaaccactttggaaaataatgaaggtggacaagagcaaggaccaagtgtggaaggtcttaatgtaccaacaaaggctactttagaggtatcctctatcataaaaaagaaaccaaatcaagctaaaaaaggccttggggccaaaaaaggaagtttgggagctcagaaactggcaaacacatgctttaatgaaattgaaaaacaagctcaagctgcggataaaatgaaggagcaggaagacctggccaaggtggtatctaaagaagaatcaattgtttcatcattacgattagcctataaggatcttgaaattcaaatgaagaaagacgaaaagatgaacattagtggcaaaaaaaatgttgactcagacagactcggcatgggatttggaaattgcagaagtgttatttcacattcagtgacttcagatatgcagaccatagagcaggaatcacccattatggcaaaaccaagaaaaaagtataatgatgacagtgacgattcatattttacttccagctcaagttactttgacgagccagtggagttaaggagcagttctttctctagctgggatgacagttcagattcctattggaaaaaagagaccagcaaagatactgaaacagttctgaaaaccacaggctattcagacagacctactgctcgccgcaagccagattatgagccagttgaaaatacagatgaggcccagaagaagtttggcaatgtcaaggccatttcatcagatatgtattttggaagacaatcccaggctgattatgagaccagggcccgcctagagaggctgtcggcaagttcctccataagctcggctgatctgttcgaggagccgaggaagcagccagcagggaactacagcctgtccagtgtgctgcccaacgcccccgacatggcgcagttcaagcagggagtgagatcggttgctggaaaactctccgtctttgctaatggagtcgtgacttcaattcaggatcgctacggttcttaatactgaagtcatgatgtgtatttcctggagaaattcctctttaaatgaacaagtaaccacatctcaggcggcagtgaagtccagatagttttgcagattgttttgctactttttcatatggtatatgtttctgatttttaatatttcttttgagaaattctgagttctgatgtaggagctttcctgtgatttctgtttcacgttccttcctgtcacaccctcctttggcgtctctgtgtatatccttgctttattttcttggaacctttgatttcaacactgagggcctggagacctcggctcctcctgctcctgaaccaggaggcttcatgtgggggaggaggagaggtctccatgtgacacatgggctcagggctgccagaatcagcggatgctggatgggcctgcagaaacaacactcaccacacacacttccttcaaaagaccaaaagtgactggtgtctcgtgtgacagattgcttcatttatgtttctacatagtaaggtgactgccaaataatatttgaagtcatctgtctctttgtaaattattttatatgacctataaatttaaaaatgtttttcagtgagtgcttttaacaaacttaagcttctgccctgccaagggaattaatgttatcttgtgaaaggtgttgctgtttgaattgatgagaaatggaagatgagaactccctaagagttctcataataaatcatctcatcacaaatcaatacggtatacagagttaaagtggaatgaggtaagaagatacagctacagaaaatagttgcgtgtatgggagaacagtcattgtaattgggtagttttgttaataaatatttttaaatcttgcttttcagaaattaccgaatgtgtataaacaaataaagaaaaataatttagctgtgttttagacagcattagaatatattgttcagcacagtaaaatatatttgaaatttgataagccaaaaatgtggttttgaatgaatattttgtgaatctttcttaaaagctcaaatttgtagacttctaaatagaataaacacttgcagcagatggcattgcctacatttttccctg

SEQ ID NO: 29794 - protein, 516 aa, Homo sapiens; identical to SEQ ID NO: 29792

SEQ ID NO: 29795 - DNA, 4103 bp, Homo sapiens
gaggattgcttgaatccaggagttggaggctgcagtgagccatgatcatgccacactaccctccagcctaggtgacagagtcagaccatctcaaaaaacaaagaaaagggccaggagcggtggctcacgcctgtaatccagcactcggcctcccagagtgctgggattacaggcatgagccactgcgcctggccatacgtagttttacgaaaatattaatgtgcatgcttttctctgtagtcttccttttttcatcaacatgggtgttccaccaatgacaccaatgccaagtacaacagtcgtgctgctcagctctatagggagaaaatcaaatcgctcgcctctcaagcaacacggaagcatggcactgatgtaagtcactggaggctggattgtttcctttagatacatgttcacttcatagaaaaagtgatttttatcctgaatagtaaaacttttctacctgagttgtcttacaaggaattagtgtacagtagattcttactattgaagtagttatgttctgtaaattcatcatgagtactggattagtgaatactaaaacattgctcctaggagaaatacaggattaggttcctataagctctggtctcattttcatcaactgatcaatacataaccttatttaacatgtgtttctatttaaagacacctttttaaatatatattgatggctcatgaatattgaactcacagccaaggactataactcagccctgaatgaagcttatttaatgcctgaattttctccatgaggcacatcacagccttcatgtgcttcagaacattagatagcccttcagtactgcacttgagaggcatcttaaaaaatgacatcctcaataaaaagcatgggaatatgaagaacatagcacaaaataaactgcagaaaggacatttgttatgagaactgaaacaagaaggcagagtagtgtgtcttgttctacctcagctgagaatgtgcttcttgggcaactcattttttgctgcactattctccaaatgactgaaaacaccacgaggactaattttgggttaaacgtaaattttagcaagtaggtagattcataaatatggaatccatgaataacaaggattgattatcatttggaacctgcatttagatatgaagtctttgatctttccttttcagaaatggtttatgtgtttgaggtccttgacttcctcaaggtttggaagcaaaatttactggatgatagattactaaagtgcacgcagaggtcctctgtagggatgttactgattttataagaatggaaagcaccaatctttaggaaacaggtctctaagggaagtgaaaggtatcaaataaaatcctttacaggccggatgaaatgctcagccctgtgttgtttttttgttctagctgtggcttgatagttgtgtggttccacctttgtcccctccaccaaaggaggaagatttttttgcctctcacgtttctcctgaggtatgtattatgcttcacatcattttaaagtgtgcttactctgacagttaacaaaaggtgcatatttaaaatgttaggatgtaggctaagctcttgtaacaagaagtgctgaaacataactactgaagagagaaatgacattatcaacaattccaaggttaggatatctgctattgactgatggacttactttgctgttctcaacatgtggcttccatctcagggtctaaagcagctgctccagtttaagactctcccagattaagagaaaaagacaagcatccttgagagctaatgccctattcttctatttatttatttttggggggactgaatctggctctgtttcccaggctggagtgcagtggcacgatctcagctcattacaacctctgccccctgggttcaagtgattctccagcctcagcctcccgagtagctgggactacaggtgcgcaccaacacacccagctaatattttttttgagatggagtttcgctcttgtcacctagggtggagtgcaatggtgtgatcttggctcactgcaatctccgcctcctgggttcaagcgattctcttgcctcagcctcccgagtagctgggacaacaggtgcacgccaccacacctggctaatttttgtatttgtagtagagacgaggtttcaccatattggctaggctggtctcgaactcctgacctcaggtgatacccccgccttggccacccaaagttctgggattataggtgtgagccaccataccccaccacagatgccctattcttttacagaaaaagtctggagggagctcccatcccttctacttatgtcctatgagctggaatttagttgcatgtcttatctagctgctagggagaactgagaatttattactagtagtgtgccacagttcagttcagagctctgaaactgactaaaaatgaaaacatttttaataggggtttcattctcagtgccccagttttgctgtttatgtagtattatctcaaagctattggatgagttaatgcaggtaaaagtacttagtacctggcacaaagtaagccttcagtaagtgctctaaatatcactatcttcatctttgtgacctgatagcaacagtgacagcaatccatagtacttctgtggcctctcctcagatcacttagatctagggaaagtaaagcctaaaaggcgacaatatttactatttggccctttcttttctttcttcctttctttttttttttttttaaagacggagttttccctcttgtttcccaggctgtagcgcaatggcgcgatctcggctcactgcaacatccacctcccgggttcaagcgattctcctgcctcagcctcccaactagctgggattataggcatgtgccaccacacctggctaattttgtatttttagtggagacggggtttcgccatgttggtcaggcttgtctcaaactcctgacctcaggtgatccacctgcttcggcctcctaaagtgctgggattataggcatgagccaccacaccgggcctactatttagccctttaaggtaacgtgtgcctacctctgtcttggaccatcatatgttctgccagctactctagctcctcccagtcccactgggtaaggagcacgatttgttgaactcttgctcaatctattctttaattttctttttttctttcgttttttttttttttgagatggagtcttactcttctgtcacccacgttggagtgcactggcacaatcttggctcactgcagcctctgcctcccaggttcaggtgattctcctgcctcagcctcccaagtagttgggattacaggcccacaccaccacgcctggctaattttttttgtaattttagtagagacagggtttcaccatattggccagtctggtctcgaactcctgacctcaggtgatctgcctgccgcagcctcccaaaatgctgggattacagatgtgagccactgtgcccagcttattccttaattttcaatttaaaactatgtaaagttgtacacaggttgttaaagcttgttttttgggttttttttttttttttgctattataatttgcacatacttattagcattgtcacagtcaatagttaccaaaaatggttatcaagaaagaggagaacaggccaggcatgttggctcatgcctgtaatctcagcagtttgggaggccgaggtgggaggatagcttgagcccaggcgtttgagacgagcctgggcagcatagtgagactccttctctacaaaaaatttaaactttagctgggcgtggtggcacatgcctgcaatctcagctactcaggaggctgaggtggaagcactgcttgagcctgggaggtcaaggctccagtgagctgtgattgtgcttctgcactctagcctgggcaacagagcaagaccctgtttctaaaaaaaaaagaaagcaagaaaaaagtagatatgccttcctttccattaacagggactcagaatgtggctgtttaaattgttaggtttttcccgtgctttgatgtgttttttatggctgttttcttgctttgtctgctaatgacttttctcgccttgtttcaggtgagt

SEQ ID NO: 29796 - protein, 72 aa, Homo sapiens
MPYSSIYLFLGGLNLALFPRLECSGTISAHYNLCPLGSSDSPASASRVAGTTGAHQHTQLIFFLRWSFALVT

SEQ ID NO: 29797 - DNA, 968 bp, Homo sapiens
cctcaacccgcactgccatctctccatgaacgtgacacaaaagcccttggtttcagaaagccagtttccgggcaaagaaagctttccacccagggcctggcgtgagctgagggcaagaattaaaaagagtcgggcgcggcggctcacgtctgtaatcccagcaatttggaaggccgaagtgggtggatcacctgaagtcaggagttcgagaccagcctgggcaacatggtgtgttttgattgtggtgccaaaaatcccagctgggcaagcataacctatggagtgttcctttgcattgattgctcagggtcccaccggtcacttggtgttcacttgagttttattcgatctacagagttggattccaactggtcatggtttcagttgcgatgcatgcaagtcggaggaaacgctagtgcatcttccttttttcatcaacatgggtgttccaccaatgacaccaatgccaagtacaacagtcgtgctgctcagctctatagggagaaaatcaaatcgctcgcctctcaagcaacacggaagcatggcactgatgtaagtcactggaggctggattgtttcctttagatacatgttcacttcatagaaaaagtgatttttatcctgaatagtaaaacttttctacctgagttgtcttacaaggaattagtgtacagtagattcttactattgaagtagttatgttctgtaaattcatcatgagtactggattagtgaatactaaaacattgctcctaggagaaatacaggattaggttcctataagctctggtctcattttcatcaactgatcaatacataaccttatttaacatgtgtttctatttaaagacacctttttaaatatatattgatggctcatgaatattgaactcacagccaaggactataactcagccctgaatgaagcttatttaatgcctgaattttctccatgaggcacatcacag

SEQ ID NO: 29798 - protein, 119 aa, Homo sapiens
MVCFDCGAKNPSWASITYGVFLCIDCSGSHRSLGVHLSFIRSTELDSNWSWFQLRCMQVGGNASASSFFHQHGCSTNDTNAKYNSRAAQLYREKIKSLASQATRKHGTDVSHWRLDCFL

SEQ ID NO: 29799 - DNA, 543 bp, Homo sapiens
ccccccgccccaagagctcgccggggggtgtgcccgcgccgccgcccccgggaacgctccccggctcgcgtgaggacccccgcgctgcggcctcccgcccgggcctctcagctgcccggccccgcccgccccggcccggccaggctgccgcggccccacagtgcgacgtgtcacaggccgcgccggccccgcctcccaagccacgggcactggcgcccgcggggcctcccgccggttcccgcagggatgccaggcaggcccgcactcgcccgcggccgctaccttgttagtgggcaccgagcggaggcgcttgaagatggtcaagatgtcctgcttgctggggtcccccatcgtcagctgtgagccgcggcgcagctggcccagccaaccggggttttcccccctttgctcagcatgtctctttcctgctgccatgtgaagaaggatgtgtttgctgccccttctgctatgattataagtttcctgaggcttccccagccatgcagatgtgtgagtcaattaaacctttttcctttataaatt

SEQ ID NO: 29800 - protein, 40 aa, Homo sapiens
MVKMSCLLGSPIVSCEPRRSWPSQPGFSPLCSACLFPAAM

SEQ ID NO: 29801 - DNA, 679 bp, Homo sapiens
caggaagacgcagaacaacagaaatagccgcccctccccgcccactgtgcctgttggcctatcatagatctctatgttcttgactttgtctctcctttccgagtcaatggtgggttacactgatcttgttccactgattactctctctgacgagtccatcacctgcaacttaaatgaacaagcttacatcccattttgagtgaagattttgaggtttttaatttaaaggctgtgtacagttatacttttttatacacctgttcatttctacttaaattatggcacagattgatgcgcaccagtcttgaggaaacgatctccctattcccttaccctgttactcagccacgccgtgtgtaggcttagcctcaggtggcagatgtttgaggaaaggaattatgccaggaaggtgggaccgggttatggtcggtgtttcacgtgactcagcagtgcccgccgccgtcaccagctatgcattcactccgtttccagtgagcagatgtcttgcttggaaagtggacctgtgtctgtgtctgtcctgagaacttaccagcagaaatcctcatttctgtgctacggatttaccaaaaattgtcaagtctttttcagtttaacagttcctttacatgtgtagtatttgaggaaaaaaatcaataaacagttgatctcgtgcatatgg

SEQ ID NO: 29802 - protein, 47 aa, Homo sapiens
MPGRWDRVMVGVSRDSAVPAAVTSYAFTPFPVSRCLAWKVDLCLCLS

SEQ ID NO: 29803 - DNA, 379 bp, Homo sapiens
cccgcccagtctgcgcagtcacagtccagctacaaccccttcgaggattcgcccgggagcaggtgctgcagccagagttacgcgggggccacgcgggccggcgggggtggggggaacgtgggggaacctgtgtttcacgtgactcagcagtgcccgccgccgtcaccagctatgcattcactccgtttccagtgagcagatgtcttgcttggaaagtggacctgtgtctgtgtctgtcctgagaacttaccagcagaaatcctcatttctgtgctacggatttaccaaaaattgtcaagtctttttcagtttaacagttcctttacatgtgtagtatttgaggaaaaaaatcaataaacagttgatctcgtgcatatgg

SEQ ID NO: 29804 - protein, 44 aa, Homo sapiens
MSCLESGPVSVSVLRTYQQKSSFLCYGFTKNCQVFFSLTVPLHV

SEQ ID NO: 29805 - DNA, 3087 bp, Homo sapiens
agaggtcagacatgccagcagggttggaaagaggcaggtacggaagctgagctgcagagttagccggcatctgacagaaaaatgtttgtctacagattttgagcgttcgaagttgacccctgactaagtatactttgctgctccctcagcctttgaaaaaatgtctgtcacatatgatgattccgttggagtagaagtgtccagcgacagcttctgggaggtcgggaactacaagcggactgtgaagcggatcgacgatggccaccgcctgtgcagcgacctcatgaactgcctgcatgagcgggcgcgcatcgagaaggcgtatgcgcagcagctcactgagtgggcccggcgctggaggcagctcgtggagaaagggccccagtacgggaccgtggagaaggcctggatggccttcatgtccgaggcagagagggtgagcgagctgcacctcgaggtgaaggcctcactgatgaacgatgacttcgagaagatcaagaactggcagaaggaagcctttcacaagcagatgatgggcggcttcaaggagaccaaggaagctgaggacggctttcggaaggcacagaagccctgggccaagaagctgaaagaggtagaagcagcaaagaaagcccaccatgcagcgtgcaaagaggagaagctggctatctcacgagaagccaacagcaaggcagacccatccctcaaccctgaacagctcaagaaattgcaagacaaaatagaaaagtgcaagcaagatgttcttaagaccaaagagaagtatgagaagtccctgaaggaactcgaccagggcacaccccagtacatggagaacatggagcaggtgtttgagcagtgccagcagttcgaggagaaacgccttcgcttcttccgggaggttctgctggaggttcagaagcacctagacctgtccaatgtggctggctacaaagccatttaccatgacctggagcagagcatcagagcagctgatgcagtggaggacctgaggtggttccgagccaatcacgggccgggcatggccatgaactggccgcagtttgaggagtggtccgcagacctgaatcgaaccctcagccggagagagaagaagaaggccactgacggcgtcaccctgacgggcatcaaccagacaggcgaccagtctctgccgagtaagcccagcagtgtgagcagctacgagaagacccagagctatcccaccgactggtcagacgatgagtctaacaaccccttctcctccacggatgccaatggggactcgaatccattcgacgacgacgccacctcggggacggaagtgcgagtccgggccctgtatgactatgaggggcaggagcatgatgagctgagcttcaaggctggggatgagctgaccaagatggaggacgaggatgagcagggctggtgcaagggacgcttggacaacgggcaagttggcctatacccggcaaattatgtggaggcgatccagtgatgagtcggggacaggccagcggggggacggaggcggcgggcccaggagcctcagccagccacgtgggcatccactccttttcctgcaagagatgatggttccattgctcttggcttcatggtgttcctggaaggcagatgagctggtcatttcgcctgggactcggcacctttccgagtgcagctggagggatctgagcgcaggaagacgcagaacaacagaaatagccgcccctccccgcccactgtgcctgttggcctatcatagatctctatgttcttgactttgtctctcctttccgagtcaatggtgggttacactgatcttgttccactgattactctctctgacgagtccatcacctgcaacttaaatgaacaagcttacatcccattttgagtgaagattttgaggtttttaatttaaaggctgtgtacagttatacttttttatacacctgttcatttctacttaaattatggcacagattgatgcgcaccagtcttgaggaaacgatctccctattcccttaccctgttactcagccacgccgtgtgtaggcttagcctcaggtggcagatgtttgaggaaaggaattatgccaggaaggtgggaccgggttatggtcgggtttctattgggaatgctctttgtgcttttgggcatctgaatggaagctttacatagaaccttaggtagaactcccccaaatcgccatatttaaaaattattttcactctattcttgcttaaaactgtactcttttgcaaattaacaattttatcactgattcagagttaaaaagaagactaacttttcaagcaaatgcatctgtaaagatgctttagattagactgtcatgtctcagtgtctatctgtatatattatttgatattcagagaatctaaagcactcgtctactgttttaatgagatttaacagcttttaacagtgagtttcgtttgtaaactgcttgaagtctgtggcattcaggcacacgtctggctggccggctgggtctcctcccgggctcagtgggcctggggcctctctgacgtggtgcctgctggagggaggctcgtcgtcaccagctgactgctggtccggcttctgaccggcctttgtcctggctccgtagcagaacactgtaaaagtgcccgcgtctttgcagtagttgcagatttcagtcgtcgtgttacttgtgcacaaacagaagctgggtcttacccgcagcacgagtgtctcgggctgcccggagtcgcccgggagcaggtgctgcagccagagttacgcgggggccacgcgggccggcgggggtggggggaacgtgggggaacctgtgtttcacgtgactcagcagtgcccgccgccgtcaccagctatgcattcactccgtttccagtgagcagatgtcttgcttggaaagtggacctgtgtctgtgtctgtcctgagaacttaccagcagaaatcctcatttctgtgctacggatttaccaaaaattgtcaagtctttttcagtttaacagttcctttacatgtgtagtatttgaggaaaaaaatcaataaacagttgatctcgtgcatatgg

SEQ ID NO: 29806 - protein, 445 aa, Homo sapiens
MSVTYDDSVGVEVSSDSFWEVGNYKRTVKRIDDGHRLCSDLMNCLHERARIEKAYAQQLTEWARRWRQLVEKGPQYGTVEKAWMAFMSEAERVSELHLEVKASLMNDDFEKIKNWQKEAFHKQMMGGFKETKEAEDGFRKAQKPWAKKLKEVEAAKKAHHAACKEEKLAISREANSKADPSLNPEQLKKLQDKIEKCKQDVLKTKEKYEKSLKELDQGTPQYMENMEQVFEQCQQFEEKRLRFFREVLLEVQKHLDLSNVAGYKAIYHDLEQSIRAADAVEDLRWFRANHGPGMAMNWPQFEEWSADLNRTLSRREKKKATDGVTLTGINQTGDQSLPSKPSSVSSYEKTQSYPTDWSDDESNNPFSSTDANGDSNPFDDDATSGTEVRVRALYDYEGQEHDELSFKAGDELTKMEDEDEQGWCKGRLDNGQVGLYPANYVEAIQ

SEQ ID NO: 29807 - DNA, 3754 bp, Homo sapiens
aaccccccgtttaaactaagcgggtccacgtggaatgacgcttttggcgcaagtcggaggagctcctaacgacattagcttctttgagtcccttgggagaggaaactttctgaaagactgtaggattaccttccctgaacttccggtcaggtgcggtgctgccctgccgcgccctcttacccctggatgccgacgaaaccgcaaaactccagccccgggaagcgcgtctcaaggaccaccaccagcgagcggctttgggagagtaatctgcgccaccctcgcagcccattaaataggcactccccgtttgattgacaggagaagtcaccaatgcgcgtcctggggctttccctcgtcctcacgcggggtgagccgcctctctactcatctggcccaatcgggggcgccggggaggctgtggggcggggctcggtgtccggtagccaatggacagagcccagcgggagcggcgggggcggtgcggtcgcggctggcggcagaagcggccgcaggggtctgggcagggctgggcagtgctgccggagcaaaagcggtagcgggagcccggccggagctgggtctggagacgccgtggcagcctgaacggagtgtgcgacggattgggaggtttgtctacagattttgagcgttcgaagttgacccctgactaagtatactttgctgctccctcagcctttgaaaaaatgtctgtcacatatgatgattccgttggagtagaagtgtccagcgacagcttctgggaggtcgggaactacaagcggactgtgaagcggatcgacgatggccaccgcctgtgcagcgacctcatgaactgcctgcatgagcgggcgcgcatcgagaaggcgtatgcgcagcagctcactgagtgggcccggcgctggaggcagctcgtggagaaagggccccagtacgggaccgtggagaaggcctggatggccttcatgtccgaggcagagagggtgagcgagctgcacctcgaggtgaaggcctcactgatgaacgatgacttcgagaagatcaagaactggcagaaggaagcctttcacaagcagatgatgggcggcttcaaggagaccaaggaagctgaggacggctttcggaaggcacagaagccctgggccaagaagctgaaagaggtagaagcagcaaagaaagcccaccatgcagcgtgcaaagaggagaagctggctatctcacgagaagccaacagcaaggcagacccatccctcaaccctgaacagctcaagaaattgcaagacaaaatagaaaagtgcaagcaagatgttcttaagaccaaagagaagtatgagaagtccctgaaggaactcgaccagggcacaccccagtacatggagaacatggagcaggtgtttgagcagtgccagcagttcgaggagaaacgccttcgcttcttccgggaggttctgctggaggttcagaagcacctagacctgtccaatgtggctggctacaaagccatttaccatgacctggagcagagcatcagagcagctgatgcagtggaggacctgaggtggttccgagccaatcacgggccgggcatggccatgaactggccgcagtttgaggagtggtccgcagacctgaatcgaaccctcagccggagagagaagaagaaggccactgacggcgtcaccctgacgggcatcaaccagacaggcgaccagtctctgccgagtaagcccagcagcacccttaatgtcccgagcaaccccgcccagtctgcgcagtcacagtccagctacaaccccttcgaggatgaggacgacacgggcagcaccgtcagtgagaaggacgacactaaggccaaaaatgtgagcagctacgagaagacccagagctatcccaccgactggtcagacgatgagtctaacaaccccttctcctccacggatgccaatggggactcgaatccattcgacgacgacgccacctcggggacggaagtgcgagtccgggccctgtatgactatgaggggcaggagcatgatgagctgagcttcaaggctggggatgagctgaccaagatggaggacgaggatgagcagggctggtgcaagggacgcttggacaacgggcaagttggcctatacccggcaaattatgtggaggcgatccagtgatgagtcggggacaggccagcggggggacggaggcggcgggcccaggagcctcagccagccacgtgggcatccactccttttcctgcaagagatgatggttccattgctcttggcttcatggtgttcctggaaggcagatgagctggtcatttcgcctgggactcggcacctttccgagtgcagctggagggatctgagcgcaggaagacgcagaacaacagaaatagccgcccctccccgcccactgtgcctgttggcctatcatagatctctatgttcttgactttgtctctcctttccgagtcaatggtgggttacactgatcttgttccactgattactctctctgacgagtccatcacctgcaacttaaatgaacaagcttacatcccattttgagtgaagattttgaggtttttaatttaaaggctgtgtacagttatacttttttatacacctgttcatttctacttaaattatggcacagattgatgcgcaccagtcttgaggaaacgatctccctattcccttaccctgttactcagccacgccgtgtgtaggcttagcctcaggtggcagatgtttgaggaaaggaattatgccaggaaggtgggaccgggttatggtcgggtttctattgggaatgctctttgtgcttttgggcatctgaatggaagctttacatagaaccttaggtagaactcccccaaatcgccatatttaaaaattattttcactctattcttgcttaaaactgtactcttttgcaaattaacaattttatcactgattcagagttaaaaagaagactaacttttcaagcaaatgcatctgtaaagatgctttagattagactgtcatgtctcagtgtctatctgtatatattatttgatattcagagaatctaaagcactcgtctactgttttaatgagatttaacagcttttaacagtgagtttcgtttgtaaactgcttgaagtctgtggcattcaggcacacgtctggctggccggctgggtctcctcccgggctcagtgggcctggggcctctctgacgtggtgcctgctggagggaggctcgtcgtcaccagctgactgctggtccggcttctgaccggcctttgtcctggctccgtagcagaacactgtaaaagtgcccgcgtctttgcagtagttgcagatttcagtcgtcgtgttacttgtgcacaaacagaagctgggtcttacccgcagcacgagtgtctcgggctgcccggagtcgcccgggagcaggtgctgcagccagagttacgcgggggccacgcgggccggcgggggtggggggaacgtgggggaacctgtgtttcacgtgactcagcagtgcccgccgccgtcaccagctatgcattcactccgtttccagtgagcagatgtcttgcttggaaagtggacctgtgtctgtgtctgtcctgagaacttaccagcagaaatcctcatttctgtgctacggatttaccaaaaattgtcaagtctttttcagtttaacagttcctttacatgtgtagtatttgaggaaaaaaatcaataaacagttgatctcgtgcatatgg

SEQ ID NO: 29808 - protein, 486 aa, Homo sapiens
MSVTYDDSVGVEVSSDSFWEVGNYKRTVKRIDDGHRLCSDLMNCLHERARIEKAYAQQLTEWARRWRQLVEKGPQYGTVEKAWMAFMSEAERVSELHLEVKASLMNDDFEKIKNWQKEAFHKQMMGGFKETKEAEDGFRKAQKPWAKKLKEVEAAKKAHHAACKEEKLAISREANSKADPSLNPEQLKKLQDKIEKCKQDVLKTKEKYEKSLKELDQGTPQYMENMEQVFEQCQQFEEKRLRFFREVLLEVQKHLDLSNVAGYKAIYHDLEQSIRAADAVEDLRWFRANHGPGMAMNWPQFEEWSADLNRTLSRREKKKATDGVTLTGINQTGDQSLPSKPSSTLNVPSNPAQSAQSQSSYNPFEDEDDTGSTVSEKDDTKAKNVSSYEKTQSYPTDWSDDESNNPFSSTDANGDSNPFDDDATSGTEVRVRALYDYEGQEHDELSFKAGDELTKMEDEDEQGWCKGRLDNGQVGLYPANYVEAIQ

SEQ ID NO: 29809 - DNA, 2107 bp, Homo sapiens
ctgtcccactgggcaggtgcctctgacggagaggaggcgtcgtcgggaagtatgtggccgtggctgctctggcatgatcctgaagactggcacgaaggggaatggagccgcacagagaatttcaggcatcagaggggaagcgcaggtttgtctacagattttgagcgttcgaagttgacccctgactaagtatactttgctgctccctcagcctttgaaaaaatgtctgtcacatatgatgattccgttggagtagaagtgtccagcgacagcttctgggaggtcgggaactacaagcggactgtgaagcggatcgacgatggccaccgcctgtgcagcgacctcatgaactgcctgcatgagcgggcgcgcatcgagaaggcgtatgcgcagcagctcactgagtgggcccggcgctggaggcagctcgtggagaaagggccccagtacgggaccgtggagaaggcctggatggccttcatgtccgaggcagagagggtgagcgagctgcacctcgaggtgaaggcctcactgatgaacgatgacttcgagaagatcaagaactggcagaaggaagcctttcacaagcagatgatgggcggcttcaaggagaccaaggaagctgaggacggctttcggaaggcacagaagccctgggccaagaagctgaaagaggtagaagcagcaaagaaagcccaccatgcagcgtgcaaagaggagaagctggctatctcacgagaagccaacagcaaggcagacccatccctcaaccctgaacagctcaagaaattgcaagacaaaatagaaaagtgcaagcaagatgttcttaagaccaaagagaagtatgagaagtccctgaaggaactcgaccagggcacaccccagtacatggagaacatggagcaggtgtttgagcagtgccagcagttcgaggagaaacgccttcgcttcttccgggaggttctgctggaggttcagaagcacctagacctgtccaatgtggctggctacaaagccatttaccatgacctggagcagagcatcagagcagctgatgcagtggaggacctgaggtggttccgagccaatcacgggccgggcatggccatgaactggccgcagtttgaggagtggtccgcagacctgaatcgaaccctcagccggagagagaagaagaaggccactgacggcgtcaccctgacgggcatcaaccagacaggcgaccagtctctgccgagtaagcccagcagcacccttaatgtcccgagcaaccccgcccagtctgcgcagtcacagtccagctacaaccccttcgaggatgaggacgacacgggcagcaccgtcagtgagaaggacgacactaaggccaaaaatgtgagcagctacgagaagacccagagctatcccaccgactggtcagacgatgagtctaacaaccccttctcctccacggatgccaatggggactcgaatccattcgacgacgacgccacctcggggacggaagtgcgagtccgggccctgtatgactatgaggggcaggagcatgatgagctgagcttcaaggctggggatgagctgaccaagatggaggacgaggatgagcagggctggtgcaagggacgcttggacaacgggcaagttggcctatacccggcaaattatgtggaggcgatccagtgatgagtcggggacaggccagcggggggacggaggcggcgggcccaggagcctcagccagccacgtgggcatccactccttttcctgcaagagatgatggttccattgctcttggcttcatggtgttcctggaaggcagatgagctggtcatttcgcctgggactcggcacctttccgagtgcagctggagggatctgagcgcaggaagacgcagaacaacagaaatagccgcccctccccgcccactgtgcctgttggcctatcatagatctctatgttcttgactttgtctctcctttccgagtcaatggtgggttacactgatcttgttccactgattactctctctgacgagtccatcacctgcaacttaaatgaacaagcttacatcccattttgagtgaagattttgaggtttttaattt

SEQ ID NO: 29810 - protein, 486 aa, Homo sapiens; identical to SEQ ID NO: 29808

SEQ ID NO: 29811 - DNA, 4120 bp, Homo sapiens
cagcggggcccgcattgagcatgggcgcggcggccgtgcgctggcacttgtgcgtgctgctggccctgggcacacgcgggcggctggccgggggcagcgggctcccagggtcagtcgacgtggatgagtgctcagagggcacagatgactgccacatcgatgccatctgtcagaacacgcccaagtcctacaaatgcctctgcaagccaggctacaagggggaaggcaagcagtgtgaagacattgacgagtgtgagaatgactactacaatgggggctgtgtccacgagtgcatcaacatcccggggaactacaggtgtacctgctttgatggcttcatgctggcacacgatggacacaactgcctggatgtggacgagtgtcaggacaataatggtggctgccagcagatctgcgtcaatgccatgggcagctacgagtgtcagtgccacagtggcttcttccttagtgacaaccagcatacctgcatccaccgctccaatgagggtatgaactgcatgaacaaagaccatggctgtgcccacatctgccgggagacgcccaaaggtggggtggcctgcgactgcaggcccggctttgaccttgcccaaaaccagaaggactgcacactaacctgtaattatggaaacggaggctgccagcacagctgtgaggacacagacacaggccccacgtgtggttgccaccagaagtacgccctccactcagacggtcgcacgtgcatcgagacgtgcgcagtcaataacggaggctgcgaccggacatgcaaggacacagccactggcgtgcgatgcagctgccccgttggattcacactgcagccggacgggaagacatgcaaagacatcaacgagtgcctggtcaacaacggaggctgcgaccacttctgccgcaacaccgtgggcagcttcgagtgcggctgccggaagggctacaagctgctcaccgacgagcgcacctgccaggacatcgacgagtgctccttcgagcggacctgtgaccacatctgcatcaactccccgggcagcttccagtgcctgtgtcaccgcggctacatcctctacgggacaacccactgcggagatgtggacgagtgcagcatgagcaacgggagctgtgaccagggctgcgtcaacaccaagggcagctacgagtgcgtctgtcccccggggaggcggctccactggaacgggaaggattgcgtggagacaggcaagtgtctttctcgcgccaagacctccccccgggcccagctgtcctgcagcaaggcaggcggtgtggagagctgcttcctttcctgcccggctcacacactcttcgtgccagactcggaaaatagctacgtcctgagctgcggagttccagggccgcagggcaaggcgctgcagaaacgcaacggcaccagctctggcctcgggcccagctgctcagatgcccccaccacccccatcaaacagaaggcccgcttcaagatccgagatgccaagtgccacctccggccccacagccaggcacgagcaaaggagaccgccaggcagccgctgctggaccactgccatgtgactttcgtgaccctcaagtgtgactcctccaagaagaggcgccgtggccgcaagtccccatccaaggaggtgtcccacatcacagcagagtttgagatcgagacaaagatggaagaggcctcagacacatgcgaagcggactgcttgcggaagcgagcagaacagagcctgcaggccgccatcaagaccctgcgcaagtccatcggccggcagcagttctatgtccaggtctcaggcactgagtacgaggtagcccagaggccagccaaggcgctggaggggcagggggcatgtggcgcaggccaggtgctacaggacagcaaatgcgttgcctgtgggcctggcacccacttcggtggtgagctcggccagtgtgtgtcatgtatgccaggaacataccaggacatggaaggccagctcagttgcacaccgtgccccagcagcgacgggcttggtctgcctggtgcccgcaacgtgtcggaatgtggaggcaatgttctccaggcttcttctcggccgatggcttcaagccctgccaggcctgccccgtgggcacgtaccagcctgagcccgggcgcaccggctgcttcccctgtggagggggtttgctcaccaaacacgaaggcaccacctccttccaggactgcgaggctaaagtgcactgctcccccggccaccactacaacaccaccacccaccgctgcatccgctgccccgtcggcacctaccagcccgagtttggccagaaccactgcatcacctgtccgggcaacaccagcacagacttcgatggctccaccaacgtcacacactgcaaaaaccagcactgcggcggcgagcttggtgactacaccggctacatcgagtcccccaactaccctggcgactacccagccaacgctgaatgcgtctggcacatcgcgcctcccccaaagcgcaggatcctcatcgtggtccctgagatcttcctgcccatcgaggatgagtgcggcgatgttctggtcatgaggaagagtgcctctcccacgtccatcaccacctatgagacctgccagacctacgagaggcccatcgccttcacctcccgctcccgcaagctctggatccagttcaaatccaatgaaggcaacagcggcaaaggcttccaagtgccctatgtcacctacgatgaggactaccagcaactcatagaggacatcgtgcgcgatgggcgcctgtacgcctcggagaaccaccaggaaattttgaaagacaagaagctgatcaaggccctcttcgacgtgctggcgcatccccagaactacttcaagtacacagcccaggaatccaaggagatgttcccacggtccttcatcaaactgctgcgctccaaagtgtctcggttcctgcggccctacaaataaccggggggagcggccctgcctgggggtggcctggtccgcggagggtgcacctgccctccacagtgggagctgcatgggcctccacaccaccttgggaaccccatggcactgcccttcagggaagccgaccagcccatggagaccgagcccaggcacccttcggacccgctgcccctgtgggagcaccctgcttcaggaagcctccctccctccctctgcctcccttccccaggacaccaagagcgccctctcctgagccctggcagaccgactgcaggtagcaggattgcaggaccctctgcctggcctggcgtttcaggagagaggggaagtggggcctgtgctctgggaggcgtggtcatccgagacaggagtccaggggagagaggaggggacaaaggcgccgtctgggggaggtcgatgagcctgtgctggcatccgcgggccccacgctttgccaactcctccagccacaggcaaggccacggctccgggctgttgcgctctaagggttctgtgattggatggaacagagctgctggggaggagactggaagtttctgcattccttcaacagaacatttaatgaagtactctatatatatatataaatatatatataaatatatatatatacttctatttgtgggtactttaggaaaatgccctttggtcactgtaaatatgaattgtgaccccatcccttcccgcatgagcccagtgagtcccagcagctatcagcctccctgaacgattaaacagctcctcccagcatttgcatttgcccttctgtttctgtgaggccggcagcccttggggctggggagagcacagcttgccttggacttgcttctgaacacgaattcttcgagaactaggctcagatgctctgctggagtgttggcctcaccccagtccccttgccagcaacatcactgcccttggacgagactcagtggaagacacttcccctcggacccgttcccaggaggtgcaggggcccagcaataaacggcgaaaggggccttggctcttgccctgtggcagtgaccttggggtccgtactatgcccaggtgtcagcaggaaacaaggccttgctcacaggagcacaggctgtaccaccacaaggagcc

SEQ ID NO: 29812 - protein, 856 aa, Homo sapiens
MGAAAVRWHLCVLLALGTRGRLAGGSGLPGSVDVDECSEGTDDCHIDAICQNTPKSYKCLCKPGYKGEGKQCEDIDECENDYYNGGCVHECINIPGNYRCTCFDGFMLAHDGHNCLDVDECQDNNGGCQQICVNAMGSYECQCHSGFFLSDNQHTCIHRSNEGMNCMNKDHGCAHICRETPKGGVACDCRPGFDLAQNQKDCTLTCNYGNGGCQHSCEDTDTGPTCGCHQKYALHSDGRTCIETCAVNNGGCDRTCKDTATGVRCSCPVGFTLQPDGKTCKDINECLVNNGGCDHFCRNTVGSFECGCRKGYKLLTDERTCQDIDECSFERTCDHICINSPGSFQCLCHRGYILYGTTHCGDVDECSMSNGSCDQGCVNTKGSYECVCPPGRRLHWNGKDCVETGKCLSRAKTSPRAQLSCSKAGGVESCFLSCPAHTLFVPDSENSYVLSCGVPGPQGKALQKRNGTSSGLGPSCSDAPTTPIKQKARFKIRDAKCHLRPHSQARAKETARQPLLDHCHVTFVTLKCDSSKKRRRGRKSPSKEVSHITAEFEIETKMEEASDTCEADCLRKRAEQSLQAAIKTLRKSIGRQQFYVQVSGTEYEVAQRPAKALEGQGACGAGQVLQDSKCVACGPGTHFGGELGQCVSCMPGTYQDMEGQLSCTPCPSSDGLGLPGARNVSECGGNVLQASSRPMASSPARPAPWARTSLSPGAPAASPVEGVCSPNTKAPPPSRTARLKCTAPPATTTTPPPTAASAAPSAPTSPSLARTTASPVRATPAQTSMAPPTSHTAKTSTAAASLVTTPATSSPPTTLATTQPTLNASGTSRLPQSAGSSSWSLRSSCPSRMSAAMFWS

SEQ ID NO: 29813 - DNA, 3700 bp, Homo sapiens
gagcagcgagcagcgcctgcgggagcggccggtcggtcgggtccccgcgccccgcacgcccgcacgcccagcggggcccgcattgagcatgggcgcggcggccgtgcgctggcacttgtgcgtgctgctggccctgggcacacgcgggcggctggccgggggcagcgggctcccagggtcagtcgacgtggatgagtgctcagagggcacagatgactgccacatcgatgccatctgtcagaacacgcccaagtcctacaaatgcctctgcaagccaggctacaagggggaaggcaagcagtgtgaagacattgacgagtgtgagaatgactactacaatgggggctgtgtccacgagtgcatcaacatcccggggaactacaggtgtacctgctttgatggcttcatgctggcacacgatggacacaactgcctggatgtggacgagtgtcaggacaataatggtggctgccagcagatctgcgtcaatgccatgggcagctacgagtgtcagtgccacagtggcttcttccttagtgacaaccagcatacctgcatccaccgctccaatgagggtatgaactgcatgaacaaagaccatggctgtgcccacatctgccgggagacgcccaaaggtggggtggcctgcgactgcaggcccggctttgaccttgcccaaaaccagaaggactgcacactaacctgtaattatggaaacggaggctgccagcacagctgtgaggacacagacacaggccccacgtgtggttgccaccagaagtacgccctccactcagacggtcgcacgtgcatcgagacgtgcgcagtcaataacggaggctgcgaccggacatgcaaggacacagccactggcgtgcgatgcagctgccccgttggattcacactgcagccggacgggaagacatgcaaagacatcaacgagtgcctggtcaacaacggaggctgcgaccacttctgccgcaacaccgtgggcagcttcgagtgcggctgccggaagggctacaagctgctcaccgacgagcgcacctgccaggacatcgacgagtgctccttcgagcggacctgtgaccacatctgcatcaactccccgggcacgagcaaaggagaccgccaggcagccgctgctggaccactgccatgtgactttcgtgaccctcaagtgtgactcctccaagaagaggcgccgtggccgcaagtccccatccaaggaggtgtcccacatcacagcagagtttgagatcgagacaaagatggaagaggcctcagacacatgcgaagcggactgcttgcggaagcgagcagaacagagcctgcaggccgccatcaagaccctgcgcaagtccatcggccggcagcagttctatgtccaggtctcaggcactgagtacgaggtagcccagaggccagccaaggcgctggaggggcagggggcatgtggcgcaggccaggtgctacaggacagcaaatgcgttgcctgtgggcctggcacccacttcggtggtgagctcggccagtgtgtgtcatgtatgccaggaacataccaggacatggaaggccagctcagttgcacaccgtgccccagcagcgacgggcttggtctgcctggtgcccgcaacgtgtcggaatgtggaggcaatgttctccaggcttcttctcggccgatggcttcaagccctgccaggcctgccccgtgggcacgtaccagcctgagcccgggcgcaccggctgcttcccctgtggagggggtttgctcaccaaacacgaaggcaccacctccttccaggactgcgaggctaaagtgcactgctcccccggccaccactacaacaccaccacccaccgctgcatccgctgccccgtcggcacctaccagcccgagtttggccagaaccactgcatcacctgtccgggcaacaccagcacagacttcgatggctccaccaacgtcacacactgcaaaaaccagcactgcggcggcgagcttggtgactacaccggctacatcgagtcccccaactaccctggcgactacccagccaacgctgaatgcgtctggcacatcgcgcctcccccaaagcgcaggatcctcatcgtggtccctgagatcttcctgcccatcgaggatgagtgcggcgatgttctggtcatgaggaagagtgcctctcccacgtccatcaccacctatgagacctgccagacctacgagaggcccatcgccttcacctcccgctcccgcaagctctggatccagttcaaatccaatgaaggcaacagcggcaaaggcttccaagtgccctatgtcacctacgatgaggactaccagcaactcatagaggacatcgtgcgcgatgggcgcctgtacgcctcggagaaccaccaggaaattttgaaagacaagaagctgatcaaggccctcttcgacgtgctggcgcatccccagaactacttcaagtacacagcccaggaatccaaggagatgttcccacggtccttcatcaaactgctgcgctccaaagtgtctcggttcctgcggccctacaaataaccggggggagcggccctgcctgggggtggcctggtccgcggagggtgcacctgccctccacagtgggagctgcatgggcctccacaccaccttgggaaccccatggcactgcccttcagggaagccgaccagcccatggagaccgagcccaggcacccttcggacccgctgcccctgtgggagcaccctgcttcaggaagcctccctccctccctctgcctcccttccccaggacaccaagagcgccctctcctgagccctggcagaccgactgcaggtagcaggattgcaggaccctctgcctggcctggcgtttcaggagagaggggaagtggggcctgtgctctgggaggcgtggtcatccgagacaggagtccaggggagagaggaggggacaaaggcgccgtctgggggaggtcgatgagcctgtgctggcatccgcgggccccacgctttgccaactcctccagccacaggcaaggccacggctccgggctgttgcgctctaagggttctgtgattggatggaacagagctgctggggaggagactggaagtttctgcattccttcaacagaacatttaatgaagtactctatatatatatataaatatatatataaatatatatatatacttctatttgtgggtactttaggaaaatgccctttggtcactgtaaatatgaattgtgaccccatcccttcccgcatgagcccagtgagtcccagcagctatcagcctccctgaacgattaaacagctcctcccagcatttgcatttgcccttctgtttctgtgaggccggcagcccttggggctggggagagcacagcttgccttggacttgcttctgaacacgaattcttcgagaactaggctcagatgctctgctggagtgttggcctcaccccagtccccttgccagcaacatcactgcccttggacgagactcagtggaagacacttcccctcggacccgttcccaggaggtgcaggggcccagcaataaacggcgaaaggggccttggctcttgccctgtggcagtgaccttggggtccgtactatgcccaggtgtcagcaggaaacaaggccttgctcacaggagcacaggctgtaccaccacaaggagcc

SEQ ID NO: 29814 - protein, 486 aa, Homo sapiens
METEAASTAVRTQTQAPRVVATRSTPSTQTVARASRRAQSITEAATGHARTQPLACDAAAPLDSHCSRTGRHAKTSTSAWSTTEAATTSAATPWAASSAAAGRATSCSPTSAPARTSTSAPSSGPVTTSASTPRARAKETARQPLLDHCHVTFVTLKCDSSKKRRRGRKSPSKEVSHITAEFEIETKMEEASDTCEADCLRKRAEQSLQAAIKTLRKSIGRQQFYVQVSGTEYEVAQRPAKALEGQGACGAGQVLQDSKCVACGPGTHFGGELGQCVSCMPGTYQDMEGQLSCTPCPSSDGLGLPGARNVSECGGNVLQASSRPMASSPARPAPWARTSLSPGAPAASPVEGVCSPNTKAPPPSRTARLKCTAPPATTTTPPPTAASAAPSAPTSPSLARTTASPVRATPAQTSMAPPTSHTAKTSTAAASLVTTPATSSPPTTLATTQPTLNASGTSRLPQSAGSSSWSLRSSCPSRMSAAMFWS

SEQ ID NO: 29815 - DNA, 3759 bp, Homo sapiens
cagcggggcccgcattgagcatgggcgcggcggccgtgcgctggcacttgtgcgtgctgctggccctgggcacacgcgggcggctggccgggggcagcgggctcccagggtcagtcgacgtggatgagtgctcagagggcacagatgactgccacatcgatgccatctgtcagaacacgcccaagtcctacaaatgcctctgcaagccaggctacaagggggaaggcaagcagtgtgaagacattgacgagtgtgagaatgactactacaatgggggctgtgtccacgagtgcatcaacatcccggggaactacaggtgtacctgctttgatggcttcatgctggcacacgatggacacaactgcctggatgtggacgagtgtcaggacaataatggtggctgccagcagatctgcgtcaatgccatgggcagctacgagtgtcagtgccacagtggcttcttccttagtgacaaccagcatacctgcatccaccgctccaatgagggtatgaactgcatgaacaaagaccatggctgtgcccacatctgccgggagacgcccaaaggtggggtggcctgcgactgcaggcccggctttgaccttgcccaaaaccagaaggactgcacactaacctgtaattatggaaacggaggctgccagcacagctgtgaggacacagacacaggccccacgtgtggttgccaccagaagtacgccctccactcagacggtcgcacgtgcatcgagacgtgcgcagtcaataacggaggctgcgaccggacatgcaaggacacagccactggcgtgcgatgcagctgccccgttggattcacactgcagccggacgggaagacatgcaaagacatcaacgagtgcctggtcaacaacggaggctgcgaccacttctgccgcaacaccgtgggcagcttcgagtgcggctgccggaagggctacaagctgctcaccgacgagcgcacctgccaggacatcgacgagtgctccttcgagcggacctgtgaccacatctgcatcaactccccgggcagcttccagtgcctgtgtcaccgcggctacatcctctacgggacaacccactgcggagatgtggacgagtgcagcatgagcaacgggagctgtgaccagggctgcgtcaacaccaagggcagctacgagtgcgtctgtcccccggggaggcggctccactggaacgggaaggattgcgtggagacaggcaagtgtctttctcgcgccaagacctccccccgggcccagctgtcctgcagcaaggcaggcggtgtggagagctgcttcctttcctgcccggctcacacactcttcgtgccagactcggaaaatagctacgtcctgagctgcggagttccagggccgcagggcaaggcgctgcagaaacgcaacggcaccagctctggcctcgggcccagctgctcagatgcccccaccacccccatcaaacagaaggcccgcttcaagatccgagatgccaagtgccacctccggccccacagccaggcacgagcaaaggagaccgccaggcagccgctgctggaccactgccatgtgactttcgtgaccctcaagtgtgactcctccaagaagaggcgccgtggccgcaagtccccatccaaggaggtgtcccacatcacagcagagtttgagatcgagacaaagatggaagaggcctcagacacatgcgaagcggactgcttgcggaagcgagcagaacagagcctgcaggccgccatcaagaccctgcgcaagtccatcggccggcagcagttctatgtccaggtctcaggcactgagtacgaggtagcccagaggccagccaaggcgctggaggggcagggggcatgtggcgcaggccaggtgctacaggacagcaaatgcgttgcctgtgggcctggcacccacttcggtggtgagctcggccagtgtgtgtcatgtatgccaggaacataccaggacatggaaggccagctcagttgcacaccgtgccccagcagcgacgggcttggtctgcctggtgcccgcaacgtgtcggaatgtggaggcaatgttctccaggcttcttctcggccgatggcttcaagccctgccaggcctgccccgtgggcacgtaccagcctgagcccgggcgcaccggctgcttcccctgtggagggggtttgctcaccaaacacgaaggcaccacctccttccaggactgcgaggctaaagtgcactgctcccccggccaccactacaacaccaccacccaccgctgcatccgctgccccgtcggcacctaccagcccgagtttggccagaaccactgcatcacctgtccgggcaacaccagcacagacttcgatggctccaccaacgtcacacactgcaaaaaccagcactgcggcggcgagcttggtgactacaccggctacatcgagtcccccaactaccctggcgactacccagccaacgctgaatgcgtctggcacatcgcgcctcccccaaagcgcaggatcctcatcgtggtccctgagatcttcctgcccatcgaggatgagtgcggcgatgttctggtcatgaggaagagtgcctctcccacgtccatcaccacctatgagacctgccagacctacgagaggcccatcgccttcacctcccgctcccgcaagctctggatccagttcaaatccaatgaaggcaacagcggcaaaggcttccaagtgccctatgtcacctacgatgaggactaccagcaactcatagaggacatcgtgcgcgatgggcgcctgtacgcctcggagaaccaccaggaaattttgaaagacaagaagctgatcaaggccctcttcgacgtgctggcgcatccccagaactacttcaagtacacagcccaggaatccaaggagatgttcccacggtccttcatcaaactgctgcgctccaaagtgtctcggttcctgcggccctacaaataaccggggggagcggccctgcctgggggtggcctggtccgcggagggtgcacctgccctccacagtgggagctgcatgggcctccacaccaccttgggaaccccatggcactgcccttcagggaagccgaccagcccatggagaccgagcccaggcacccttcggacccgctgcccctgtgggagcaccctgcttcaggaagcctccctccctccctctgcctcccttccccaggacaccaagagcgccctctcctgagccctggcagaccgactgcaggtagcaggattgcaggaccctctgcctggcctggcgtttcaggagagaggggaagtggggcctgtgctctgggaggcgtggtcatccgagacaggagtccaggggagagaggaggggacaaaggcgccgtctgggggaggtcgatgagcctgtgctggcatccgcgggccccacgctttgccaactcctccagccacaggcaaggccacggctccgggctgttgcgctctaagggttctgtgattggatggaacagagctgctggggaggagactggaagtttctgcattccttcaacagaacatttaatgaagtactctatatatatatataaatatatatataaatatatatatatacttctatttgtgggtactttaggaaaatgccctttggtcactgtaaatatgaattgtgaccccatcccttcccgcatgagcccagtgagtcccagcagctatcagcctccctgaacgattaaacagctcctcccagc

SEQ ID NO: 29816 - protein, 856 aa, Homo sapiens; identical to SEQ ID NO: 29812

SEQ ID NO: 29817 - DNA, 3339 bp, Homo sapiens
gagcagcgagcagcgcctgcgggagcggccggtcggtcgggtccccgcgccccgcacgcccgcacgcccagcggggcccgcattgagcatgggcgcggcggccgtgcgctggcacttgtgcgtgctgctggccctgggcacacgcgggcggctggccgggggcagcgggctcccagggtcagtcgacgtggatgagtgctcagagggcacagatgactgccacatcgatgccatctgtcagaacacgcccaagtcctacaaatgcctctgcaagccaggctacaagggggaaggcaagcagtgtgaagacattgacgagtgtgagaatgactactacaatgggggctgtgtccacgagtgcatcaacatcccggggaactacaggtgtacctgctttgatggcttcatgctggcacacgatggacacaactgcctggatgtggacgagtgtcaggacaataatggtggctgccagcagatctgcgtcaatgccatgggcagctacgagtgtcagtgccacagtggcttcttccttagtgacaaccagcatacctgcatccaccgctccaatgagggtatgaactgcatgaacaaagaccatggctgtgcccacatctgccgggagacgcccaaaggtggggtggcctgcgactgcaggcccggctttgaccttgcccaaaaccagaaggactgcacactaacctgtaattatggaaacggaggctgccagcacagctgtgaggacacagacacaggccccacgtgtggttgccaccagaagtacgccctccactcagacggtcgcacgtgcatcgagacgtgcgcagtcaataacggaggctgcgaccggacatgcaaggacacagccactggcgtgcgatgcagctgccccgttggattcacactgcagccggacgggaagacatgcaaagacatcaacgagtgcctggtcaacaacggaggctgcgaccacttctgccgcaacaccgtgggcagcttcgagtgcggctgccggaagggctacaagctgctcaccgacgagcgcacctgccaggacatcgacgagtgctccttcgagcggacctgtgaccacatctgcatcaactccccgggcacgagcaaaggagaccgccaggcagccgctgctggaccactgccatgtgactttcgtgaccctcaagtgtgactcctccaagaagaggcgccgtggccgcaagtccccatccaaggaggtgtcccacatcacagcagagtttgagatcgagacaaagatggaagaggcctcagacacatgcgaagcggactgcttgcggaagcgagcagaacagagcctgcaggccgccatcaagaccctgcgcaagtccatcggccggcagcagttctatgtccaggtctcaggcactgagtacgaggtagcccagaggccagccaaggcgctggaggggcagggggcatgtggcgcaggccaggtgctacaggacagcaaatgcgttgcctgtgggcctggcacccacttcggtggtgagctcggccagtgtgtgtcatgtatgccaggaacataccaggacatggaaggccagctcagttgcacaccgtgccccagcagcgacgggcttggtctgcctggtgcccgcaacgtgtcggaatgtggaggcaatgttctccaggcttcttctcggccgatggcttcaagccctgccaggcctgccccgtgggcacgtaccagcctgagcccgggcgcaccggctgcttcccctgtggagggggtttgctcaccaaacacgaaggcaccacctccttccaggactgcgaggctaaagtgcactgctcccccggccaccactacaacaccaccacccaccgctgcatccgctgccccgtcggcacctaccagcccgagtttggccagaaccactgcatcacctgtccgggcaacaccagcacagacttcgatggctccaccaacgtcacacactgcaaaaaccagcactgcggcggcgagcttggtgactacaccggctacatcgagtcccccaactaccctggcgactacccagccaacgctgaatgcgtctggcacatcgcgcctcccccaaagcgcaggatcctcatcgtggtccctgagatcttcctgcccatcgaggatgagtgcggcgatgttctggtcatgaggaagagtgcctctcccacgtccatcaccacctatgagacctgccagacctacgagaggcccatcgccttcacctcccgctcccgcaagctctggatccagttcaaatccaatgaaggcaacagcggcaaaggcttccaagtgccctatgtcacctacgatgaggactaccagcaactcatagaggacatcgtgcgcgatgggcgcctgtacgcctcggagaaccaccaggaaattttgaaagacaagaagctgatcaaggccctcttcgacgtgctggcgcatccccagaactacttcaagtacacagcccaggaatccaaggagatgttcccacggtccttcatcaaactgctgcgctccaaagtgtctcggttcctgcggccctacaaataaccggggggagcggccctgcctgggggtggcctggtccgcggagggtgcacctgccctccacagtgggagctgcatgggcctccacaccaccttgggaaccccatggcactgcccttcagggaagccgaccagcccatggagaccgagcccaggcacccttcggacccgctgcccctgtgggagcaccctgcttcaggaagcctccctccctccctctgcctcccttccccaggacaccaagagcgccctctcctgagccctggcagaccgactgcaggtagcaggattgcaggaccctctgcctggcctggcgtttcaggagagaggggaagtggggcctgtgctctgggaggcgtggtcatccgagacaggagtccaggggagagaggaggggacaaaggcgccgtctgggggaggtcgatgagcctgtgctggcatccgcgggccccacgctttgccaactcctccagccacaggcaaggccacggctccgggctgttgcgctctaagggttctgtgattggatggaacagagctgctggggaggagactggaagtttctgcattccttcaacagaacatttaatgaagtactctatatatatatataaatatatatataaatatatatatatacttctatttgtgggtactttaggaaaatgccctttggtcactgtaaatatgaattgtgaccccatcccttcccgcatgagcccagtgagtcccagcagctatcagcctccctgaacgattaaacagctcctcccagc

SEQ ID NO: 29818 - protein, 486 aa, Homo sapiens; identical to SEQ ID NO: 29814

SEQ ID NO: 29819 - DNA, 2254 bp, Homo sapiens
ggtcggtcgggtccccgcgccccgcacgcccgcacgcccagcggggcccgcattgagcatgggcgcggcggccgtgcgctggcacttgtgcgtgctgctggccctgggcacacgcgggcggctggccgggggcagcgggctcccagggtcagtcgacgtggatgagtgctcagagggcacagatgactgccacatcgatgccatctgtcagaacacgcccaagtcctacaaatgcctctgcaagccaggctacaagggggaaggcaagcagtgtgaagacattgacgagtgtgagaatgactactacaatgggggctgtgtccacgagtgcatcaacatcccggggaactacaggtgtacctgctttgatggcttcatgctggcacacgatggacacaactgcctggatgtggacgagtgtcaggacaataatggtggctgccagcagatctgcgtcaatgccatgggcagctacgagtgtcagtgccacagtggcttcttccttagtgacaaccagcatacctgcatccaccgctccaatgagggtatgaactgcatgaacaaagaccatggctgtgcccacatctgccgggagacgcccaaaggtggggtggcctgcgactgcaggcccggctttgaccttgcccaaaaccagaaggactgcacactaacctgtaattatggaaacggaggctgccagcacagctgtgaggacacagacacaggccccacgtgtggttgccaccagaagtacgccctccactcagacggtcgcacgtgcatcgagaaggatgaggctgcaattgagcgctctcagttcaatgccacgtcagtagctgatgtggacaagcgggtgaaacggcggctactcatggagacgtgcgcagtcaataacggaggctgcgaccggacatgcaaggacacagccactggcgtgcgatgcagctgccccgttggattcacactgcagccggacgggaagacatgcaaaggtcagcatgtggagctgtgtgggtgcccctgcctgtactggcctggccaagagcctccgtgtgcttgcatagccgggcccagggctgggctgaacgggggccacgtgtagctgtgggaaaggacacgtggcaatcatttgctttgctgttggagaggccaggaagagggagggctggccagcagcagggtccccagcagagttcgagagaacacaggtcccacggcacatcagcaggttcctgggccaaaaaggcactgatgtcagagaatttggctgcacgctgggttaaacagttaagccagcgtctctactgtgggacttcctgggccctcagtgatagtgtggcttcccaaggcgcgtagaatgtagcgcgtttccgaaccccttgacctttggttgcagtgggtcttgcagagctgatggggacagtctggtgttgggccatctgggacacacaggtctactcatgccaggaaaaataaggacagtgtgtcactactaggggggcgaggctagggggatcccatctgaaaagataaggactcaggacttctgcttgccatcagaaaatgaggagtcaggaagacctgagagtgactggttgaaggaaggagggacagggctggcctgctggtggctggcagtgagggaaggcagaggtgtatcctcccacttgtcccctgagtcaccccacaaagacttactgagtacctcctgggttgaggggaccctcaggaaacaggaagcccagggagctgggagaggagagctgggtgggctctcgagacagccctgcagatgaggaggtccagctacccccaaaggacagacggagccccaagaagctgtgggccctggggcagggtgttaggcctgagtgccggagccctctgtgcagaagggtgaggggcagtgctcagtgcccccagcatcactccagaccaccctccaaacgcccccaccccagcgctgggcagtacccccacactctgccaggaagggagagcctagagagcagggcgtggaggggagaggaactggaacttccaaagtcccatcggggaaaatattgaaagtggaggttagggtgacttaaaatagcttgaggtggactttttttaagcctgtaaaaataaatgtatttttgtacagtgtatgacttcttccttgccaacttgctgggaagaaccgagtgattattgacagaaataacagtgcttccgcctgtttatttgaaaataaagcccttctgtggccacc

SEQ ID NO: 29820 - protein, 347 aa, Homo sapiens
MGAAAVRWHLCVLLALGTRGRLAGGSGLPGSVDVDECSEGTDDCHIDAICQNTPKSYKCLCKPGYKGEGKQCEDIDECENDYYNGGCVHECINIPGNYRCTCFDGFMLAHDGHNCLDVDECQDNNGGCQQICVNAMGSYECQCHSGFFLSDNQHTCIHRSNEGMNCMNKDHGCAHICRETPKGGVACDCRPGFDLAQNQKDCTLTCNYGNGGCQHSCEDTDTGPTCGCHQKYALHSDGRTCIEKDEAAIERSQFNATSVADVDKRVKRRLLMETCAVNNGGCDRTCKDTATGVRCSCPVGFTLQPDGKTCKGQHVELCGCPCLYWPGQEPPCACIAGPRAGLNGGHV

SEQ ID NO: 29821 - DNA, 530 bp, Homo sapiens
acattgacgagtgtgagaatgactactacaatgggggctgtgtccacgagtgcatcaacatcccggggaactacaggtgtacctgctttgatggcttcatgctggcacacgatggacacaactgcctggagacagggtcttgctatattgcccaggcctctggaactcctgggctcaggtgatctgcccacctcgacctcccaaagtgctgggattacaggcttgacccgccaccttacctcaggcattacttcaggaatgcttcacaaaagtggaaccactggatcaaacgaccatttggttttttatggctttctaaaagggctcagcaaagcttctgttgtgccagctggtttgtgggtgtgtggtagaggatactgggtgtcctgagtgctctggaactttccctcttaatggggtgttagccttagacctgcctgcctgtttttgtccaacccatgttggatgtcagataagtttgttgtggaaaacatctgtgagcatgtaattacaccccgaataaataccca

SEQ ID NO: 29822 - protein, 123 aa, Homo sapiens
MTTTMGAVSTSASTSRGTTGVPALMASCWHTMDTTAWRQGLAILPRPLELLGSGDLPTSTSQSAGITGLTRHLTSGITSGMLHKSGTTGSNDHLVFYGFLKGLSKASVVPAGLWVCGRGYWVS

SEQ ID NO: 29823 - DNA, 282 bp, Homo sapiens
acattgacgagtgtgagaatgactactacaatgggggctgtgtccacgagtgcatcaacatcccggggaactacaggtgtacctgctttgatggcttcatgctggcacacgatggacacaactgcctgggaatgcttcacaaaagtggaaccactggatcaaacgaccatttggttttttatggctttctaaaagggctcagcaaagcttctgttgtgccagctggtttgtgggtgtgtggtagaggatactgggtgtcctgagtgctctggaactttccct

SEQ ID NO: 29824 - protein, 57 aa, Homo sapiens
MTTTMGAVSTSASTSRGTTGVPALMASCWHTMDTTAWECFTKVEPLDQTTIWFFMAF

SEQ ID NO: 29825 - DNA, 951 bp, Homo sapiens
agcagagggactgccttccagagactttggatcatcaccacgatgggttgattttacaaatttagccactgtcaccggaggcctggctgaacttcagagtttcttctccagcgtcggtttcttgattgcctaaagttccttccagtctaatactctgggattctgggccagtttctggtctgtcacagctgaataagagtgcaagggcaggagtggaatgttcagactgctccaagaggaccttggcccaggtgaggcagcaggccggcaccctgcccacaaccacatagagggcccaggcttgtctgacgcctcaggctgtgctctctccagctcactgcggtgcctctcccagattcgggcacactctggtgtaacctgcttcgctcgttcgcgggatgggtggtgagcatggagcccattttcccatgtggcatttcagcaacaggacttggctatttgaaactccccagacatagcaggatttaaaaaacggatcccctctggctgggcatttaggttgctttcacttctgggctgctataaacagcctgcagttactgcctcaggacgcctttctggaaggtgagtttcttggccaggggatatcgcacatgcactttggagcctctgagcctttgcacaggctggtccctttgcctggctgcccctctcccatttatccctagattcttctgcagcacacacactgcctcctctgaagtgtcctggctgcatgtgctgctctccttgccctgggctgccctcttctccctggtgtcatgagtatctgctgaccttctgcttctcccatgacagagtgccttccttctcttccttctctgccttggcctccagcacgtagtaggcgcctaggaaatgttttccagcagaacgagccatctcctggctggtttagcagtgtgggattgtgtggtgtttctattagtc

SEQ ID NO: 29826 - protein, 63 aa, Homo sapiens
MFRLLQEDLGPGEAAGRHPAHNHIEGPGLSDASGCALSSSLRCLSQIRAHSGVTCFARSRDGW

SEQ ID NO: 29827 - DNA, 2282 bp, Homo sapiens
cgcggtgcccgctgcggaggccacggatccggagtctgtttccaggtctggcggggggccgggctgcggtggcggcagcggtgggagatgccggggcggccggcggaggtccatgtggcgctctaggtgggatgccagcgtcctgaaggcggaggccctggccctcctcccctgcggcctgggcatggcattctcccagtcccacgtgatggccgctcggcggcaccagcacagccggctcatcatcgaggtggacgagtacagctccaaccccacccaggccttcaccttctacaacatcaaccagggccgcttccagccaccgcatgtgcagatggtggacccggtgcctcacgatgcccccaaacctccaggctacacccgcttcgtctgcgtctctgatacccactcgaggacggaccccatccagatgccgtacggcgacgtgctgatccacgctggggacttcactgagctggggctcccgagcgaggtgaagaagttcaacgagtggctgggcagcctgccctacgagtacaagatcgtgatcgcaggcaaccacgagctgacctttgaccaggagttcatggccgacctcatcaagcaggacttttactacttcccatctgtgtcgaagctgaagccggagaactatgagaatgtgcagtcgctgctgaccaactgcatctaccttcaggactcggaggtcaccgtgcggggcttccggatctatggctccccatggggcttcctggactgggtccccaagaagatgcagcgggtgggctgtgtggagctgctcaacacggtgcagaggcgcgtccagccgcggttacatgtctttggccacatccacgaagggtatggtgtcatggcagatgggacgaccacctatgtgaatgcgtccgtatgcactgtgaactaccagcccgtgaacccgcccatagtcatcgacctccccacaccccggaactcctgactgctccccactgcccctgccctgcccgcccgtgtcagctccacaggcctggcccggccactgttccttccatgctgagttgcctggacgacccatctggctgcggggactggcctagcaggcaggtcagggccttggaacgactctttagccttctgtcacctggagttgggaccctgcgcatccccatcaggggttctgtgctcatttactttttctgcgtgtacatcctgcgtgtacctcgttaaaggacctactaagctcatggccctgtcatgtttgggaaatgactaaatcttcattcttctcccttggacgccctcctggtttgggaagctgctgctcttgaatgggttttggaagttacacaaaatctccctctaaccacgggtctgtgtggcggcatgcccctgggttggggtgggtgggaggattcgtgagctgcacacagacagtccctttctctcctcccaagtgagggaggagacaggcccaaggcggaggccctccgagggagcatttagggacatctcaggaattcagaccgcacctggccaggcccacagctgtttgcctggcattgttcccccctttttcttcccataggcatttttgtttacttgaacaatgacctgagtgtcctaggcattcactcggagcctggatgatgggggctggttctacagaatgagccactggcattcgtgcccaggaccagtgagagcgttcccagtcatggggggatgacccttggtcccacggggaacacactgctctgtagaatgcggtagcctggatggagggtctgcaggcttaggctgcagcaggcctgccatgggtgtgaacccatgtccaggcacgcaccgacacacatgcacgcacgcacccctcttaattgaaccaagtgggtcctgtgtttctcttttctgccccgtagtgaggttctgttccttggtgcggcttcccttgcaccgttaggattctgtctggcatgcctgcagccgaggaagcccaggaccagccggccctgtgaattggagggtggcacagggaccgagcgggccccaggctccagcagccccaccttggacagcttctttttcttctttgaattaggactggagggggtggggccagggcggtggtgggaaccggtagggcctagatgaggggcaggcagtcaggcagaaatgggcaagttcagggtcagattctgtcgttatttaatattttgttcatcatggactttttctgcatttattttgatttttaacgttgcattaaagtagtattatttgtcctg

SEQ ID NO: 29828 - protein, 288 aa, Homo sapiens
MWRSRWDASVLKAEALALLPCGLGMAFSQSHVMAARRHQHSRLIIEVDEYSSNPTQAFTFYNINQGRFQPPHVQMVDPVPHDAPKPPGYTRFVCVSDTHSRTDPIQMPYGDVLIHAGDFTELGLPSEVKKFNEWLGSLPYEYKIVIAGNHELTFDQEFMADLIKQDFYYFPSVSKLKPENYENVQSLLTNCIYLQDSEVTVRGFRIYGSPWGFLDWVPKKMQRVGCVELLNTVQRRVQPRLHVFGHIHEGYGVMADGTTTYVNASVCTVNYQPVNPPIVIDLPTPRNS

SEQ ID NO: 29829 - DNA, 3208 bp, Homo sapiens
cgcggtgcccgctgcggaggccacggatccggagtctgtttccaggtctggcggggggccgggctgcggtggcggcagcggtgggagatgccggggcggccggcggaggtccatgtggcgctctaggtgggatgccagcgtcctgaaggcggaggccctggccctcctcccctgcggcctgggcatggcattctcccagtcccacgtgatggccgctcggcggcaccagcacagccggctcatcatcgaggtggacgagtacagctccaaccccacccaggccttcaccttctacaacatcaaccagggccgcttccagccaccgcatgtgcagatggtggacccggtgcctcacgatgcccccaaacctccaggctacacccgcttcgtctgcgtctctgatacccactcgaggacggaccccatccagatgccgtacggcgacgtgctgatccacgctggggacttcactgagctggggctcccgagcgaggtgaagaagttcaacgagtggctgggcagcctgccctacgagtacaagatcgtgatcgcaggcaaccacgagctgacctttgaccaggagttcatggccgacctcatcaagcaggacttttactacttcccatctgtgtcgaagctgaagccggagaactatgagaatgtgcagtcgctgctgaccaactgcatctaccttcaggactcggaggtcaccgtgcggggcttccggatctatggctccccatggggcttcctggactgggtccccaagaagatgcagcgggtgggctgtgtggagctgctcaacacggtgcagaggcgcgtccagccgcggttacatgtctttggccacatccacgaagggtatggtgtcatggcagatgggacgaccacctatgtgaatgcgtccgtatgcactgtgaactaccagcccgtgaacccgcccatagtcatcgacctccccacaccccggaactcctgactgctccccactgcccctgccctgcccgcccgtgtcagctccacaggcctggcccggccactgttccttccatgctgagttgcctggacgacccatctggctgcggggactggcctagcaggcaggtcagggccttggaacgactctttagccttctgtcacctggagttgggaccctgcgcatccccatcaggggttctgtgctcatttactttttctgcgtgtacatcctgcgtgtacctcgttaaaggacctactaagctcatggccctgtcatgtttgggaaatgactaaatcttcattcttctcccttggacgccctcctggtttgggaagctgctgctcttgaatgggttttggaagttacacaaaatctccctctaaccacgggtctgtgtggcggcatgcccctgggttggggtgggtgggaggattcgtgagctgcacacagacagtccctttctctcctcccaagtgagggaggagacaggcccaaggcggaggccctccgagggagcatttagggacatctcaggaattcagaccgcacctggccaggcccacagctgtttgcctggcattgttcccccctttttcttcccataggcatttttgtttacttgaacaatgacctgagtgtcctaggcattcactcggagcctggatgatgggggctggttctacagaatgagccactggcattcgtgcccaggaccagtgagagcgttcccagtcatggggggatgacccttggtcccacggggaacacactgctctgtagaatgcggtagcctggatggagggtctgcaggcttaggctgcagcaggcctgccatgggtgtgaacccatgtccaggcacgcaccgacacacatgcacgcacgcacccctcttaattgaaccaagtgggtcctgtgtttctcttttctgccccgtagtgaggttctgttccttggtgcggcttcccttgcaccgttaggattctgtctggcatgcctgcagccgaggaagcccaggaccagccggccctgtgaattggagggtggcacagggaccgagcgggccccaggctccagcagccccaccttggacagcttctttttcttctttgaattaggactggagggggtggggccagggcggtggtgggaaccggtagggcctagatgaggggcaggcagtcaggcagaaatgggcaagttcagggtcagattctgtcgttatttaatattttgttcatcatggactttttctgcatttattttgatttttaacgttgcattaaagtagtattatttgtcctgattggtgactttttttgcacccctttccgttgtacatctgagagaagggtgtcactccctcacccaggtcccagccctgggaaccagcctaccgtgagcccttttgcagatatagactcatttcatcctcagatggtccttcaaggtaggtactttagtcccattttagagatgagacgattgaggccagaggggtgtggtaacttgcctgggggctcacagcacaaaaggagccgaggcaggatctgacccttgttctctggcctcactgccctcactttgccatgacccgaagttatgtccctacaaagcaatgcatggtccaaggctctttttattgtatttttatttttaagggtcctgttcaaaactggtgtgagctctgaggagtcctgaaccctgggtgcagcatcctagcatcctgggagtccttttctgcccacactgagctgggctcctcgaggggtggggctgctgtccctggaagcctggcagcagcactgtatcgggttggctgaagctgagcgccgtggggtgcagggctccaggaatcccgtttggctgaaggggttcctgtagccagggatgtttatgaggtctctctgatgccccaggcgcaggacatgtgtgcgggtggagaaaagcaggccctttcagtgccagctccactcaatttctatgtggaccaagaacgataaacttaaaaaaatttttttcctaaggtatcttcagaatatggtgtatttttatgtggaaaagaaaagttatgaaggcagctgttactttaagagaaaattcattaaaagtcctcgaggtatgaagatgacggcgtgcttctcaatcattttggcataacttgattgtggctgtaatttttttttttttttttgtcaagcatgtcagacaataaagtctttgtaaaaaga

SEQ ID NO: 29830 - protein, 288 aa, Homo sapiens; identical to SEQ ID NO: 29828

SEQ ID NO: 29831 - DNA, 2272 bp, Homo sapiens
cgccgaagaggagcccggggccagtctgtttccaggtctggcggggggccgggctgcggtggcggcagcggtgggagatgccggggcggccggcggaggtccatgtggcgctctaggtgggatgccagcgtcctgaaggcggaggccctggccctcctcccctgcggcctgggcatggcattctcccagtcccacgtgatggccgctcggcggcaccagcacagccggctcatcatcgaggtggacgagtacagctccaaccccacccaggccttcaccttctacaacatcaaccagggccgcttccagccaccgcatgtgcagatggtggacccggtgcctcacgatgcccccaaacctccaggctacacccgcttcgtctgcgtctctgatacccactcgaggacggaccccatccagatgccgtacggcgacgtgctgatccacgctggggacttcactgagctggggctcccgagcgaggtgaagaagttcaacgagtggctgggcagcctgccctacgagtacaagatcgtgatcgcaggcaaccacgagctgacctttgaccaggagttcatggccgacctcatcaagcaggacttttactacttcccatctgtgtcgaagctgaagccggagaactatgagaatgtgcagtcgctgctgaccaactgcatctaccttcaggactcggaggtcaccgtgcggggcttccggatctatggctccccatggggcttcctggactgggtccccaagaagatgcagcgggtgggctgtgtggagctgctcaacacggtgcagaggcgcgtccagccgcggttacatgtctttggccacatccacgaagggtatggtgtcatggcagatgggacgaccacctatgtgaatgcgtccgtatgcactgtgaactaccagcccgtgaacccgcccatagtcatcgacctccccacaccccggaactcctgactgctccccactgcccctgccctgcccgcccgtgtcagctccacaggcctggcccggccactgttccttccatgctgagttgcctggacgacccatctggctgcggggactggcctagcaggcaggtcagggccttggaacgactctttagccttctgtcacctggagttgggaccctgcgcatccccatcaggggttctgtgctcatttactttttctgcgtgtacatcctgcgtgtacctcgttaaaggacctactaagctcatggccctgtcatgtttgggaaatgactaaatcttcattcttctcccttggacgccctcctggtttgggaagctgctgctcttgaatgggttttggaagttacacaaaatctccctctaaccacgggtctgtgtggcggcatgcccctgggttggggtgggtgggaggattcgtgagctgcacacagacagtccctttctctcctcccaagtgagggaggagacaggcccaaggcggaggccctccgagggagcatttagggacatctcaggaattcagaccgcacctggccaggcccacagctgtttgcctggcattgttcccccctttttcttcccataggcatttttgtttacttgaacaatgacctgagtgtcctaggcattcactcggagcctggatgatgggggctggttctacagaatgagccactggcattcgtgcccaggaccagtgagagcgttcccagtcatggggggatgacccttggtcccacggggaacacactgctctgtagaatgcggtagcctggatggagggtctgcaggcttaggctgcagcaggcctgccatgggtgtgaacccatgtccaggcacgcaccgacacacatgcacgcacgcacccctcttaattgaaccaagtgggtcctgtgtttctcttttctgccccgtagtgaggttctgttccttggtgcggcttcccttgcaccgttaggattctgtctggcatgcctgcagccgaggaagcccaggaccagccggccctgtgaattggagggtggcacagggaccgagcgggccccaggctccagcagccccaccttggacagcttctttttcttctttgaattaggactggagggggtggggccagggcggtggtgggaaccggtagggcctagatgaggggcaggcagtcaggcagaaatgggcaagttcagggtcagattctgtcgttatttaatattttgttcatcatggactttttctgcatttattttgatttttaacgttgcattaaagtagtattatttgtcctg

SEQ ID NO: 29832 - protein, 288 aa, Homo sapiens; identical to SEQ ID NO: 29828

SEQ ID NO: 29833 - DNA, 3198 bp, Homo sapiens
cgccgaagaggagcccggggccagtctgtttccaggtctggcggggggccgggctgcggtggcggcagcggtgggagatgccggggcggccggcggaggtccatgtggcgctctaggtgggatgccagcgtcctgaaggcggaggccctggccctcctcccctgcggcctgggcatggcattctcccagtcccacgtgatggccgctcggcggcaccagcacagccggctcatcatcgaggtggacgagtacagctccaaccccacccaggccttcaccttctacaacatcaaccagggccgcttccagccaccgcatgtgcagatggtggacccggtgcctcacgatgcccccaaacctccaggctacacccgcttcgtctgcgtctctgatacccactcgaggacggaccccatccagatgccgtacggcgacgtgctgatccacgctggggacttcactgagctggggctcccgagcgaggtgaagaagttcaacgagtggctgggcagcctgccctacgagtacaagatcgtgatcgcaggcaaccacgagctgacctttgaccaggagttcatggccgacctcatcaagcaggacttttactacttcccatctgtgtcgaagctgaagccggagaactatgagaatgtgcagtcgctgctgaccaactgcatctaccttcaggactcggaggtcaccgtgcggggcttccggatctatggctccccatggggcttcctggactgggtccccaagaagatgcagcgggtgggctgtgtggagctgctcaacacggtgcagaggcgcgtccagccgcggttacatgtctttggccacatccacgaagggtatggtgtcatggcagatgggacgaccacctatgtgaatgcgtccgtatgcactgtgaactaccagcccgtgaacccgcccatagtcatcgacctccccacaccccggaactcctgactgctccccactgcccctgccctgcccgcccgtgtcagctccacaggcctggcccggccactgttccttccatgctgagttgcctggacgacccatctggctgcggggactggcctagcaggcaggtcagggccttggaacgactctttagccttctgtcacctggagttgggaccctgcgcatccccatcaggggttctgtgctcatttactttttctgcgtgtacatcctgcgtgtacctcgttaaaggacctactaagctcatggccctgtcatgtttgggaaatgactaaatcttcattcttctcccttggacgccctcctggtttgggaagctgctgctcttgaatgggttttggaagttacacaaaatctccctctaaccacgggtctgtgtggcggcatgcccctgggttggggtgggtgggaggattcgtgagctgcacacagacagtccctttctctcctcccaagtgagggaggagacaggcccaaggcggaggccctccgagggagcatttagggacatctcaggaattcagaccgcacctggccaggcccacagctgtttgcctggcattgttcccccctttttcttcccataggcatttttgtttacttgaacaatgacctgagtgtcctaggcattcactcggagcctggatgatgggggctggttctacagaatgagccactggcattcgtgcccaggaccagtgagagcgttcccagtcatggggggatgacccttggtcccacggggaacacactgctctgtagaatgcggtagcctggatggagggtctgcaggcttaggctgcagcaggcctgccatgggtgtgaacccatgtccaggcacgcaccgacacacatgcacgcacgcacccctcttaattgaaccaagtgggtcctgtgtttctcttttctgccccgtagtgaggttctgttccttggtgcggcttcccttgcaccgttaggattctgtctggcatgcctgcagccgaggaagcccaggaccagccggccctgtgaattggagggtggcacagggaccgagcgggccccaggctccagcagccccaccttggacagcttctttttcttctttgaattaggactggagggggtggggccagggcggtggtgggaaccggtagggcctagatgaggggcaggcagtcaggcagaaatgggcaagttcagggtcagattctgtcgttatttaatattttgttcatcatggactttttctgcatttattttgatttttaacgttgcattaaagtagtattatttgtcctgattggtgactttttttgcacccctttccgttgtacatctgagagaagggtgtcactccctcacccaggtcccagccctgggaaccagcctaccgtgagcccttttgcagatatagactcatttcatcctcagatggtccttcaaggtaggtactttagtcccattttagagatgagacgattgaggccagaggggtgtggtaacttgcctgggggctcacagcacaaaaggagccgaggcaggatctgacccttgttctctggcctcactgccctcactttgccatgacccgaagttatgtccctacaaagcaatgcatggtccaaggctctttttattgtatttttatttttaagggtcctgttcaaaactggtgtgagctctgaggagtcctgaaccctgggtgcagcatcctagcatcctgggagtccttttctgcccacactgagctgggctcctcgaggggtggggctgctgtccctggaagcctggcagcagcactgtatcgggttggctgaagctgagcgccgtggggtgcagggctccaggaatcccgtttggctgaaggggttcctgtagccagggatgtttatgaggtctctctgatgccccaggcgcaggacatgtgtgcgggtggagaaaagcaggccctttcagtgccagctccactcaatttctatgtggaccaagaacgataaacttaaaaaaatttttttcctaaggtatcttcagaatatggtgtatttttatgtggaaaagaaaagttatgaaggcagctgttactttaagagaaaattcattaaaagtcctcgaggtatgaagatgacggcgtgcttctcaatcattttggcataacttgattgtggctgtaatttttttttttttttttgtcaagcatgtcagacaataaagtctttgtaaaaaga

SEQ ID NO: 29834 - protein, 288 aa, Homo sapiens; identical to SEQ ID NO: 29828

SEQ ID NO: 29835 - DNA, 1939 bp, Homo sapiens
tgtggatatgtctgtgtgcatgtttgaaacagatctgaacagcttcccatttcaactccatagatacgtgactctccaagtgctttattttgaaaactaggacgtagcactttgcagaagaaaaatcagtccacttgctattatttatgtgatcgctgatctgctagatggatatagaaagcaccaagaattataataatttatggagtagagcactggtttacaaacatatttctctgcccgagctttgtgtgtttctttgcgtctcggggctcgttctgtgcaatgggaatggagaatattcagaatttgaagacaagcccggcgagccgactgcattcatagctaaaattaaaggaataagtgagcagctatttgtggcagacaggacatgatccaggaccacttaggaagggttagtgtggtttctctgtgacatttcgccacattgcaacaaaagccctagtaagcactgcctttgctgagccaagccggctttttctctgcatcgccctgagccaccggcctgaagacaggcagctgcacttttggctgtcccatcagagaggctggggctattcagtcgctcctactctcagttaaaggccccaagaggagacggagccaaggtgcgtctaggatcctggtgaaagctttccaaggtggggttcctcagaacgccgcagcggggatggctgttgggggagatgtttctctggaagcttctcatgcttaataagacagtcgtttctgtgtgctcattgactgtcatccgagttttggacccaggacagcaccatattatgctagccccccagtgattgttaaagagctgccgatgaatggaagagaaacacaggtgtgttctggggatggctgccttaccggcctggcactggctttgatcagagtgaccttttccttccaaacgagagcactttcgagagccggagaggatgctggtaatagtggcacagggacagcagatgtgaactggggctgtcctgggcctgcgctgagtttgagaggcctgtgttggctggaagtgatgcttcaagtcacacggtgaagcaaaatctatctttggtctgcagggcagcagctcctctggtagtgcaatcctccaagatcttcctcacacatcttcggacagagaggggccaccagaatgatccaagcatctcttttgcaaacattcatctgctgctgagatgctctgtgtgagccaaggcctctctctctctccttcctgggccttcagcacacactggctggcctcgctgtttggtgggggccttcttaggggcccacagaccccctccactgcaactcctcaaaatagagttctgaggaggtctgttttctgcctggctggttcgccgggtctgagcccttggagggctagtttcgtgtctgggtcctgtggctcccagaacaggatctggcccagagcaggagcagcagtgggtgcgttggggctgaccagtgccctgcagtgtccagatgggggtggtggtgaagaatttgcctagaaaaacgtgtcaagggtgggttgtagtggacgtgtccagccacaactccctgggaagtcaaagcctcagagtcttactcggtggggcgagaaggaaggggccaggcaccatgggctttcaggcaggagaggaggggttgcttgaaaatcccttctgcattcttgaaatttccctggggagcttctgagttcatcagaactttctaactagaggggaagagacatggagtgagcacctcctgtgtgctaggccctggcaggggcttttgaatctcctgtgtccttcagtgctccagcagcccaggaaggaaggattgagaatccacatgtttgtaggtgaaaaactaagattaaggggggcaaagctgcttttgagtcctgctgtcagactcaaaggcctgtgtagtt

SEQ ID NO: 29836 - protein, 106 aa, Homo sapiens
MLCVSQGLSLSPSWAFSTHWLASLFGGGLLRGPQTPSTATPQNRVLRRSVFCLAGSPGLSPWRASFVSGSCGSQNRIWPRAGAAVGALGLTSALQCPDGGGGEEFA

SEQ ID NO: 29837 - DNA, 659 bp, Homo sapiens
ggcagcctgccctacgagtacaagatcgtgatcgcaggcaaccacgagctgacctttgaccaggagttcatggccgacctcatcaagcaggacttttactacttcccatctgtgtcgaagctgaagccggagaactatgagaatgtgcagtcgctgctgaccaactgcatctaccttcaggactcggaggtcaccgtgcggggcttccggatctatggctccccatgcctggcagcagcactgtatcgggttggctgaagctgagcgccgtggggtgcagggctccaggaatcccgtttggctgaaggggttcctgtagccagggatgtttatgaggtctctctgatgccccaggcgcaggacatgtgtgcgggtggagaaaagcaggccctttcagtgccagctccactcaatttctatgtggaccaagaacgataaacttaaaaaaatttttttcctaaggtatcttcagaatatggtgtatttttatgtggaaaagaaaagttatgaaggcagctgttactttaagagaaaattcattaaaagtcctcgaggtatgaagatgacggcgtgcttctcaatcattttggcataacttgattgtggctgtaatttttttttttttttttgtcaagcatgtcagacaataaagtctttgt

SEQ ID NO: 29838 - protein, 62 aa, Homo sapiens
MADLIKQDFYYFPSVSKLKPENYENVQSLLTNCIYLQDSEVTVRGFRIYGSPCLAAALYRVG

SEQ ID NO: 29839 - DNA, 1564 bp, Homo sapiens
tgctgagttgcctggacgacccatctggctgcggggactggcctagcaggcaggtcagggccttggaacgactctttagccttctgtcacctggagttgggaccctgcgcatccccatcaggggttctgtgctcatttactttttctgcgtgtacatcctgcgtgtacctcgttaaaggacccatgtccaggcacgcaccgacacacatgcacgcacgcacccctcttaattgaaccaagtgggtcctgtgtttctcttttctgccccgtagtgaggttctgttccttggtgcggcttcccttgcaccgttaggattctgtctggcatgcctgcagccgaggaagcccaggaccagccggccctgtgaattggagggtggcacagggaccgagcgggccccaggctccagcagccccaccttggacagcttctttttcttctttgaattaggactggagggggtggggccagggcggtggtgggaaccggtagggcctagatgaggggcaggcagtcaggcagaaatgggcaagttcagggtcagattctgtcgttatttaatattttgttcatcatggactttttctgcatttattttgatttttaacgttgcattaaagtagtattatttgtcctgattggtgactttttttgcacccctttccgttgtacatctgagagaagggtgtcactccctcacccaggtcccagccctgggaaccagcctaccgtgagcccttttgcagatatagactcatttcatcctcagatggtccttcaaggtaggtactttagtcccattttagagatgagacgattgaggccagaggggtgtggtaacttgcctgggggctcacagcacaaaaggagccgaggcaggatctgacccttgttctctggcctcactgccctcactttgccatgacccgaagttatgtccctacaaagcaatgcatggtccaaggctctttttattgtatttttatttttaagggtcctgttcaaaactggtgtgagctctgaggagtcctgaaccctgggtgcagcatcctagcatcctgggagtccttttctgcccacactgagctgggctcctcgaggggtggggctgctgtccctggaagcctggcagcagcactgtatcgggttggctgaagctgagcgccgtggggtgcagggctccaggaatcccgtttggctgaaggggttcctgtagccagggatgtttatgaggtctctctgatgccccaggcgcaggacatgtgtgcgggtggagaaaagcaggccctttcagtgccagctccactcaatttctatgtggaccaagaacgataaacttaaaaaaatttttttcctaaggtatcttcagaatatggtgtatttttatgtggaaaagaaaagttatgaaggcagctgttactttaagagaaaattcattaaaagtcctcgaggtatgaagatgacggcgtgcttctcaatcattttggcataacttgattgtggctgtaatttttttttttttttttgtcaagcatgtcagacaataaagtctttgtaaaaaga

SEQ ID NO: 29840 - protein, 58 aa, Homo sapiens [sequence omitted]

SEQ ID NO: 29841 - DNA, 1197 bp, Homo sapiens
cagacagtccctttctctcctcccaagtgagggaggagacaggcccaaggcggaggccctccgagggagcatttagggacatctcaggaattcagaccgcacctggccaggcccacagctgtttgcctggcattgttcccccctttttcttcccataggcatttttgtttacttgaacaatgacctgagtgtcctaggcattcactcggagcctggatgatgggggctggttctacagaatgagccactggcattcgtgcccaggaccagtgagagcgttcccagtcatggggggatgacccttggtcccacggggaacacactgctctgtagaatgcggtagcctggatggagggtctgcaggcttaggctgcagcaggcctgccatgggtgtgaacccatgtccaggcacgcaccgacacacatgcacgcacgcacccctcttaattgaaccaagtgggtcctgtgtttctcttttctgccccgtagtgaggttctgttccttggtgcggcttcccttgcaccgttaggattctgtctggcatgcctgcagccgaggaagcccaggaccagccggccctgtgaattggagggtggcacagggaccgagcgggccccaggctccagcagccccaccttggacagcttctttttcttctttgaattaggactggagggggtggggccagggcggtggtgggaaccggtagggcctagatgaggggcaggcagtcaggcagaaatgggcaagttcagggtcagattctgtcgttatttaatattttgttcatcatggactttttctgcatttattttgatttttaacgttgcattaaagtagtattatttgtcctgattggtgactttttttgcacccctttccgttgtacatctgagagaagggtgtcactccctcacccaggtcccagccctgggaaccagcctaccgtgagcccttttgcagatatagactcatttcatcctcagatggtccttcaaggtatcttcagaatatggtgtatttttatgtggaaaagaaaagttatgaaggcagctgttactttaagagaaaattcattaaaagtcctcgaggtatgaagatgacggcgtgcttctcaatcattttggcataacttgattgtggctgtaatttttttttttttttttgtcaagcatgtcagacaataaagtctttgt

SEQ ID NO: 29842 - protein, 36 aa, Homo sapiens
MVLQGIFRIWCIFMWKRKVMKAAVTLRENSLKVLEV

SEQ ID NO: 29843 - DNA, 633 bp, Homo sapiens
ggactttttctgcatttattttgatttttaacgttgcattaaagtagtattatttgtcctgattggtgactttttttgcacccctttccgttgtacatctgagagaagggtgtcactccctcacccaggtcccagccctgggaaccagcctaccgtgagcccttttgcagatatagactcatttcatcctcagatggtccttcaaggtaggtactttagtcccattttagagatgagacgattgaggccagaggggtgtggtaacttgcctgggggctcacagcacaaaaggagccgaggcaggatctgacccttgttctctggcctcactgccctcactttgccatgacccgaagttatgtccctacaaagcaatgcatggtccaaggctctttttattgtatttttatttttaagggtcctgttcaaaactggtgtgagctctgaggagtcctgaaccctgggtgcagcatcctagcatcctgggagggtggggctgctgtccctggaagcctggcagcagcactgtatcgggttggctgaagctgagcgccgtggggtgcagggctccaggaatcccgtttggctgaaggggttcctgtagccagggatgtttatgagaaaagcaggccc

SEQ ID NO: 29844 - protein, 38 aa, Homo sapiens
MVLQGRYFSPILEMRRLRPEGCGNLPGGSQHKRSRGRI

SEQ ID NO: 29845 - DNA, 1997 bp, Homo sapiens
atctgaagtaccagctataatagaaaagccgccgtggaaacgtcttcttggggtgcccccgatcgcaataacagtctgggtgcaccatgacagctttcgctatgcacacagtcacttggaaagaatccaatccatgatcccaagctgcctttagtcatcatggctcccaactgtcttccagtctaagatggtttctccgtatttccttgcttcctctggccttggaagttttgaggcgtgctgggttgaatttctccacaagagctacagaaaaaaatggcagttcaattggtggcgattcattcattcattcattcttcactcattcattcaacacttgctgagacaccttctctgcttcaggccctggcttggtcctcacatcaaagaactcacggttggtggctggacatatgtggagacagacatgtgacaaactaagtgccgcagggagggggaccctgagtcccgctggcccacactgtcctgggtttgcatggtcacagcttatggacagagactatgggagctatgaccaaaacacagagagggaggtaagggggtgttccccgccgtgtcagggcagagtcaggtgtgtgaggagcaggggaaggttccctgagctcatagtgagcctggctggggctggactgtggggatggaattcagactcagccctatgaccaagtatttcctaacggcaccagagacaggttctctagtgtctgttatgcaaggcaaattctcgctttaagtttccattccattgatgatctaaaaatatatacaacttattctggatacagggaccacctttaggagataacagctgtgcagcctcaggggctgagtccagctttctgatcaggctcatgtggatgctccacggggagtgttgctggtggccgagaggctggcccaccggaacctctgaagagcaaggctcgccccacgcttggcactcatcctcatgccgcattctcctgccagttgtaaagacaacacttctctgggagtgacaactcataattgaaggaggcttatgtaagataagatttgagttgaagtttcatagactagactttgttttgacatcctgaaagaacagaatgtcagggagtggaatgctgtgtgagttgttgaggcaaatgaggaaggccagtggaagcagactgcaggcaaacgacacctgcatgccaagccaggccaagagaggctgttgcacgttctagaagcagagatttctttgcccttgcacacagggaagcagcagcaggtcacggtgcctgtcaggacatagcgggggcccatggaaccccaaggaactggcccatacatgcctctgatgctctgactcacagaaggccatcagcagtgaggagaaaatacagaatgacttttggaaagcaatcggcttttttttacagtattgaattttggatgcatgactaacatctgacaagcctatcataataactgagtggggacttaaatgagttcatggttgaaaagaaaaagccagcagtagcaataaggacagtaacacagtgaaggtttatcactctcaaaatcaaagaattaactaaaaaaaaaagggaacgccaatatgtgtgacaaccaacatgcgtgttttggcttcagcaaaacgttacattaaatcaatgaacaacatttgaatattactgatttcagattttttatacttaatttacaagtgttttttaataggctctaacttaaagagtttacacctggtttcatttgtgcattttaaggtcatgattatgataaaagtaatttatattaatattggaggctctcaaagaaaacattttcctttaaaaggagtctgtatattagtcatgtgttgggggagctaaaaagccaaggagtgacatggtcagatgtattttcctgtaatgtaaaatgttgaataaacaagatgtaactgggccgggtgtgttgggtcacacctgatcctagcactctgggaggct

SEQ ID NO: 29846 - protein, 81 aa, Homo sapiens
MVSPYFLASSGLGSFEACWVEFLHKSYRKKWQFNWWRFIHSFILHSFIQHLLRHLLCFRPWLGPHIKELTVGGWTYVETDM

SEQ ID NO: 29847 - DNA, 1309 bp, Homo sapiens
actttgcgtggaaatatacaatctctaaagtcattcagttatatgttaaataacttgaagatgttttttgttccaagagagaagtgaagaatgtagttttcaaccaaagggatgacagctgatgagtgggctgagaaaatgcccaaaggcccgccgcctacctctcccaaggccacagccgacagagacatcctggctcgcctccacaaagcagtgacttcccattaccatgccatcacccaggagtttgagaattttgacaccatgaaaacgaacaccatctccagagaggagtttagggccatttgtaatcgccgcgtccaaatcctgacggacgaacagtttgacagactctggaacgagatgccagtcaatgccaaggggaggctgaaatacccggacttcctgagcaggttcagttccgagacagcagccacaccaatggccactggtgactcggccgtggcccagagagggagcagtgtccctgacgtctcggaaggcaccagatctgccctctcattgcccactcaggagctgagaccagggtcaaagtcgcagagccacccctgtactccagcgagcaccaccgtgatcccgggcactccacccttgcagaactgtgatcccatagagagcaggctccggaagagaatccagggctgctggcgccagctcctgaaagaatgcaaggagaaggacgtggccagacagggggacatcaacgcctccgatttcctggctcttgtggagaaattcaacctggacataagcaaagaggagtgtcagcagctcattataaaatacgacttaaagagcaacgggaaatttgcatactgtgacttcattcagagctgtgtcctcctgctaaaagcaaaggaaagctcactgatgcacaggatgaagatccagaatgcacacaagatgaaagaagccggcgcggagacgccatctttttactctgctctgctgcgtattcagcccaaaattgtgcactgctggaggccaatgcggcgcacgttcaaaagctatgatgaggctggaacagggctgctaagcgtcgcagatttcaggacggtcctgagacagtacagcatcaacctctctgaggaagagttcttccatattctggagtattacgataagacgctgtcttcaaaaatctcctacaacgacttcctccgggcattcctccagtagacacccctgctgtgtgcccagcgggacgacagccacagggcctgtttcaaggctaataaaatcctataatttgggggtttcatgaattttcaaaaaaaacaaaactcaa

SEQ ID NO: 29848 - protein, 362 aa, Homo sapiens
MTADEWAEKMPKGPPPTSPKATADRDILARLHKAVTSHYHAITQEFENFDTMKTNTISREEFRAICNRRVQILTDEQFDRLWNEMPVNAKGRLKYPDFLSRFSSETAATPMATGDSAVAQRGSSVPDVSEGTRSALSLPTQELRPGSKSQSHPCTPASTTVIPGTPPLQNCDPIESRLRKRIQGCWRQLLKECKEKDVARQGDINASDFLALVEKFNLDISKEECQQLIIKYDLKSNGKFAYCDFIQSCVLLLKAKESSLMHRMKIQNAHKMKEAGAETPSFYSALLRIQPKIVHCWRPMRRTFKSYDEAGTGLLSVADFRTVLRQYSINLSEEEFFHILEYYDKTLSSKISYNDFLRAFLQ

SEQ ID NO: 29849 - DNA, 426 bp, Homo sapiens
ggtcacagcccttgtcccatctggcagctgccaaggccaccaccataaagaagccggcgcggagacgccatctttttactctgctctgctgcgtattcagcccaaaattgtgcactgctggaggccaatgcggcgcacgttcaaaagctatgatgaggctggaacagggctgctaagcgtcgcagatttcaggacggtcctgagacagtacagcatcaacctctctgaggaagagttcttccatattctggagtattacgataagacgctgtcttcaaaaatctcctacaacgacttcctccgggcattcctccagtagacacccctgctgtgtgcccagcgggacgacagccacagggcctgtttcaaggctaataaaatcctataatttgggggtttcatgaattttcaaaaaaaacaaaactc

SEQ ID NO: 29850 - protein, 63 aa, Homo sapiens
MRRTFKSYDEAGTGLLSVADFRTVLRQYSINLSEEEFFHILEYYDKTLSSKISYNDFLRAFLQ

SEQ ID NO: 29851 - DNA, 414 bp, Homo sapiens
gtcatacagtgccctggaggcagtgcctgctcagaaagaagccggcgcggagacgccatctttttactctgctctgctgcgtattcagcccaaaattgtgcactgctggaggccaatgcggcgcacgttcaaaagctatgatgaggctggaacagggctgctaagcgtcgcagatttcaggacggtcctgagacagtacagcatcaacctctctgaggaagagttcttccatattctggagtattacgataagacgctgtcttcaaaaatctcctacaacgacttcctccgggcattcctccagtagacacccctgctgtgtgcccagcgggacgacagccacagggcctgtttcaaggctaataaaatcctataatttgggggtttcatgaattttcaaaaaaaacaaaactc

SEQ ID NO: 29852 - protein, 63 aa, Homo sapiens; identical to SEQ ID NO: 29850

SEQ ID NO: 29853 - DNA, 4454 bp, Homo sapiens
gaccccgcggcttggggtccgcgcacgcgggtgccggcccagctaggcggagaatcgaggaggggttcccgggctcatcgcagaggattggaagggcctagattactgcccaatgacaaaagtgtgggcttaatgtcctcactcttcagggagagaatgtggactttagcatttgaactgaatatttgagattgaagatttctgaataatcccccttagcacctctggtactgtaccgtaccttgcctttctgtccaggtttggtggaattgacctatatataaatggtataaagaggggaggtgggaatgaaatgaattgctgccgcacattaagagaacttgaaatccaagtgggagaaaaggttttcaaaaacattaagactgttatgaaagcctttgagctcattgatgttaacaagactggactggttcgaccgcaggagctaagaagggttctggagaccttctgtatgaagttaagagacgaggaatacgaaaagttttcgaaacactacaacatccacaaggatactgcagtagattacaacgtgtttttgaagaatctcagcataaataacgacttgaaccttagatattgtatgggaaatcaagaggtctcgttggagaatcaacaagccaaaaattccaaaaaggaacgtttgctaggttctgcatcatctgaagatatctggagaaactactccttggatgaaattgagaggaacttttgtctacaactttcgaagtcttatgaaaaggttgaaaaggccctcagtgcaggggacccctgtaaaggtggctacgtgtcttttaattatctaaagattgtcctcgacacttttgtataccaaataccaagaagaatttttatccagttaatgaaaagatttggacttaaagccaccactaaaatcaattggaagcaatttctaacatcatttcatgagcctcaggggttgcaagttagcagtaaaggtcccctgacaaaaagaaatagcatcaactctagaaatgaatctcacaaggaaaacatcatcacaaagttatttagacacactgaagatcactctgcgtcactgaagaaagcattactgataatcaacactaaacccgatggaccgataacaagagaagaatttcgatatattctaaattgcatggctgtaaaactaagcgattcagaattcaaagaactaatgcaaatgcttgaccctggggacactggagtggtcaacaccagcatgtttattgatctgattgaagagaactgtaggatgagaaagacatctccctgtacagatgctaagacacctttcctcctggcctgggattcagtggaagaaattgttcatgatacaattactaggaacctacaagctttttataacatgctacgctcatatgaccttggagacacagggcgcattggccgaaataatttcaagaaaatcatgcacgtcttctgtccatttttaacgaatgcacatttcataaaactctgcagtaagattcaggacattggttcaggaagaatcctttacaagaaacttttggcatgcataggaattgatggcccacccactgtctctccagttcttgttccaaaggatcagctgttaagtgaacatttacaaaaagatgaacagcagcagccagatctttctgagagaaccaagctcacggaggataaaaccaccctgaccaagaagatgaccacagaagaagtgattgaaaaattcaaaaagtgtatacagcagcaggacccggcattcaaaaaacgatttcttgacttcagcaaggagcctaatggaaaaattaacgtgcatgactttaagaaggtactggaagacactgggatgcccatggacgatgatcagtatgccctgctgaccactaaaataggcttcgagaaggaagggatgagctatcttgattttgcagcaggatttgaagatcctccaatgagagggccggaaaccactccgccgcagcctccaactccttcaaaaagttacgtgaacagccactttatcaccgcagaagaatgcctgaagcttttccctaggaggctgaaggagtcattccgggacccctactctgccttctttaaaacagatgctgacagggatggcataatcaacatgcatgaccttcacagactgctcctgcatctactgcttaatctcaaagacgacgagtttgagcgcttccttggccttcttggcttgagacttagtgtcactttaaattttcgggaatttcaaaatttgtgtgagaagagaccatggagaacagatgaagcgcctcaaagactcattagaccaaaacagaaggttgcggattcagaactagcttgtgagcaggctcatcagtatcttgttaccaaagcaaaaaacagatggtcagacttgtctaagaattttctagaaaccgataatgagggcaatggcattcttcgacgccgggacataaagaacgcactgtacggttttgatattcccctcacaccaagagagtttgaaaagctttgggcaagatacgacaccgagggaaaagggcacattacttaccaggaatttttacagaaattgggtattaactattcgcctgctgtccatcggccctgtgcagaggattatttcaacttcatgggtcattttacaaagccacagcagctacaggaagagatgaaggagctgcagcagagcacagagaaggctgtggcagccagggataagcttatggaccgccatcaagatatcagcaaagcattcaccaaaactgatcaatccaaaaccaactacatatccatatgcaagatgcaggaagtgctggaagaatgtggatgttctcttaccgaaggggagctgacccatctgctaaacagttggggagtcagccggcatgataatgctatcaattacctcgacttcctgagagcagtggagaacagcaagtcaacaggagctcagcccaaggaaaaagaagagagcatgccaatcaattttgcaacgctgaatccacaggaggctgtgaggaagatccaggaagtagttgagtcctcccagctggctttgtccacggcattttctgcattggataaagaggatacaggatttgtaaaggctacagaattcggacaagttcttaaggatttctgttacaaactaacggacaatcagtatcattattttttgaggaaactaagaattcatctaaccccctatataaattggaaatattttctccagaactttagctgtttccttgaggagacagctgatgagtgggctgagaaaatgcccaaaggcccgccgcctacctctcccaaggccacagccgacagagacatcctggctcgcctccacaaagcagtgacttcccattaccatgccatcacccaggagtttgagaattttgacaccatgaaaacgaacaccatctccagagaggagtttagggccatttgtaatcgccgcgtccaaatcctgacggacgaacagtttgacagactctggaacgagatgccagtcaatgccaaggggaggctgaaatacccggacttcctgagcaggttcagttccgagacagcagccacaccaatggccactggtgactcggccgtggcccagagagggagcagtgtccctgacgtctcggaaggcaccagatctgccctctcattgcccactcaggagctgagaccagggtcaaagtcgcagagccacccctgtactccagcgagcaccaccgtgatcccgggcactccacccttgcagaactgtgatcccatagagagcaggctccggaagagaatccagggctgctggcgccagctcctgaaagaatgcaaggagaaggacgtggccagacagggggacatcaacgcctccgatttcctggctcttgtggagaaattcaacctggacataagcaaagaggagtgtcagcagctcattataaaatacgacttaaagagcaacgggaaatttgcatactgtgacttcattcagagctgtgtcctcctgctaaaagcaaaggaaagctcactgatgcacaggatgaagatccagaatgcacacaagatgaaagaagccggcgcggagacgccatctttttactctgctctgctgcgtattcagcccaaaattgtgcactgctggaggccaatgcggcgcacgttcaaaagctatgatgaggctggaacagggctgctaagcgtcgcagatttcaggacggtcctgagacagtacagcatcaacctctctgaggaagagttcttccatattctggagtattacgataagacgctgtcttcaaaaatctcctacaacgacttcctccgggcattcctccagtagacacccctgctgtgtgcccagcgggacgacagccacagggcctgtttcaaggctaataaaatcctataatttgggggtttcatgaattttc

SEQ ID NO: 29854 - protein, 1349 aa, Homo sapiens; identical to SEQ ID NO: 4113

SEQ ID NO: 29855 - DNA, 4800 bp, Homo sapiens
gaccccgcggcttggggtccgcgcacgcgggtgccggcccagctaggcggagaatcgaggaggggttcccgggctcatcgcagaggattggaagggcctagattactgcccaatgacaaaagtgtgggcttaatgtcctcactcttcagggagagaatgtggactttagcatttgaactgaatatttgagattgaagatttctgaataggatttaatgtgcaaaatggcgattataccagactggcttaggtcgcatcctcacacacgaaaatttacacattcaagaccccattcttcaccgtgtagagtatattcaaggaatggttccccaaataagttcagatcttcttcaaccacagctgttgcaaatccaacactgtcctccttagatgttaaacggattttatttcaaaaaattaccgacagaggggatgagttgcaaaaagcctttcagctgctggatactggtcagaacttgactgtgtcaaaaagtgaactgagaagaatcatcacagacttcctgatgccgctcacacgagaacagtttcaggacgtgttggctcagatcccccttagcacctctggtactgtaccgtaccttgcctttctgtccaggtttggtggaattgacctatatataaatggtataaagaggggaggtgggaatgaaatgaattgctgccgcacattaagagaacttgaaatccaagtgggagaaaaggttttcaaaaacattaagactgttatgaaagcctttgagctcattgatgttaacaagactggactggttcgaccgcaggagctaagaagggttctggagaccttctgtatgaagttaagagacgaggaatacgaaaagttttcgaaacactacaacatccacaaggatactgcagtagattacaacgtgtttttgaagaatctcagcataaataacgacttgaaccttagatattgtatgggaaatcaagaggtctcgttggagaatcaacaagccaaaaattccaaaaaggaacgtttgctaggttctgcatcatctgaagatatctggagaaactactccttggatgaaattgagaggaacttttgtctacaactttcgaagtcttatgaaaaggttgaaaaggccctcagtgcaggggacccctgtaaaggtggctacgtgtcttttaattatctaaagattgtcctcgacacttttgtataccaaataccaagaagaatttttatccagttaatgaaaagatttggacttaaagccaccactaaaatcaattggaagcaatttctaacatcatttcatgagcctcaggggttgcaagttagcagtaaaggtcccctgacaaaaagaaatagcatcaactctagaaatgaatctcacaaggaaaacatcatcacaaagttatttagacacactgaagatcactctgcgtcactgaagaaagcattactgataatcaacactaaacccgatggaccgataacaagagaagaatttcgatatattctaaattgcatggctgtaaaactaagcgattcagaattcaaagaactaatgcaaatgcttgaccctggggacactggagtggtcaacaccagcatgtttattgatctgattgaagagaactgtaggatgagaaagacatctccctgtacagatgctaagacacctttcctcctggcctgggattcagtggaagaaattgttcatgatacaattactaggaacctacaagctttttataacatgctacgctcatatgaccttggagacacagggcgcattggccgaaataatttcaagaaaatcatgcacgtcttctgtccatttttaacgaatgcacatttcataaaactctgcagtaagattcaggacattggttcaggaagaatcctttacaagaaacttttggcatgcataggaattgatggcccacccactgtctctccagttcttgttccaaaggatcagctgttaagtgaacatttacaaaaagatgaacagcagcagccagatctttctgagagaaccaagctcacggaggataaaaccaccctgaccaagaagatgaccacagaagaagtgattgaaaaattcaaaaagtgtatacagcagcaggacccggcattcaaaaaacgatttcttgacttcagcaaggagcctaatggaaaaattaacgtgcatgactttaagaaggtactggaagacactgggatgcccatggacgatgatcagtatgccctgctgaccactaaaataggcttcgagaaggaagggatgagctatcttgattttgcagcaggatttgaagatcctccaatgagagggccggaaaccactccgccgcagcctccaactccttcaaaaagttacgtgaacagccactttatcaccgcagaagaatgcctgaagcttttccctaggaggctgaaggagtcattccgggacccctactctgccttctttaaaacagatgctgacagggatggcataatcaacatgcatgaccttcacagactgctcctgcatctactgcttaatctcaaagacgacgagtttgagcgcttccttggccttcttggcttgagacttagtgtcactttaaattttcgggaatttcaaaatttgtgtgagaagagaccatggagaacagatgaagcgcctcaaagactcattagaccaaaacagaaggttgcggattcagaactagcttgtgagcaggctcatcagtatcttgttaccaaagcaaaaaacagatggtcagacttgtctaagaattttctagaaaccgataatgagggcaatggcattcttcgacgccgggacataaagaacgcactgtacggttttgatattcccctcacaccaagagagtttgaaaagctttgggcaagatacgacaccgagggaaaagggcacattacttaccaggaatttttacagaaattgggtattaactattcgcctgctgtccatcggccctgtgcagaggattatttcaacttcatgggtcattttacaaagccacagcagctacaggaagagatgaaggagctgcagcagagcacagagaaggctgtggcagccagggataagcttatggaccgccatcaagatatcagcaaagcattcaccaaaactgatcaatccaaaaccaactacatatccatatgcaagatgcaggaagtgctggaagaatgtggatgttctcttaccgaaggggagctgacccatctgctaaacagttggggagtcagccggcatgataatgctatcaattacctcgacttcctgagagcagtggagaacagcaagtcaacaggagctcagcccaaggaaaaagaagagagcatgccaatcaattttgcaacgctgaatccacaggaggctgtgaggaagatccaggaagtagttgagtcctcccagctggctttgtccacggcattttctgcattggataaagaggatacaggatttgtaaaggctacagaattcggacaagttcttaaggatttctgttacaaactaacggacaatcagtatcattattttttgaggaaactaagaattcatctaaccccctatataaattggaaatattttctccagaactttagctgtttccttgaggagacagctgatgagtgggctgagaaaatgcccaaaggcccgccgcctacctctcccaaggccacagccgacagagacatcctggctcgcctccacaaagcagtgacttcccattaccatgccatcacccaggagtttgagaattttgacaccatgaaaacgaacaccatctccagagaggagtttagggccatttgtaatcgccgcgtccaaatcctgacggacgaacagtttgacagactctggaacgagatgccagtcaatgccaaggggaggctgaaatacccggacttcctgagcaggttcagttccgagacagcagccacaccaatggccactggtgactcggccgtggcccagagagggagcagtgtccctgacgtctcggaaggcaccagatctgccctctcattgcccactcaggagctgagaccagggtcaaagtcgcagagccacccctgtactccagcgagcaccaccgtgatcccgggcactccacccttgcagaactgtgatcccatagagagcaggctccggaagagaatccagggctgctggcgccagctcctgaaagaatgcaaggagaaggacgtggccagacagggggacatcaacgcctccgatttcctggctcttgtggagaaattcaacctggacataagcaaagaggagtgtcagcagctcattataaaatacgacttaaagagcaacgggaaatttgcatactgtgacttcattcagagctgtgtcctcctgctaaaagcaaaggaaagctcactgatgcacaggatgaagatccagaatgcacacaagatgaaagaagccggcgcggagacgccatctttttactctgctctgctgcgtattcagcccaaaattgtgcactgctggaggccaatgcggcgcacgttcaaaagctatgatgaggctggaacagggctgctaagcgtcgcagatttcaggacggtcctgagacagtacagcatcaacctctctgaggaagagttcttccatattctggagtattacgataagacgctgtcttcaaaaatctcctacaacgacttcctccgggcattcctccagtagacacccctgctgtgtgcccagcgggacgacagccacagggcctgtttcaaggctaataaaatcctataatttgggggtt

SEQ ID NO: 29856 - protein, 1501 aa, Homo sapiens; identical to SEQ ID NO: 4111

SEQ ID NO: 29857 - DNA, 395 bp, Homo sapiens
ggtcacagcccttgtcccatctggcagctgccaaggccaccaccataaagaagccggcgcggagacgccatctttttactctgctctgctgcgtattcagcccaaaattgtgcactgctggaggccaatgcggcgcacgttcaaaagctatgatgaggctggaacagggctgctaagcgtcgcagatttcaggacggtcctgagacagtacagcatcaacctctctgaggaagagttcttccatattctggagtattacgataagacgctgtcttcaaaaatctcctacaacgacttcctccgggcattcctccagtagacacccctgctgtgtgcccagcgggacgacagccacagggcctgtttcaaggctaataaaatcctataatttgggg

SEQ ID NO: 29858 - protein, 63 aa, Homo sapiens; identical to SEQ ID NO: 29850

SEQ ID NO: 29859 - DNA, 519 bp, Homo sapiens
gcgcacgttcaaaagctatgatgaggctggaacagggctgctaagcgtcgcagatttcaggacggtgagcacagctctgcgcccagtgcctctgcagggagcagctgccaaatgccagcggccagaaacttcccacggggagccctctacctgctgccgaaggcccggtgtgacctggctgcttcagatctcacttccctgggacccccaagttatccagtcctgggtccactcgcctcaccttcagaccccgggttctccttcccaaaggttgctggagccctgcgtggatgccccatacctgcatcgccagctcctcagggtcctgagacagtacagcatcaacctctctgaggaagagttcttccatattctggagtattacgataagacgctgtcttcaaaaatctcctacaacgacttcctccgggcattcctccagtagacacccctgctgtgtgcccagcgggacgacagccacagggcctgtttcaaggctaataaaatcctataatttgg

SEQ ID NO: 29860 - protein, 80 aa, Homo sapiens
MPAARNFPRGALYLLPKARCDLAASDLTSLGPPSYPVLGPLASPSDPGFSFPKVAGALRGCPIPASPAPQGPETVQHQPL

SEQ ID NO: 29861 - DNA, 2412 bp, Homo sapiens
atgacaagaaacgccagacccaacattgtcctgctgatggcagatgaccttggagtgggggatttgtgctgctacggtaataactcagtgagcacacctaatattgaccgcctggcaagtgaaggagtgaggcttacccagcatctcgcagctgcttccatgtgcaccccaagtcgggctgccttcctgaccggccggtaccccatcagatcagggatggtgtctgcctacaacctgaaccgtgccttcacgtggcttggtgggtcaggtggtcttcccaccaatgaaacgacttttgccaagctgctgcagcaccgtggctaccgcacgggactcataggcaaatggcacctgggtttgagctgcgcctctcggaatgatcactgttaccacccgctcaaccatggttttcactacttttacggggtgccttttggacttttaagcgactgccaggcatccaagacaccagaactgcaccgctggctcaggatcaaactgtggatctccacggtagcccttgccctggttccttttctgcttctcattcccaagttcgcccgctggttctcagtgccatggaaggtcatctttgtctttgctctcctcgcctttctgtttttcacttcctggtactctagttatggatttactcgacgttggaattgcatccttatgaggaaccatgaaattatccagcagccaatgaaagaggagaaagtagcttccctcatgctgaaggaggcacttgctttcattgaaaggtacaaaagggaaccttttctcctctttttttccttcctgcacgtacatactccactcatctccaaaaagaagtttgttgggcgcagtaaatatggcaggtatggggacaatgtagaagaaatggattggatggtgggtaaaatcctggatgccctggaccaggagcgcctggccaaccacaccttggtgtacttcacctctgacaacgggggccacctggagcccctggacggggctgttcagctgggtggctggaacgggatctacaaaggtggcaaaggaatgggaggatgggaaggaggtatccgtgtgccagggatattccggtggccgtcagtcttggaggctgggagagtgatcaatgagcccaccagcttaatggacatctatccgacgctgtcttatataggcggagggatcttgtcccaggacagagtgattgacggccagaacctaatgcccctgctggaaggaagggcgtcccactccgaccacgagttcctcttccactactgtggggtctatctgcacacggtcaggtggcatcagaaggactgtgcaactgtgtggaaagctcattatgtgactcctaaattctaccctgaaggaacaggtgcctgctatgggagtggaatatgttcatgttcgggggatgtaacctaccacgacccaccactcctctttgacatctcaagagacccttcagaagcccttccactgaaccctgacaatgagccattatttgactccgtgatcaaaaagatggaggcagccataagagagcatcgtaggacactaacacctgtcccacagcagttctctgtgttcaacacaatttggaaaccatggctgcagccttgctgtgggaccttccccttctgtgggtgtgacaaggaagatgacatccttcccatggctccctgagaccatgcggaccacgtgttacccaccacaaacttactgttacaatggtcataggagcagagctcacctgactgattcattccatttgggataaaaactgatggcccaacccattgttttatcctcagaaatcagttctttcaagagctcggtgaaattaaagtgggcccatataacagtgaacctggaggggagcatttgttgtataatttttttctagtatataattgtgccattgcccaaggaaaagagcaaatcaaggtgacttcagcagattcttgtagagcttttgttcctagaattcatggaagcatcaggtccaatgtcataagttagaaacttctgcttgcagattctatacccaggcatgctagctttctaataaatcatgataagtacttaattttttcatgaagcagagggtcacataaaacttgaagtagtgctgttatagtcagtttgacttcttgattttctctctttccttcttttctcttcctgtccgatacgcatctggttatgagaaaaaatgctgggctgaagttcttgactttgcttcctcgtagctatatcatcgtggaaatgtctctgtgatttggtttcttcatgtgtaaaataaggaaaaccagtgtctacttcacagagtagctatgaggattacatgcattaattaatgtgaaattgccttgtgtagaataagcagtcaataaatgttattattac

SEQ ID NO: 29862 - protein, 562 aa, Homo sapiens; identical to SEQ ID NO: 4115

SEQ ID NO: 29863 - DNA, 2167 bp, Homo sapiens
agtggagacaggctctcaccatgttgaccaggctggtctcgaactcccgacctcaagtgatccgccggcctcggcctcccaaagtgctgggattacaggcgtgaaccaccactcctggcccttctgttacttttccactgctgttgagatagaagtcactgttgggatccaacctttttgtttgtataaactgacaacaagaaggtattccaagctgcacaatgaggcccaggagacccttggtcttcatgtctttggtgtgtgcactcttgaacacatgccaggcacacagggtgcatgacgacaagcctaatattgtcctaatcatggttgatgacctgggtattggagatctgggctgctacggcaatgacaccatgaggacgcctcacatcgaccgccttgccagggaaggcgtgcgactgactcagcacatctctgccgcctccctctgcagcccaagccggtccgcgttcttgacgggaagataccccatccgatcaggtatggtttctagtggtaatagacgtgtcatccaaaatcttgcagtccccgcaggcctccctcttaatgagacaacacttgcagccttgctaaagaagcaaggatacagcacggggcttataggcaaatggcaccaaggcttgaactgcgactcccgaagtgaccagtgccaccatccatataattatgggtttgactactactatggcatgccgttcactctcgttgacagctgctggccggacccctctcgtaacacggaattagcctttgagagtcagctctggctctgtgtgcagctagttgccattgccatcctcaccctaacctttgggaagctgagcggctgggtctctgttccctggctcctgatcttctccatgattctgtttattttcctcttgggctatgcttggttctccagccacacgtcccctttatactgggactgcctcctcatgcgggggcacgagatcacggagcagcccatgaaggctgaacgagctggatccattatggtgaaggaagcgatttcctttttagaaaggcacagtaaggaaactttccttctctttttctcctttcttcacgtgcacacacctctccccaccacggacgatttcactggcaccagcaagcatggcttgtatggggataatgtggaagagatggactccatggtgggcaagattcttgatgctatcgatgattttggcctaaggaacaacacccttgtctactttacatcagatcacggagggcatttggaagctaggcgagggcatgcccaacttggtggatggaatggaatatacaaaggtggaaaaggcatggggggctgggaaggtggaatccgcgtcccaggaattgtccgatggcctggaaaggtaccagctggacggttgattaaggaacctacaagtttaatggatattttaccaactgtcgcatcagtgtcaggaggaagtctccctcaggacagggtcattgacggccgagacctcatgcccttgctgcagggcaacgtcaggcactcggagcatgaatttcttttccactactgtggctcctacctgcacgccgtgcggtggatccccaaggacgacagtgggtcagtttggaaggctcactatgtgaccccggtattccagccaccagcttctggtggctgctatgtcacctcattatgcagatgtttcggagaacaggttacctaccacaacccccctctgctcttcgatctctccagggacccctcagagtccacacccctgacacctgccacagagcccctccatgattttgtgattaaaaaggtggccaacgccctgaaggaacaccaggaaaccatcgtgcctgtgacctaccaactctcagaactgaatcagggcaggacgtggctgaagccttgctgtggggtgttcccattttgtctgtgtgacaaggaagaggaagtctctcagcctcggggtcctaacgagaagagataattacaatcaggctaccagaggaagcctttggtcctaacgagaagagataattacaatcaggctaccaaaggaagcactaactttggtgctttcaagttggcaaggagtgcatttaatagtcaataaattcatctaccattccagattattaaaggcccactggttgttccact

SEQ ID NO: 29864 - protein, 590 aa, Homo sapiens; identical to SEQ ID NO: 4117

SEQ ID NO: 29865 - DNA, 930 bp, Homo sapiens
cctttgcagaacagcctgtctgttctgctcctagacattagagagataatacggctgatagacaacaagaaggtattccaagctgcacaatgaggcccaggagacccttggtcttcatgtctttggtgtgtgcactcttgaacacatgccaggcacacagggtgcatgacgacaagcctaatattgtcctaatcatggttgatgacctgggtattggagatctgggctgctacggcaatgacaccatgaggtatggtttctagtggtaatagacgtgtcatccaaaatcttgcagtccccgcaggcctccctcttaatgagacaacacttgcagccttgctaaagaagcaaggatacagcacggggcttataggcaaatggcaccaaggcttgaactgcgactcccgaagtgaccagtgccaccatccatataattatgggtttgactactactatggcatgccgttcactctcgttgacagctgctggccggacccctctcgtaacacggaattagcctttgagagtcagctctggctctgtgtgcagctagttgccattgccatcctcaccctaacctttgggaagctgagcggctgggtctctgttccctggctcctgatcttctccatgattctgtttattttcctcttgggctatgcttggttctccagccacacgtcccctttatactgggactgcctcctcatgcgggggcacgagatcacggagcagcccatgaaggctgaacgagctggatccattatggtgaaggaagcgatttcctttttagaaaggcacagtaaggaaactttccttctctttttctcctttcttcacgtgcacacacctctccccaccacggacgatttcactggcaccagcaagcatggcttgtatggggataatgtggaagagatggactccatg

SEQ ID NO: 29866 - protein, 225 aa, Homo sapiens
MVSSGNRRVIQNLAVPAGLPLNETTLAALLKKQGYSTGLIGKWHQGLNCDSRSDQCHHPYNYGFDYYYGMPFTLVDSCWPDPSRNTELAFESQLWLCVQLVAIAILTLTFGKLSGWVSVPWLLIFSMILFIFLLGYAWFSSHTSPLYWDCLLMRGHEITEQPMKAERAGSIMVKEAISFLERHSKETFLLFFSFLHVHTPLPTTDDFTGTSKHGLYGDNVEEMDS

SEQ ID NO: 29867 - DNA, 2035 bp, Homo sapiens
cctttgcagaacagcctgtctgttctgctcctagacattagagagataatacggctgatagacaacaagaaggtattccaagctgcacaatgaggcccaggagacccttggtcttcatgtctttggtgtgtgcactcttgaacacatgccaggcacacagggtgcatgacgacaagcctaatattgtcctaatcatggttgatgacctgggtattggagatctgggctgctacggcaatgacaccatgaggacgcctcacatcgaccgccttgccagggaaggcgtgcgactgactcagcacatctctgccgcctccctctgcagcccaagccggtccgcgttcttgacgggaagataccccatccgatcaggtatggtttctagtggtaatagacgtgtcatccaaaatcttgcagtccccgcaggcctccctcttaatgagacaacacttgcagccttgctaaagaagcaaggatacagcacggggcttataggcaaatggcaccaaggcttgaactgcgactcccgaagtgaccagtgccaccatccatataattatgggtttgactactactatggcatgccgttcactctcgttgacagctgctggccggacccctctcgtaacacggaattagcctttgagagtcagctctggctctgtgtgcagctagttgccattgccatcctcaccctaacctttgggaagctgagcggctgggtctctgttccctggctcctgatcttctccatgattctgtttattttcctcttgggctatgcttggttctccagccacacgtcccctttatactgggactgcctcctcatgcgggggcacgagatcacggagcagcccatgaaggctgaacgagctggatccattatggtgaaggaagcgatttcctttttagaaaggcacagtaaggaaactttccttctctttttctcctttcttcacgtgcacacacctctccccaccacggacgatttcactggcaccagcaagcatggcttgtatggggataatgtggaagagatggactccatggtgggcaagattcttgatgctatcgatgattttggcctaaggaacaacacccttgtctactttacatcagatcacggagggcatttggaagctaggcgagggcatgcccaacttggtggatggaatggaatatacaaaggtggaaaaggcatggggggctgggaaggtggaatccgcgtcccaggaattgtccgatggcctggaaaggtaccagctggacggttgattaaggaacctacaagtttaatggatattttaccaactgtcgcatcagtgtcaggaggaagtctccctcaggacagggtcattgacggccgagacctcatgcccttgctgcagggcaacgtcaggcactcggagcatgaatttcttttccactactgtggctcctacctgcacgccgtgcggtggatccccaaggacgacagtgggtcagtttggaaggctcactatgtgaccccggtattccagccaccagcttctggtggctgctatgtcacctcattatgcagatgtttcggagaacaggttacctaccacaacccccctctgctcttcgatctctccagggacccctcagagtccacacccctgacacctgccacagagcccctccatgattttgtgattaaaaaggtggccaacgccctgaaggaacaccaggaaaccatcgtgcctgtgacctaccaactctcagaactgaatcagggcaggacgtggctgaagccttgctgtggggtgttcccattttgtctgtgtgacaaggaagaggaagtctctcagcctcggggtcctaacgagaagagataattacaatcaggctaccagaggaagcctttggtcctaacgagaagagataattacaatcaggctaccaaaggaagcactaactttggtgctttcaagttggcaaggagtgcatttaatagtcaataaattcatctaccattccagattattaaaggcccactggttgttccact

SEQ ID NO: 29868 - protein, 590 aa, Homo sapiens; identical to SEQ ID NO: 4117

SEQ ID NO: 29869 - DNA, 674 bp, Homo sapiens
agagcagctggacatgggggagcttgcagcgtcagcaaatcatggacactcaccctgctacccagagagaaaagggacccctggagacttgagcaaaagaaaaatgctggtacatttttaccccaggaggcacagccaccccagagccacacagcaatggatacttaagaataagactctctgcaggaggatcaaggagtaataaaaagagcagaatatctgcagctgccaagacctcggctctaattctagatttgcagcccatggctgcacaataggcacaagaatgaaccaacgtcaccaccaaggaaagtggcacagctgagctgcacccacgtctgactccaagggaccagctattgacagctattcaccatttggtttctgtgtgtcccagtcctcacgtggaaaatgggcaaatattatctgcttcatcggtattcctgggaacctagaggaagcactagccaatatcattcacttagcataccggagttatctttccattttcttaattcaagaaccttgctctttttgccaattatcttagtagtttttcagtgacctctcagtaaaagcaatgtattttgtagccttgtctttcacagaaatcgccttataaattgtttgatatacaattaaacaaaaactttatttctgcattgctcaaagaa

SEQ ID NO: 29870 - protein, 62 aa, Homo sapiens
MGELAASANHGHSPCYPERKGTPGDLSKRKMLVHFYPRRHSHPRATQQWILKNKTLCRRIKE

SEQ ID NO: 29871 - DNA, 2091 bp, Homo sapiens
ccgagggtgtggttctgccagctccatactatggaaaccggatcactgtccatggcaacggttccctggacatcaggagtttgaggaagagcgactccgtccagctggtatgcatggcacgcaacgagggaggggaggccaggttgatcctgcagctcactgtcctggagcccatggagaaacccatcttccacgacccgatctgcagagtggacagcagctgcagcgcttctaccacaaggctgacggcatgctacacattagcggtctctcctcggtggacgccggggcctaccgctgcgtggcccgcaatgccgctggccacacggagaggctggtctccctgaaggtgggactgaagccagaagcaaacaagcagtatcataacctggtcagcatcatcaatggtgagaccctgaagctcccctgcacccctcccggggctgggcagggacgtttctcctggacgctccccaatggcatgcatctggagggcccccaaaccctgggacgcgtttctcttctggacaatggcaccctcacggttcgtgaggcctcggtgtttgacaggggtacctatgtatgcaggatggagacggagtacggcccttcggtcaccagcatccccgtgattgtgatcgcctatcctccccggatcaccagcgagcccaccccggtcatctacacccggcccgggaacaccgtgaaactgaactgcatggctatggggattcccaaagctgacatcacgtgggagttaccggataagtcgcatctgaaggcaggggttcaggctcgtctgtatggaaacagatttcttcacccccagggatcactgaccatccagcatgccacacagagagatgccggcttctacaagtgcatggcaaaaaacattctcggcagtgactccaaaacaacttacatccacgtcttctgaaatgtggattccagaatgattgcttaggaactgacaacaaagcggggtttgtaagggaagccaggttggggaataggagctcttaaataatgtgtcacagtgcatggtggcctctggtgggtttcaagttgaggttgatcttgatctacaattgttgggaaaaggaagcaatgcagacacgagaaggagggctcagccttgctgagacactttcttttgtgtttacatcatgccaggggcttcattcagggtgtctgtgctctgactgcaatttttctttttttgcaaatgccactcgactgccttcataagcgtccataggatatctgaggaacattcatcaaaaataagccatagacatgaacaacacctcactaccccattgaagacgcatcacctagttaacctgctgcagtttttacatgatagactttgttccagattgacaagtcatctttcagttatttcctctgtcacttcaaaactccagcttgcccaataaggatttagaaccagagtgactgatatatatatatattttaattcagagttacatacatacagctaccattttatatgaaaaaagaaaaacatttcttcctggaactcactttttatataatgttttatatatatattttttcctttcaaatcagacgatgagactagaaggagaaatactttctgtcttattaaaattaataaattattggtctttacaagacttggatacattacagcagacatggaaatataattttaaaaaatttctctccaacctccttcaaattcagtcaccactgttatattaccttctccaggaaccctccagtggggaaggctgcgatattagatttccttgtatgcaaagtttttgttgaaagctgtgctcagaggaggtgagaggagaggaaggagaaaactgcatcataactttacagaattgaatctagagtcttccccgaaaagcccagaaacttctctgcagtatctggcttgtccatctggtctaaggtggctgcttcttccccagccatgagtcagtttgtgcccatgaataatacacgacctgttatttccatgactgctttactgtatttttaaggtcaatatactgtacatttgataataaaataatattctcccaaaaa

SEQ ID NO: 29872 - protein, 276 aa, Homo sapiens
MHGTQRGRGGQVDPAAHCPGAHGETHLPRPDLQSGQQLQRFYHKADGMLHISGLSSVDAGAYRCVARNAAGHTERLVSLKVGLKPEANKQYHNLVSIINGETLKLPCTPPGAGQGRFSWTLPNGMHLEGPQTLGRVSLLDNGTLTVREASVFDRGTYVCRMETEYGPSVTSIPVIVIAYPPRITSEPTPVIYTRPGNTVKLNCMAMGIPKADITWELPDKSHLKAGVQARLYGNRFLHPQGSLTIQHATQRDAGFYKCMAKNILGSDSKTTYIHVF

SEQ ID NO: 29873 - DNA, 8192 bp, Homo sapiens
agccgagctgcctcacccccggccccgggaagggcatggccccggcaaactcccggccgtgactcgcgcgccccggctcggtggatgctcccggcgcaccgctcccgtgtgcggcggcttcccaaggacaggtatccgagaatcaggcaccccgacaagatgcccaagcgcgcgcactggggggccctctccgtggtgctgatcctgctttggggccatccgcgagtggcgctggcctgcccgcatccttgtgcctgctacgtccccagcgaggtccactgcacgttccgatccctggcttccgtgcccgctggcattgctaaacacgtggaaagaatcaatttggggtttaatagcatacaggccctgtcagaaacctcatttgcaggactgaccaagttggagctacttatgattcacggcaatgagatcccaagcatccccgatggagctttaagagacctcagctctcttcaggttttcaagttcagctacaacaagctgagagtgatcacaggacagaccctccagggtctctctaacttaatgaggctgcacattgaccacaacaagatcgagtttatccaccctcaagctttcaacggcttaacgtctctgaggctactccatttggaaggaaatctcctccaccagctgcaccccagcaccttctccacgttcacatttttggattatttcagactctccaccataaggcacctctacttagcagagaacatggttagaactcttcctgccagcatgcttcggaacatgccgcttctggagaatctttacttgcagggaaatccgtggacctgcgattgtgagatgagatggtttttggaatgggatgcaaaatccagaggaattctgaagtgtaaaaaggacaaagcttatgaaggcggtcagttgtgtgcaatgtgcttcagtccaaagaagttgtacaaacatgagatacacaagctgaaggacatgacttgtctgaagccttcaatagagtcccctctgagacagaacaggagcaggagtattgaggaggagcaagaacaggaagaggatggtggcagccagctcatcctggagaaattccaactgccccagtggagcatctctttgaatatgaccgacgagcacgggaacatggtgaacttggtctgtgacatcaagaaaccaatggatgtgtacaagattcacttgaaccaaacggatcctccagatattgacataaatgcaacagttgccttggactttgagtgtccaatgacccgagaaaactatgaaaagctatggaaattgatagcatactacagtgaagttcccgtgaagctacacagagagctcatgctcagcaaagaccccagagtcagctaccagtacaggcaggatgctgatgaggaagctctttactacacaggtgtgagagcccagattcttgcagaaccagaatgggtcatgcagccatccatagatatccagctgaaccgacgtcagagtacggccaagaaggtgctactttcctactacacccagtattctcaaacaatatccaccaaagatacaaggcaggctcggggcagaagctgggtaatgattgagcctagtggagctgtgcaaagagatcagactgtcctggaagggggtccatgccagttgagctgcaacgtgaaagcttctgagagtccatctatcttctgggtgcttccagatggctccatcctgaaagcgcccatggatgacccagacagcaagttctccattctcagcagtggctggctgaggatcaagtccatggagccatctgactcaggcttgtaccagtgcattgctcaagtgagggatgaaatggaccgcatggtatatagggtacttgtgcagtctccctccactcagccagccgagaaagacacagtgacaattggcaagaacccaggggagtcggtgacattgccttgcaatgctttagcaatacccgaagcccaccttagctggattcttccaaacagaaggataattaatgatttggctaacacatcacatgtatacatgttgccaaatggaactctttccatcccaaaggtccaagtcagtgacagtggttactacagatgtgtggctgtcaaccagcaaggggcagaccattttacggtgggaatcacagtgaccaagaaagggtctggcttgccatccaaaagaggcagacgcccaggtgcaaaggctctttccagagtcagagaagacatcgtggaggatgaagggggctcgggcatgggagatgaagagaacacttcaaggagacttctgcatccaaaggaccaagaggtgttcctcaaaacaaaggatgatgccatcaatggagacaagaaagccaagaaagggagaagaaagctgaaactctggaagcattcggaaaaagaaccagagaccaatgttgcagaaggtcgcagagtgtttgaatctagacgaaggataaacatggcaaacaaacagattaatccggagcgctgggctgatattttagccaaagtccgtgggaaaaatctccctaagggcacagaagtacccccattgattaaaaccacaagtcctccatccttgagtctagaagtcacaccaccttttcctgctatttctcccccctcagcatctcctgtgcagacagtaaccagtgctgaagaatcctcagcagatgtacctctacttggtgaagaagagcacgttttgggtaccatttcctcagccagcatggggctagaacacaaccacaatggagttattcttgttgaacctgaagtaacaagcacacctctggaggaagttgttgatgacctttccgagaagactgaggagataacttccactgaaggagacctgaaggggacagcagcccctacacttatatctgagccttatgaaccatctcctactctgcacacattagacacagtctatgaaaagcccacccatgaagagacggcaacagagggttggtctgcagcagatgttggatcgtcaccagagcccacatccagtgagtatgagcctccattggatgctgtctccttggctgagtctgagcccatgcaatactttgacccagatttggagactaagtcacaaccagatgaggataagatgaaagaagacacctttgcacaccttactccaacccccaccatctgggttaatgactccagtacatcacagttatttgaggattctactataggggaaccaggtgtcccaggccaatcacatctacaaggactgacagacaacatccaccttgtgaaaagtagtctaagcactcaagacaccttactgattaaaaagggtatgaaagagatgtctcagacactacagggaggaaatatgctagagggagaccccacacactccagaagttctgagagtgagggccaagagagcaaatccatcactttgcctgactccacactgggtataatgagcagtatgtctccagttaagaagcctgcggaaaccacagttggtaccctcctagacaaagacaccacaacagcaacaacaacaccaaggcaaaaagttgctccgtcatccaccatgagcactcacccttctcgaaggagacccaacgggagaaggagattacgccccaacaaattccgccaccggcacaagcaaaccccacccacaacttttgccccatcagagactttttctactcaaccaactcaagcacctgacattaagatttcaagtcaagtggagagttctctggttcctacagcttgggtggataacacagttaatacccccaaacagttggaaatggagaagaatgcagaacccacatccaagggaacaccacggagaaaacacgggaagaggccaaacaaacatcgatataccccttctacagtgagctcaagagcgtccggatccaagcccagcccttctccagaaaataaacatagaaacattgttactcccagttcagaaactatacttttgcctagaactgtttctctgaaaactgagggcccttatgattccttagattacatgacaaccaccagaaaaatatattcatcttaccctaaagtccaagagacacttccagtcacatataaacccacatcagatggaaaagaaattaaggatgatgttgccacaaatgttgacaaacataaaagtgacattttagtcactggtgaatcaattactaatgccataccaacttctcgctccttggtctccactatgggagaatttaaggaagaatcctctcctgtaggctttccaggaactccaacctggaatccctcaaggacggcccagcctgggaggctacagacaggcatacctgttaccacttctggggaaaatcttacagaccctccccttcttaaagagcttgaggatgtggatttcacttccgagtttttgtcctctttgacagtctccacaccatttcaccaggaagaagctggttcttccacaactctctcaagcataaaagtggaggtggcttcaagtcaggcagaaaccaccacccttgatcaagatcatcttgaaaccactgtggctattctcctttctgaaactagaccacagaatcacacccctactgctgcccggatgaaggagccagcatcctcgtccccatccacaattctcatgtctttgggacaaaccaccaccactaagccagcacttcccagtccaagaatatctcaagcatctagagattccaaggaaaatgttttcttgaattatgtggggaatccagaaacagaagcaaccccagtgaacaatgaaggaacacagcatatgtcagggccaaatgaattatcaacaccctcttccgaccaggatgcatttaacttgtctacaaagctggaattggaaaagcaagtatttggtagtaggagtctaccacgtggcccagatagccaacgccaggatggaagagttcatgcttctcatcaactaaccagagtccctgccaaacccatcctaccaacagcaacagtgaggctgcctgaaatgtccacacaaagcgcttccagatactttgtaacttcccagtcacctcgtcactggaccaacaaaccggaaataactacatatccttctggggctttgccagagaacaaacagtttacaactccaagattatcaagtacaacaattcctctcccattgcacatgtccaaacccagcattcctagtaagtttactgaccgaagaactgaccaattcaatggctactccaaagtgtttggaaataacaacatccctgaggcaagaaacccagttggaaagcctcccagtccaagaattcctcattattccaatggaagactccctttctttaccaacaagactctttcttttccacagttgggagtcacccggagaccccagatacccacttctcctgccccagtaatgagagagagaaaagttattccaggttcctacaacaggatacattcccatagcaccttccatctggactttggccctccggcacctccgttgttgcacactccgcagaccacgggatcaccctcaactaacttacagaatatccctatggtctcttccacccagagttctatctcctttataacatcttctgtccagtcctcaggaagcttccaccagagcagctcaaagttctttgcaggaggacctcctgcatccaaattctggtctcttggggaaaagccacaaatcctcaccaagtccccacagactgtgtccgtcaccgctgagacagacactgtgttcccctgtgaggcaacaggaaaaccaaagcctttcgttacttggacaaaggtttccacaggagctcttatgactccgaataccaggatacaacggtttgaggttctcaagaacggtaccttagtgatacggaaggttcaagtacaagatcgaggccagtatatgtgcaccgccagcaacctgcacggcctggacaggatggtggtcttgctttcggtcaccgtgcagcaacctcaaatcctagcctcccactaccaggacgtcactgtctacctgggagacaccattgcaatggagtgtctggccaaagggaccccagccccccaaatttcctggatcttccctgacaggagggtgtggcaaactgtgtcccccgtggagggccgcatcaccctgcacgaaaaccggaccctttccatcaaggaggcgtccttctcagacagaggcgtctataagtgcgtggccagcaatgcagccggggcggacagcctggccatccgcctgcacgtggcggcactgccccccgttatccaccaggagaagctggagaacatctcgctgcccccggggctcagcattcacattcactgcactgccaaggctgcgcccctgcccagcgtgcgctgggtgctcggggacggtacccagatccgcccctcgcagttcctccacgggaacttgtttgttttccccaacgggacgctctacatccgcaacctcgcgcccaaggacagcgggcgctatgagtgcgtggccgccaacctggtaggctccgcgcgcaggacggtgcagctgaacgtgcagcgtgcagcagccaacgcgcgcatcacgggcacctccccgcggaggacggacgtcaggtacggaggaaccctcaagctggactgcagcgcctcgggggacccctggccgcgcatcctctggaggctgccgtccaagaggatgatcgacgcgctcttcagttttgatagcagaatcaaggtgtttgccaatgggaccctggtggtgaaatcagtgacggacaaagatgccggagattacctgtgcgtagctcgaaataaggttggtgatgactacgtggtgctcaaagtggatgtggtgatgaaaccggccaagattgaacacaaggaggagaacgaccacaaagtcttctacgggggtgacctgaaagtggactgtgtggccaccgggcttcccaatcccgagatctcctggagcctcccagacgggagtctggtgaactccttcatgcagtcggatgacagcggtggacgcaccaagcgctatgtcgtcttcaacaatgggacactctactttaacgaagtggggatgagggaggaaggagactacacctgctttgctgaaaatcaggtcgggaaggacgagatgagagtcagagtcaaggtggtgacagcgcccgccaccatccggaacaagacttacttggcggttcaggtgccctatggagacgtggtcactgtagcctgtgaggccaaaggagaacccatgcccaaggtgacttggttgtccccaaccaacaaggtgatccccacctcctctgagaagtatcagatataccaagatggcactctccttattcagaaagcccagcgttctgacagcggcaactacacctgcttggtcaggaacagcgcgggagaggataggaagacggtgtggattcacgtcaacgtccagccacccaagatcaacggtaaccccaaccccatcaccactgtgcgggagatagcagccgggggcagtcggaaactgattgactgcaaagctgaaggcatccccaccccgagggtgttatgggcttttcccgagggtgtggttctgccagctccatactatggaaaccggatcactgtccatggcaacggttccctggacatcaggagtttgaggaagagcgactccgtccagctggtatgcatggcacgcaacgagggaggggaggccaggttgatcctgcagctcactgtcctggagcccatggagaaacccatcttccacgacccgatcagcgagaagatcacggccatggcgggccacaccatcagcctcaactgctctgccgcggggaccccgacacccagcctggtgtgggtccttcccaatggcaccgatctgcagagtggacagcagctgcagcgcttctaccacaaggctgacggcatgctacacattagcggtctctcctcggtggacgccggggcctaccgctgcgtggcccgcaatgccgctggccacacggagaggctggtctccctgaaggtgggactgaagccagaagcaaacaagcagtatcataacctggtcagcatcatcaatggtgagaccctgaagctcccctgcacccctcccggggctgggcagggacgtttctcctggacgctccccaatggcatgca

SEQ ID NO: 29874 - protein, 2853 aa, Homo sapiens
MLPAHRSRVRRLPKDRYPRIRHPDKMPKRAHWGALSVVLILLWGHPRVALACPHPCACYVPSEVHCTFRSLASVPAGIAKHVERINLGFNSIQALSETSFAGLTKLELLMIHGNEIPSIPDGALRDLSSLQVFKFSYNKLRVITGQTLQGLSNLMRLHIDHNKIEFIHPQAFNGLTSLRLLHLEGNLLHQLHPSTFSTFTFLDYFRLSTIRHLYLAENMVRTLPASMLRNMPLLENLYLQGNPWTCDCEMRWFLEWDAKSRGILKCKKDKAYEGGQLCAMCFSPKKLYKHEIHKLKDMTCLKPSIESPLRQNRSRSIEEEQEQEEDGGSQLILEKFQLPQWSISLNMTDEHGNMVNLVCDIKKPMDVYKIHLNQTDPPDIDINATVALDFECPMTRENYEKLWKLIAYYSEVPVKLHRELMLSKDPRVSYQYRQDADEEALYYTGVRAQILAEPEWVMQPSIDIQLNRRQSTAKKVLLSYYTQYSQTISTKDTRQARGRSWVMIEPSGAVQRDQTVLEGGPCQLSCNVKASESPSIFWVLPDGSILKAPMDDPDSKFSILSSGWLRIKSMEPSDSGLYQCIAQVRDEMDRMVYRVLVQSPSTQPAEKDTVTIGKNPGESVTLPCNALAIPEAHLSWILPNRRIINDLANTSHVYMLPNGTLSIPKVQVSDSGYYRCVAVNQQGADHFTVGITVTKKGSGLPSKRGRRPGAKALSRVREDIVEDEGGSGMGDEENTSRRLLHPKDQEVFLKTKDDAINGDKKAKKGRRKLKLWKHSEKEPETNVAEGRRVFESRRRINMANKQINPERWADILAKVRGKNLPKGTEVPPLIKTTSPPSLSLEVTPPFPAISPPSASPVQTVTSAEESSADVPLLGEEEHVLGTISSASMGLEHNHNGVILVEPEVTSTPLEEVVDDLSEKTEEITSTEGDLKGTAAPTLISEPYEPSPTLHTLDTVYEKPTHEETATEGWSAADVGSSPEPTSSEYEPPLDAVSLAESEPMQYFDPDLETKSQPDEDKMKEDTFAHLTPTPTIWVNDSSTSQLFEDSTIGEPGVPGQSHLQGLTDNIHLVKSSLSTQDTLLIKKGMKEMSQTLQGGNMLEGDPTHSRSSESEGQESKSITLPDSTLGIMSSMSPVKKPAETTVGTLLDKDTTTATTTPRQKVAPSSTMSTHPSRRRPNGRRRLRPNKFRHRHKQTPPTTFAPSETFSTQPTQAPDIKISSQVESSLVPTAWVDNTVNTPKQLEMEKNAEPTSKGTPRRKHGKRPNKHRYTPSTVSSRASGSKPSPSPENKHRNIVTPSSETILLPRTVSLKTEGPYDSLDYMTTTRKIYSSYPKVQETLPVTYKPTSDGKEIKDDVATNVDKHKSDILVTGESITNAIPTSRSLVSTMGEFKEESSPVGFPGTPTWNPSRTAQPGRLQTGIPVTTSGENLTDPPLLKELEDVDFTSEFLSSLTVSTPFHQEEAGSSTTLSSIKVEVASSQAETTTLDQDHLETTVAILLSETRPQNHTPTAARMKEPASSSPSTILMSLGQTTTTKPALPSPRISQASRDSKENVFLNYVGNPETEATPVNNEGTQHMSGPNELSTPSSDQDAFNLSTKLELEKQVFGSRSLPRGPDSQRQDGRVHASHQLTRVPAKPILPTATVRLPEMSTQSASRYFVTSQSPRHWTNKPEITTYPSGALPENKQFTTPRLSSTTIPLPLHMSKPSIPSKFTDRRTDQFNGYSKVFGNNNIPEARNPVGKPPSPRIPHYSNGRLPFFTNKTLSFPQLGVTRRPQIPTSPAPVMRERKVIPGSYNRIHSHSTFHLDFGPPAPPLLHTPQTTGSPSTNLQNIPMVSSTQSSISFITSSVQSSGSFHQSSSKFFAGGPPASKFWSLGEKPQILTKSPQTVSVTAETDTVFPCEATGKPKPFVTWTKVSTGALMTPNTRIQRFEVLKNGTLVIRKVQVQDRGQYMCTASNLHGLDRMVVLLSVTVQQPQILASHYQDVTVYLGDTIAMECLAKGTPAPQISWIFPDRRVWQTVSPVEGRITLHENRTLSIKEASFSDRGVYKCVASNAAGADSLAIRLHVAALPPVIHQEKLENISLPPGLSIHIHCTAKAAPLPSVRWVLGDGTQIRPSQFLHGNLFVFPNGTLYIRNLAPKDSGRYECVAANLVGSARRTVQLNVQRAAANARITGTSPRRTDVRYGGTLKLDCSASGDPWPRILWRLPSKRMIDALFSFDSRIKVFANGTLVVKSVTDKDAGDYLCVARNKVGDDYVVLKVDVVMKPAKIEHKEENDHKVFYGGDLKVDCVATGLPNPEISWSLPDGSLVNSFMQSDDSGGRTKRYVVFNNGTLYFNEVGMREEGDYTCFAENQVGKDEMRVRVKVVTAPATIRNKTYLAVQVPYGDVVTVACEAKGEPMPKVTWLSPTNKVIPTSSEKYQIYQDGTLLIQKAQRSDSGNYTCLVRNSAGEDRKTVWIHVNVQPPKINGNPNPITTVREIAAGGSRKLIDCKAEGIPTPRVLWAFPEGVVLPAPYYGNRITVHGNGSLDIRSLRKSDSVQLVCMARNEGGEARLILQLTVLEPMEKPIFHDPISEKITAMAGHTISLNCSAAGTPTPSLVWVLPNGTDLQSGQQLQRFYHKADGMLHISGLSSVDAGAYRCVARNAAGHTERLVSLKVGLKPEANKQYHNLVSIINGETLKLPCTPPGAGQGRFSWTLPNGMHLEGPQTLGRVSLLDNGTLTVREASVFDRGTYVCRMETEYGPSVTSIPVIVIAYPPRITSEPTPVIYTRPGNTVKLNCMAMGIPKADITWELPDKSHLKAGVQARLYGNRFLHPQGSLTIQHATQRDAGFYKCMAKNILGSDSKTTYIHVF

SEQ ID NO: 29875 - DNA, 2370 bp, Homo sapiens
agccgagctgcctcacccccggccccgggaagggcatggccccggcaaactcccggccgtgactcgcgcgccccggctcggtggatgctcccggcgcaccgctcccgtgtgcggcggcttcccaaggacaggtatccgagaatcaggcaccccgacaagatgcccaagcgcgcgcactggggggccctctccgtggtgctgatcctgctttggggccatccgcgagtggcgctggcctgcccgcatccttgtgcctgctacgtccccagcgaggtccactgcacgttccgatccctggcttccgtgcccgctggcattgctaaacacgtggaaagaatcaatttggggtttaatagcatacaggccctgtcagaaacctcatttgcaggactgaccaagttggagctacttatgattcacggcaatgagatcccaagcatccccgatggagctttaagagacctcagctctcttcaggttttcaagttcagctacaacaagctgagagtgatcacaggacagaccctccagggtctctctaacttaatgaggctgcacattgaccacaacaagatcgagtttatccaccctcaagctttcaacggcttaacgtctctgaggctactccatttggaaggaaatctcctccaccagctgcaccccagcaccttctccacgttcacatttttggattatttcagactctccaccataaggcacctctacttagcagagaacatggttagaactcttcctgccagcatgcttcggaacatgccgcttctggagaatctttacttgcagggaaatccgtggacctgcgattgtgagatgagatggtttttggaatgggatgcaaaatccagaggaattctgaagtgtaaaaaggacaaagcttatgaaggcggtcagttgtgtgcaatgtgcttcagtccaaagaagttgtacaaacatgagatacacaagctgaaggacatgacttgtctgaagccttcaatagagtcccctctgagacagaacaggagcaggagtattgaggaggagcaagaacaggaagaggatggtggcagccagctcatcctggagaaattccaactgccccagtggagcatctctttgaatatgaccgacgagcacgggaacatggtgaacttggtctgtgacatcaagaaaccaatggatgtgtacaagattcacttgaaccaaacggatcctccagatattgacataaatgcaacagttgccttggactttgagtgtccaatgacccgagaaaactatgaaaagctatggaaattgatagcatactacagtgaagttcccgtgaagctacacagagagctcatgctcagcaaagaccccagagtcagctaccagtacaggcaggatgctgatgaggaagctctttactacacaggtgtgagagcccagattcttgcagaaccagaatgggtcatgcagccatccatagatatccagctgaaccgacgtcagagtacggccaagaaggtgctactttcctactacacccagtattctcaaacaatatccaccaaagatacaaggcaggctcggggcagaagctgggtaatgattgagcctagtggagctgtgcaaagagatcagactgtcctggaagggggtccatgccagttgagctgcaacgtgaaagcttctgagagtccatctatcttctgggtgcttccagatggctccatcctgaaagcgcccatggatgacccagacagcaagttctccattctcagcagtggctggctgaggatcaagtccatggagccatctgactcaggcttgtaccagtgcattgctcaagtgagggatgaaatggaccgcatggtatatagggtacttgtgcagtctccctccactcagccagccgagaaagacacagtgacaattggcaagaacccaggggagtcggtgacattgccttgcaatgctttagcaatacccgaagcccaccttagctggattcttccaaacagaaggataattaatgatttggctaacacatcacatgtatacatgttgccaaatggaactctttccatcccaaaggtccaagtcagtgacagtggttactacagatgtgtggctgtcaaccagcaaggggcagaccattttacggtgggaatcacagtgaccaagaaagggtctggcttgccatccaaaagaggcagacgcccaggtgcaaaggctctttccagagtcagagaagacatcgtggaggatgaagggggctcgggcatgggagatgaagagaacacttcaaggagacttctgcatccaaaggaccaagaggtgttcctcaaaacaaaggatgatgccatcaatggagacaagaaagcc

SEQ ID NO: 29876 - protein, 761 aa, Homo sapiens
MLPAHRSRVRRLPKDRYPRIRHPDKMPKRAHWGALSVVLILLWGHPRVALACPHPCACYVPSEVHCTFRSLASVPAGIAKHVERINLGFNSIQALSETSFAGLTKLELLMIHGNEIPSIPDGALRDLSSLQVFKFSYNKLRVITGQTLQGLSNLMRLHIDHNKIEFIHPQAFNGLTSLRLLHLEGNLLHQLHPSTFSTFTFLDYFRLSTIRHLYLAENMVRTLPASMLRNMPLLENLYLQGNPWTCDCEMRWFLEWDAKSRGILKCKKDKAYEGGQLCAMCFSPKKLYKHEIHKLKDMTCLKPSIESPLRQNRSRSIEEEQEQEEDGGSQLILEKFQLPQWSISLNMTDEHGNMVNLVCDIKKPMDVYKIHLNQTDPPDIDINATVALDFECPMTRENYEKLWKLIAYYSEVPVKLHRELMLSKDPRVSYQYRQDADEEALYYTGVRAQILAEPEWVMQPSIDIQLNRRQSTAKKVLLSYYTQYSQTISTKDTRQARGRSWVMIEPSGAVQRDQTVLEGGPCQLSCNVKASESPSIFWVLPDGSILKAPMDDPDSKFSILSSGWLRIKSMEPSDSGLYQCIAQVRDEMDRMVYRVLVQSPSTQPAEKDTVTIGKNPGESVTLPCNALAIPEAHLSWILPNRRIINDLANTSHVYMLPNGTLSIPKVQVSDSGYYRCVAVNQQGADHFTVGITVTKKGSGLPSKRGRRPGAKALSRVREDIVEDEGGSGMGDEENTSRRLLHPKDQEVFLKTKDDAINGDKK

SEQ ID NO: 29877 - DNA, 349 bp, Homo sapiens
cccactagatgggattgtctagttgcaggaaaacaagctcagggctcccactgattccacatgatgatgtgcctgcgtccccattcgccttctgctctgccatgattgtaagtttcctgaggcctccccagccatgcttcctaaacagcctgcagaacttgagacgtcttcagtgtcaaagcagtaccagcatattctcctcacggaatatttggagagaagccaattcctgttcgaggagcagctgcaactaaggacgtgacatggcttaccgtcaatgcttaccagatgctatgatacagcatctatgtttctgtcatgtgatacaggaaacatccacagactcctt

SEQ ID NO: 29878 - protein, 81 aa, Homo sapiens [sequence omitted]

SEQ ID NO: 29879 - DNA, 433 bp, Homo sapiens
actacagtctctctctcctgctcctttatatgaagatgtgcctgcgtccccattcgccttctgctctgccatgattgtaagtttcctgaggcctccccagccatgcttcctaaacagcctgcagaacttgttgctttccagtccacacttcaaacccgagagtatttacaagcatggggaatagagacctaaaatgaagattctgcactcgtgcaaatctattctcaaaaagagcacgtgtctttgagcctgtctgtgttgccggttgactgtgacagttccctgaatcttcctgtggaacgcaaggctcatcgaaagacaacaaatatcttgatgctctcatatacaatattattattaaaacgcaaaagcagctgtatcattttgcaataatatcagctttgtactttgtaaataaagttgtgaagaatga

SEQ ID NO: 29880 - protein, 37 aa, Homo sapiens
MIVSFLRPPQPCFLNSLQNLLLSSPHFKPESIYKHGE

SEQ ID NO: 29881 - DNA, 600 bp, Homo sapiens
tcctggaggctggaagcccaagatcaaggtgtcgacaaggctcgtgcttcctgaggcctctctccctggcttgtagaacccatcttctccctgtgtcctcacacagttgtccctctaaacccatgctatggacagccctatggaaaaagcaacctggagaagaattttagcctcccaagcatcaccatagttgtcctttggaagaagatcatccagctcaagttcagtctcaaatgactgcacccccagctgacaactggactgcaccagaatcaatcacctgaactgctcaccaagtcccaacctaaagaagacatgagaaggtcacttgagggtcatgaaaaaatttgcagaaggaatgaatgccttgaaggacgttgcgaccagctgctgatacccaggaatctggttgctcaagatgttacctgagaataaagaaacgcagacttttccccctcacttccctgaaactgcctctcctttactccttagctacctaaaaactcactgcttcctctttttgttaagatggatttgagacatcttgctctcccaacttcttgctttgaccaaattgaataaatcttgtttgatctccaa

SEQ ID NO: 29882 - protein, 37 aa, Homo sapiens
MRRSLEGHEKICRRNECLEGRCDQLLIPRNLVAQDVT

SEQ ID NO: 29883 - DNA, 447 bp, Homo sapiens
gagattggagagaagcaactgtaagccaaggaacaccaaagactgcaggaaaagatcatccagctcaagttcagtctcaaatgactgcacccccagctgacaactggactgcaccagaatcaatcacctgaactgctcaccaagtcccaacctaaagaagacatgagaaggtcacttgagggtcatgaaaaaatttgcagaaggaatgaatgccttgaaggacgttgcgaccagctgctgatacccaggaatctggttgctcaagatgttacctgagaataaagaaacgcagacttttccccctcacttccctgaaactgcctctcctttactccttagctacctaaaaactcactgcttcctctttttgttaagatggatttgagacatcttgctctcccaacttcttgctttgaccaaattgaataaatcttgtttgatctccaa

SEQ ID NO: 29884 - protein, 37 aa, Homo sapiens; identical to SEQ ID NO: 29882

SEQ ID NO: 29885 - DNA, 860 bp, Homo sapiens
aataaaactactgtctcccacacagccggctctgcatgaattgctctttattgcaattcccctgtcttgagaaatcgcttctgtctaggcagcgggcaaggtgagcccattgggcagttacaaggagacacggagacacagagacacaaagacagacacacaaaaaagagactgtcatgtgaaaagacagacacacagagagaacatcgtaagaagacagaggaggagattggagagaagcaactgtaagccaaggaacaccaaagactgcaggaaaccccaaaaactaggaacagggcatggaacagattctacccatattctcaggaagagtccctgccaacacctggaattcaagcttctggattccagatctaaacccatgctatggacagccctatggaaaaagcaacctggagaagaattttagcctcccaagcatcaccatagttgtcctttggaagaagatcatccagctcaagttcagtctcaaatgactgcacccccagctgacaactggactgcaccagaatcaatcacctgaactgctcaccaagtcccaacctaaagaagacatgagaaggtcacttgagggtcatgaaaaaatttgcagaaggaatgaatgccttgaaggacgttgcgaccagctgctgatacccaggaatctggttgctcaagatgttacctgagaataaagaaacgcagacttttccccctcacttccctgaaactgcctctcctttactccttagctacctaaaaactcactgcttcctctttttgttaagatggatttgagacatcttgctctcccaacttcttgctttgaccaaattgaataaatcttgtttgatctccaa

SEQ ID NO: 29886 - protein, 65 aa, Homo sapiens
MEQILPIFSGRVPANTWNSSFWIPDLNPCYGQPYGKSNLEKNFSLPSITIVVLWKKIIQLKFSLK

SEQ ID NO: 29887 - DNA, 1131 bp, Homo sapiens
attattcttaaaaatcctgatccctgaatgctcagggagactgatttgagtaataataaaactactgtctcccacacagccggctctgcatgaattgctctttattgcaattcccctgtcttgagaaatcgcttctgtctaggcagcgggcaaggtgagcccattgggcagttacaaggagacacggagacacagagacacaaagacagacacacaaaaaagagactgtcatgtgaaaagacagacacacagagagaacatcgtaagaagacagaggaggagattggagagaagcaactgtaagccaaggaacaccaaagactgcaggaaaccccaaaaactaggaacagggcatggaacagattctacccatattctcaggaagagtccctgccaacacctggaattcaagcttctggattccagatctaaaaaacctgggcttagataatgattacgccaaaccactggattcaagaaaaagctcgtcatgcccaactattgcatgacagtatgtgagagccaaccgactaaagatattttaggagaataaaatatttggagagcattggagtaaggactgtcattcctggaatggaagcatttaattaaaatgaccataagcctgaagtgactggggcatgggaatatccttgatgagaagatagtgaagcatgtaacaccctgggatagatggtgctgatggaacattttgaggagacccaagttgttggtggaggtgatgggagactcaggacaacagaaagtatgggattttcaatgctgcagaaatggggctgatatggtttggctctgtccccacccaaatatcaccttgaactgtagctcccataattcccatgtgtggtgggagggacccagtgggaggtaattgaatcatgggggctggtttctcccatgctattctcatgatagtgagtaagtctcacgagatctgatggttttataaaggggagtttccctacacaaattctgtcttgcctgctgccatgtaagacgtgactttgctccttattcaccttctgctgcgattgtgatgccacccccagccatgagtgagccaaactcactgttactgtgagtcaattaaacctctttcctttataaatt

SEQ ID NO: 29888 - protein, 51 aa, Homo sapiens
MEQILPIFSGRVPANTWNSSFWIPDLKNLGLDNDYAKPLDSRKSSSCPTIA

SEQ ID NO: 29889 - DNA, 995 bp, Homo sapiens
atgtggatgctgggagaagtatgtgagatggaaaagttgtttcatggcatccaagaagtgaatgatcctcaaggtgtagcagaggaatctgtaggagagagggatgattgacgtcttcgtatagccctccatccatcccagttagcatggagggattttagggctaccattggctgggtagtggagtgttgaccaatcacagctcaggggcgtgattgtctcgtcctgggatcgcgagaggggtatatacagggaggccaggcagcctggagttagtcgaccgttgcgagacgttgagctgcggaagatgagtccaaagccgagagcctcgggacctccggccaaggccacggaggcaggaaagaggaagtcctcctctcagccgagccccagtgacccgaagaagaagactaccaaggtggccaagaagggaaaagcagttcgtagagggagacgcgggaagaaaggggctgcgacaaagatggcggccgtgacggcacctgaggcggagagcgggccagcggcacccggccccagcgaccagcccagccaggagctccctcagcacgagctgccgccggaggagccagtgagcgaggggacccagcacgaccccctgagtcaggagagcgagctggaggaaccactgagtcaggagagcgaggtggaagaaccactgagtcaggagagccaggtggaggaaccactgagtcaggagagcgaggtggaagaaccactgagtcaggagagccaggtggaggaaccactgagtcaggagagcgaggtggaggaaccactgagtcaggagagccaggtggaggaaccactgagtcaggagagcgagatggaagaactaccgagtgtgtagacggccagctactcccctatctccgagagcagcgactaagttcaggcccagccgccagacctcagagatctcaccagcggggtgcttgccattctgaagataataaaatgaatgtgttgcaaattga

SEQ ID NO: 29890 - protein, 186 aa, Homo sapiens; identical to SEQ ID NO: 5298

SEQ ID NO: 29891 - DNA, 1715 bp, Homo sapiens
gttgctgagaagcactccacaagcacacactctcgttattccactccacacaactgtgaaggagggaggaagaggaaggatgaagaaaaggaagaaggaggaagaagggaggaaggaggaagcaggaaggaggaaggaggaagaagaaggcaggaaggaggaaggaggaagaagaaggcaggaaggaggaagaaggaagcaggaagaaggaaggaggaagaaggaaaaaggaaggaggaagaaggaaaagggaggtagaaagaaagaggaaggaagaagaaacaggaaagaggaagaaggaaggaggaagaaggaaggaggaaagaggatgaagaaaaataaaagcggaaggaggaagaaggaagcaggaaggagggagaaggaaggaggaagaaggaaagatggaggaggaagaaggaagtaggaagaaggaagatggaaggaagaaaaaagaagaaggaagtaggaaggagggaggaggaagaaggaagtaaggaggaaaaaggaagaatgaaggaggaagaaggcagtagaaaggaggaaggagggagagggaagtaggaaagaaaatggaggaagaggaagtaggaagaatgcaggaggaatcagggaaaaggaagaaggaagtaggaagaagaaaaaaggaagacaggaggaagtagaaaggaggaagaagttaggaggaagaagggggaaaaaggaagaagaagacgaaggaggaggacacactttttacacaaagttctgctaatttaacccttatgtgaaacagttaaatagcaactcctagtgagacagcaggcggaaagatttgaaggaaaactgttgctgccacaagggaagtttgatggcaggacttggagtgtgtatgcatgatgtactaattgaagcattagtacagtttctttgggggggtgtcagatgagtgtagaggaaccccctactctccacctttgcctagggcaatgtctgcatcagagattggtgccaacgtaataatcagcctcacagaaagttggattcagagtctggaaagatggaagatacaatctttacagcctatggatagaccctcctttccaaacttcagcgtttggaatcttagtacaatttctataccaaaggtgcttgccaaatgaaactctggatttacaacaaattgtgttttgaaaaatactgtatttgccaggcgcgcagcggctcatgcctgtaatcccagcactttgggaagccaaggcgggtggattacgaggtcaggagttcaaaaccagcctgaccaatatggtgaaaccccttctctactaaaaatacaaaaattaccgtggtggcaggcgcctgtaatcccagctacttgggaggctgaggcaggagaatcgcttgaacccacagggcagaggtcacagtgagccaagatcgtgacactgcactccagcctgggcgacagagtgaggctccgtcagagagagagagagacagagagaaagaaatatttaaattgctccagttcaaataagccggtaataagccaaaccacctgtctcatagagagctggagagagagaagggtcagcaagggaaatgataaaataaacaaatcactgctatgaaaatttatatggctcaccccgcctctgaaatgagagttcaaaatagaaatgcttgctccttaacacgggttatcataacgagatgcatttaatacatgagtttgctgg

SEQ ID NO: 29892 - protein, 114 aa, Homo sapiens [sequence omitted]

SEQ ID NO: 29893 - DNA, 4321 bp, Homo sapiens
tcctttgtccgctctctgatggcgccggctccctgcccagcgctgagtcgggtccggccgccagccccgcgctcgcagacctcggctgccgggtgtggcgcggggactggggaacgctggcccgtgcccagtgcggttggagcctgtcccgcgcgtccccgggacgcgcttcttcccgcctccgcccgcgccagcgcccgcacccggatccccacttctcccggccctcgggagccaggagagccctgagatggcgttggcggaagtgaagccccgagcgggggtctgcgaggctggtgatcagcgccggtaacatggcctttctgtcctctccccggtcccagtgcaccccttaaacaacgacccccgcgttttccccgtactagatggttagggcgcatagtgccgaactacgctgctgctacagaatagcttttttgggggcaacataaaaaagaattgtatgtatggtttatatacaacaaaatgtcccattttcagtgtgcaaatcgacgggatttgacaaattatacactcctgtaaccattatcccaaagtgaacattgaccatttccttcaccctgcaaagttccctggtacctcctttctgtcaatccaccccaggccccgcactcaaccccggttctgattgttatcatagcttagctttgactgttctagaacttcatagaacaagatcatcagattatatctgggtgttggcacccagccactattctgccaatgaagtacatcctggtcacgggtggggtcatctcaggcattggtaaagggatcattgccagcagcattggaacgattctaaaatcatgtggactccgagttactgccataaaaatcgacccctatattaacatcgatgctggcactttttcaccttatgaacacggtgaagtcttcgtcttaaatgatggtggagaagttgatttagaccttggaaattatgaaagatttttggatattaatctttataaagacaacaatatcaccacggggaagatatatcagcatgtgatcaataaagagaggcgtggtgattacctggggaaaacagtgcaagttgtccctcacattactgatgctgtccaggagtgggttatgaatcaagccaaggtgccggtggatggtaataaggaagagccccaaatatgcgttattgagctgggaggcaccattggagacatcgaaggaatgccgtttgtggaggcgtttagacaattccagtttaaggcgaaaagagagaatttctgtaatatccacgttagccttgtcccacagctcagtgctaccggagaacaaaaaaccaaacccacccaaaacagcgtccgcgcactgaggggtttaggcctgtctccagatctgattgtctgccgaagttcaacgcccattgagatggccgtgaaggagaagatttctatgttttgtcacgtgaaccctgaacaggtcatatgtatccatgatgtttcttccacataccgagttcctgtgcttttagaggaacaaagcattgtgaaatattttaaggagagattgcacctgcccatcggtgattctgcaagtaatttgctttttaagtggagaaatatggctgacaggtatgaaaggttacagaaaatatgctccatagccctggttggcaaatacaccaagctcagagactgctacgcctctgtgttcaaagccctggaacactcagccctggccatcaaccacaagttgaatctgatgtacatagactccattgatctggagaagatcactgaaaccgaggaccctgtgaaatttcatgaagcttggcagaagctatgcaaagctgatggtattcttgtgcctggaggctttggaatcagaggaacattgggaaaactccaggcgatttcttgggcaaggacaaagaagattccttttctgggagtttgtcttgggatgcaactagcagtgatagagtttgcaagaaactgccttaacttgaaagatgctgattccacagagtttaggccaaatgccccagttcctctggtgattgatatgcccgagcacaaccctggcaatttgggaggaacaatgagactgggaataagaagaactgttttcaaaactgaaaattcaatattaaggaaactttatggtgatgttccttttatagaagaaagacacagacatcggttcgaggtaaaccctaacctgatcaaacaatttgagcagaatgacttaagttttgtaggtcaggatgttgatggagacaggatggaaatcattgaactggcaaatcatccttattttgttggtgtccagttccatcctgagttttcttctaggccgatgaagccttcccctccgtatctggggctgttacttgcagcaactgggaacctgaatgcctacttgcaacagggttgcaaactgtcttccagtgatagatacagtgatgccagtgatgacagcttttcagagccaaggatagctgagttggaaataagctgaaatgaatacatgactgggaataatggggactgcctgtgaggcctctgaaataattgaaggcaagatgaaggaactatctgaagaaatcactacactcttagagaatccctctgttctccagcaaacatgggatgtaaagcctcacagggaatctgataatacatacttctgtcaaccagaaccagaggggtagttttcttttccctccagaggcagcctttggtacttaaaatatctgtagctgattaaatttttcccaacaacctcactggggagaaagtgtgttcatgttttgtccagcggatcaggatgttaggatgacgagcaagagtccaggtcactgtgcctttgctgtgttgtatggaaaggatggcagggaacatgctgtaagtaattttgagtaagaaaatgagtcactgtgttacctggaactcagccacagatttgtgtgtggtccaagatcattgcagtttctcaccctgtttatttcctggtaaaagtaaaattgaataggtccaagacttgggggtggcaagtaaggctttgcctcaggcacaaaatttaagggggctccaaaaaactcaggaatcaagatcagcaatacagtctgagtatcccttatgtgaaatgcttggggctagaagtgttttgaatttcagattttggaatatttgcatatacatgcgatatcttggggatgagactcaagactaaacatgaaattcatttatgcttcatatacaccttatatacatagcctaaaggtaatttgatacaatattttaaataattttgtgcatgaaacaaagtttcgactgcattttgactgtgatttctggcatgagatcagttatggaattttccacttctagcgtcatgttggcattcagaaattttgaaattttggagcattttggattttcagattagggatgctcaacctgtatatatattttttaatcgacgtgaaattcacgtaacatagaattaaccattttgaagtgaacaatttggttgcattcactgatgttgagcaaccaccacctttaactatttccaaaacattttcatcactccaaaataaatgcctgtacacactagcagtcactccctatcttcccctccacctgtccgctggcaaccactgatctcctttttatttctgtggctttttctattctggatatttcatataagtggaattacacaatatatgtggtcttttgtgtctggcttcttctgagacagtaggaaggggggcttggctttggctcacccccactagagcattttttcatgcattcccactgatcacaaaacccatactactacctcattgacaccatacctgctaacctcgaggctttagtcatacaaagaaaatggcctttctgtattgttcttctgtgctctcataatgcttaaccatgtcttttacttaaacaattccaggaactggccttaggagatccaaatagggaaccaagattgcagagtgtcccatcttgggagggaatgctgaataattaattgatttacagccttgttgccgctggccagaccaccaggtggcccattactcgagatgatcatcacaaccagatgatgctaacctatatcctctacccttcgcgtgctttgtctgggaagtcttttggccccatgtcagtttctattgcattgagagcccaagagcccctggtcagtcaggcttccatttagcatggcgtttgcaaggtttacccatgttgtagcatgtgtcagaatttcattcctttctatggctgaataaaattccattgtatgaatataccac

SEQ ID NO: 29894 - protein, 586 aa, Homo sapiens; identical to SEQ ID NO: 4121

SEQ ID NO: 29895 - DNA, 3951 bp, Homo sapiens
agtgcgtccagagcggagggtgacgggagctgcctgtgctggaggaatcactttttaggcgcttgttttggaccattgcacaaacccgggtgcaaaccccaagctcaccagcgtgagtgagctgggccagcagcagggaggagaggggaaggtgggcgaggagggcgccgcgcaccccgaggcccgtgtgggcggtgggaagatcccgggggcggctttggacagccccggcagcgaccccttccccagcccgacaggtgagcgccaggccagccgcggggtggagcccgccgtgcccaccggccaccctccccggtgctaccaccaccgcgcagattatatctgggtgttggcacccagccactattctgccaatgaagtacatcctggtcacgggtggggtcatctcaggcattggtaaagggatcattgccagcagcattggaacgattctaaaatcatgtggactccgagttactgccataaaaatcgacccctatattaacatcgatgctggcactttttcaccttatgaacacggtgaagtcttcgtcttaaatgatggtggagaagttgatttagaccttggaaattatgaaagatttttggatattaatctttataaagacaacaatatcaccacggggaagatatatcagcatgtgatcaataaagagaggcgtggtgattacctggggaaaacagtgcaagttgtccctcacattactgatgctgtccaggagtgggttatgaatcaagccaaggtgccggtggatggtaataaggaagagccccaaatatgcgttattgagctgggaggcaccattggagacatcgaaggaatgccgtttgtggaggcgtttagacaattccagtttaaggcgaaaagagagaatttctgtaatatccacgttagccttgtcccacagctcagtgctaccggagaacaaaaaaccaaacccacccaaaacagcgtccgcgcactgaggggtttaggcctgtctccagatctgattgtctgccgaagttcaacgcccattgagatggccgtgaaggagaagatttctatgttttgtcacgtgaaccctgaacaggtcatatgtatccatgatgtttcttccacataccgagttcctgtgcttttagaggaacaaagcattgtgaaatattttaaggagagattgcacctgcccatcggtgattctgcaagtaatttgctttttaagtggagaaatatggctgacaggtatgaaaggttacagaaaatatgctccatagccctggttggcaaatacaccaagctcagagactgctacgcctctgtgttcaaagccctggaacactcagccctggccatcaaccacaagttgaatctgatgtacatagactccattgatctggagaagatcactgaaaccgaggaccctgtgaaatttcatgaagcttggcagaagctatgcaaagctgatggtattcttgtgcctggaggctttggaatcagaggaacattgggaaaactccaggcgatttcttgggcaaggacaaagaagattccttttctgggagtttgtcttgggatgcaactagcagtgatagagtttgcaagaaactgccttaacttgaaagatgctgattccacagagtttaggccaaatgccccagttcctctggtgattgatatgcccgagcacaaccctggcaatttgggaggaacaatgagactgggaataagaagaactgttttcaaaactgaaaattcaatattaaggaaactttatggtgatgttccttttatagaagaaagacacagacatcggttcgaggtaaaccctaacctgatcaaacaatttgagcagaatgacttaagttttgtaggtcaggatgttgatggagacaggatggaaatcattgaactggcaaatcatccttattttgttggtgtccagttccatcctgagttttcttctaggccgatgaagccttcccctccgtatctggggctgttacttgcagcaactgggaacctgaatgcctacttgcaacagggttgcaaactgtcttccagtgatagatacagtgatgccagtgatgacagcttttcagagccaaggatagctgagttggaaataagctgaaatgaatacatgactgggaataatggggactgcctgtgaggcctctgaaataattgaaggcaagatgaaggaactatctgaagaaatcactacactcttagagaatccctctgttctccagcaaacatgggatgtaaagcctcacagggaatctgataatacatacttctgtcaaccagaaccagaggggtagttttcttttccctccagaggcagcctttggtacttaaaatatctgtagctgattaaatttttcccaacaacctcactggggagaaagtgtgttcatgttttgtccagcggatcaggatgttaggatgacgagcaagagtccaggtcactgtgcctttgctgtgttgtatggaaaggatggcagggaacatgctgtaagtaattttgagtaagaaaatgagtcactgtgttacctggaactcagccacagatttgtgtgtggtccaagatcattgcagtttctcaccctgtttatttcctggtaaaagtaaaattgaataggtccaagacttgggggtggcaagtaaggctttgcctcaggcacaaaatttaagggggctccaaaaaactcaggaatcaagatcagcaatacagtctgagtatcccttatgtgaaatgcttggggctagaagtgttttgaatttcagattttggaatatttgcatatacatgcgatatcttggggatgagactcaagactaaacatgaaattcatttatgcttcatatacaccttatatacatagcctaaaggtaatttgatacaatattttaaataattttgtgcatgaaacaaagtttcgactgcattttgactgtgatttctggcatgagatcagttatggaattttccacttctagcgtcatgttggcattcagaaattttgaaattttggagcattttggattttcagattagggatgctcaacctgtatatatattttttaatcgacgtgaaattcacgtaacatagaattaaccattttgaagtgaacaatttggttgcattcactgatgttgagcaaccaccacctttaactatttccaaaacattttcatcactccaaaataaatgcctgtacacactagcagtcactccctatcttcccctccacctgtccgctggcaaccactgatctcctttttatttctgtggctttttctattctggatatttcatataagtggaattacacaatatatgtggtcttttgtgtctggcttcttctgagacagtaggaaggggggcttggctttggctcacccccactagagcattttttcatgcattcccactgatcacaaaacccatactactacctcattgacaccatacctgctaacctcgaggctttagtcatacaaagaaaatggcctttctgtattgttcttctgtgctctcataatgcttaaccatgtcttttacttaaacaattccaggaactggccttaggagatccaaatagggaaccaagattgcagagtgtcccatcttgggagggaatgctgaataattaattgatttacagccttgttgccgctggccagaccaccaggtggcccattactcgagatgatcatcacaaccagatgatgctaacctatatcctctacccttcgcgtgctttgtctgggaagtcttttggccccatgtcagtttctattgcattgagagcccaagagcccctggtcagtcaggcttccatttagcatggcgtttgcaaggtttacccatgttgtagcatgtgtcagaatttcattcctttctatggctgaataaaattccattgtatgaatataccac

SEQ ID NO: 29896 - protein, 586 aa, Homo sapiens; identical to SEQ ID NO: 4121

SEQ ID NO: 29897 - DNA, 3831 bp, Homo sapiens
aaaggcaggcattctctttccttttccttctctcctgagcgctcctgcagttcctggggcgtagtaggggatccacaagcgtttgtgaccagtgaagttctttacaagggtgagatctgcacgggaggacccgagcgagggtctcggcttgccaggaagccggggttccccgggaagcgtggagttcacccgcgcactcgaagtgcctttgcaaaattatatctgggtgttggcacccagccactattctgccaatgaagtacatcctggtcacgggtggggtcatctcaggcattggtaaagggatcattgccagcagcattggaacgattctaaaatcatgtggactccgagttactgccataaaaatcgacccctatattaacatcgatgctggcactttttcaccttatgaacacggtgaagtcttcgtcttaaatgatggtggagaagttgatttagaccttggaaattatgaaagatttttggatattaatctttataaagacaacaatatcaccacggggaagatatatcagcatgtgatcaataaagagaggcgtggtgattacctggggaaaacagtgcaagttgtccctcacattactgatgctgtccaggagtgggttatgaatcaagccaaggtgccggtggatggtaataaggaagagccccaaatatgcgttattgagctgggaggcaccattggagacatcgaaggaatgccgtttgtggaggcgtttagacaattccagtttaaggcgaaaagagagaatttctgtaatatccacgttagccttgtcccacagctcagtgctaccggagaacaaaaaaccaaacccacccaaaacagcgtccgcgcactgaggggtttaggcctgtctccagatctgattgtctgccgaagttcaacgcccattgagatggccgtgaaggagaagatttctatgttttgtcacgtgaaccctgaacaggtcatatgtatccatgatgtttcttccacataccgagttcctgtgcttttagaggaacaaagcattgtgaaatattttaaggagagattgcacctgcccatcggtgattctgcaagtaatttgctttttaagtggagaaatatggctgacaggtatgaaaggttacagaaaatatgctccatagccctggttggcaaatacaccaagctcagagactgctacgcctctgtgttcaaagccctggaacactcagccctggccatcaaccacaagttgaatctgatgtacatagactccattgatctggagaagatcactgaaaccgaggaccctgtgaaatttcatgaagcttggcagaagctatgcaaagctgatggtattcttgtgcctggaggctttggaatcagaggaacattgggaaaactccaggcgatttcttgggcaaggacaaagaagattccttttctgggagtttgtcttgggatgcaactagcagtgatagagtttgcaagaaactgccttaacttgaaagatgctgattccacagagtttaggccaaatgccccagttcctctggtgattgatatgcccgagcacaaccctggcaatttgggaggaacaatgagactgggaataagaagaactgttttcaaaactgaaaattcaatattaaggaaactttatggtgatgttccttttatagaagaaagacacagacatcggttcgaggtaaaccctaacctgatcaaacaatttgagcagaatgacttaagttttgtaggtcaggatgttgatggagacaggatggaaatcattgaactggcaaatcatccttattttgttggtgtccagttccatcctgagttttcttctaggccgatgaagccttcccctccgtatctggggctgttacttgcagcaactgggaacctgaatgcctacttgcaacagggttgcaaactgtcttccagtgatagatacagtgatgccagtgatgacagcttttcagagccaaggatagctgagttggaaataagctgaaatgaatacatgactgggaataatggggactgcctgtgaggcctctgaaataattgaaggcaagatgaaggaactatctgaagaaatcactacactcttagagaatccctctgttctccagcaaacatgggatgtaaagcctcacagggaatctgataatacatacttctgtcaaccagaaccagaggggtagttttcttttccctccagaggcagcctttggtacttaaaatatctgtagctgattaaatttttcccaacaacctcactggggagaaagtgtgttcatgttttgtccagcggatcaggatgttaggatgacgagcaagagtccaggtcactgtgcctttgctgtgttgtatggaaaggatggcagggaacatgctgtaagtaattttgagtaagaaaatgagtcactgtgttacctggaactcagccacagatttgtgtgtggtccaagatcattgcagtttctcaccctgtttatttcctggtaaaagtaaaattgaataggtccaagacttgggggtggcaagtaaggctttgcctcaggcacaaaatttaagggggctccaaaaaactcaggaatcaagatcagcaatacagtctgagtatcccttatgtgaaatgcttggggctagaagtgttttgaatttcagattttggaatatttgcatatacatgcgatatcttggggatgagactcaagactaaacatgaaattcatttatgcttcatatacaccttatatacatagcctaaaggtaatttgatacaatattttaaataattttgtgcatgaaacaaagtttcgactgcattttgactgtgatttctggcatgagatcagttatggaattttccacttctagcgtcatgttggcattcagaaattttgaaattttggagcattttggattttcagattagggatgctcaacctgtatatatattttttaatcgacgtgaaattcacgtaacatagaattaaccattttgaagtgaacaatttggttgcattcactgatgttgagcaaccaccacctttaactatttccaaaacattttcatcactccaaaataaatgcctgtacacactagcagtcactccctatcttcccctccacctgtccgctggcaaccactgatctcctttttatttctgtggctttttctattctggatatttcatataagtggaattacacaatatatgtggtcttttgtgtctggcttcttctgagacagtaggaaggggggcttggctttggctcacccccactagagcattttttcatgcattcccactgatcacaaaacccatactactacctcattgacaccatacctgctaacctcgaggctttagtcatacaaagaaaatggcctttctgtattgttcttctgtgctctcataatgcttaaccatgtcttttacttaaacaattccaggaactggccttaggagatccaaatagggaaccaagattgcagagtgtcccatcttgggagggaatgctgaataattaattgatttacagccttgttgccgctggccagaccaccaggtggcccattactcgagatgatcatcacaaccagatgatgctaacctatatcctctacccttcgcgtgctttgtctgggaagtcttttggccccatgtcagtttctattgcattgagagcccaagagcccctggtcagtcaggcttccatttagcatggcgtttgcaaggtttacccatgttgtagcatgtgtcagaatttcattcctttctatggctgaataaaattccattgtatgaatataccac

SEQ ID NO: 29898 - protein, 586 aa, Homo sapiens; identical to SEQ ID NO: 4121

SEQ ID NO: 29899 - DNA, 2402 bp, Homo sapiens
agtgcgtccagagcggagggtgacgggagctgcctgtgctggaggaatcactttttaggcgcttgttttggaccattgcacaaacccgggtgcaaaccccaagctcaccagcgtgagtgagctgggccagcagcagggaggagaggggaaggtgggcgaggagggcgccgcgcaccccgaggcccgtgtgggcggtgggaagatcccgggggcggctttggacagccccggcagcgaccccttccccagcccgacaggtgagcgccaggccagccgcggggtggagcccgccgtgcccaccggccaccctccccggtgctaccaccaccgcgcagattatatctgggtgttggcacccagccactattctgccaatgaagtacatcctggtcacgggtggggtcatctcaggcattggtaaagggatcattgccagcagcattggaacgattctaaaatcatgtggactccgagttactgccataaaaatcgacccctatattaacatcgatgctggcactttttcaccttatgaacacggtgaagtcttcgtcttaaatgatggtggagaagttgatttagaccttggaaattatgaaagatttttggatattaatctttataaagacaacaatatcaccacggggaagatatatcagcatgtgatcaataaagagaggcgtggtgattacctggggaaaacagtgcaagttgtccctcacattactgatgctgtccaggagtgggttatgaatcaagccaaggtgccggtggatggtaataaggaagagccccaaatatgcgttattgagctgggaggcaccattggagacatcgaaggaatgccgtttgtggaggcgtttagacaattccagtttaaggcgaaaagagagaatttctgtaatatccacgttagccttgtcccacagctcagtgctaccggagaacaaaaaaccaaacccacccaaaacagcgtccgcgcactgaggggtttaggcctgtctccagatctgattgtctgccgaagttcaacgcccattgagatggccgtgaaggagaagatttctatgttttgtcacgtgaaccctgaacaggtcatatgtatccatgatgtttcttccacataccgagttcctgtgcttttagaggaacaaagcattgtgaaatattttaaggagagattgcacctgcccatcggtgattctgcaagtaatttgctttttaagtggagaaatatggctgacaggtatgaaaggttacagaaaatatgctccatagccctggttggcaaatacaccaagctcagagactgctacgcctctgtgttcaaagccctggaacactcagccctggccatcaaccacaagttgaatctgatgtacatagactccattgatctggagaagatcactgaaaccgaggaccctgtgaaatttcatgaagcttggcagaagctatgcaaagctgatggtattcttgtgcctggaggctttggaatcagaggaacattgggaaaactccaggcgatttcttgggcaaggacaaagaagattccttttctgggagtttgtcttgggatgcaactagcagtgatagagtttgcaagaaactgccttaacttgaaagatgctgattccacagagtttaggccaaatgccccagttcctctggtgattgatatgcccgagcacaaccctggcaatttgggaggaacaatgagactgggaataagaagaactgttttcaaaactgaaaattcaatattaaggaaactttatggtgatgttccttttatagaagaaagacacagacatcggttcgaggtaaaccctaacctgatcaaacaatttgagcagaatgacttaagttttgtaggtcaggatgttgatggagacaggatggaaatcattgaactggcaaatcatccttattttgttggtgtccagttccatcctgagttttcttctaggccgatgaagccttcccctccgtatctggggctgttacttgcagcaactgggaacctgaatgcctacttgcaacagggttgcaaactgtcttccagtgatagatacagtgatgccagtgatgacagcttttcagagccaaggatagctgagttggaaataagctgaaatgaatacatgactgggaataatggggactgcctgtgaggcctctgaaataattgaaggcaagatgaaggaactatctgaagaaatcactacactcttagagaatccctctgttctccagcaaacatgggatgtaaagcctcacagggaatctgataatacatacttctgtcaaccagaaccagaggggtagttttcttttccctccagaggcagcctttggtacttaaaatatctgtagctgattaaatttttcccaacaacctc

SEQ ID NO: 29900 - protein, 586 aa, Homo sapiens; identical to SEQ ID NO: 4121

SEQ ID NO: 29901 - DNA, 2282 bp, Homo sapiens
aaaggcaggcattctctttccttttccttctctcctgagcgctcctgcagttcctggggcgtagtaggggatccacaagcgtttgtgaccagtgaagttctttacaagggtgagatctgcacgggaggacccgagcgagggtctcggcttgccaggaagccggggttccccgggaagcgtggagttcacccgcgcactcgaagtgcctttgcaaaattatatctgggtgttggcacccagccactattctgccaatgaagtacatcctggtcacgggtggggtcatctcaggcattggtaaagggatcattgccagcagcattggaacgattctaaaatcatgtggactccgagttactgccataaaaatcgacccctatattaacatcgatgctggcactttttcaccttatgaacacggtgaagtcttcgtcttaaatgatggtggagaagttgatttagaccttggaaattatgaaagatttttggatattaatctttataaagacaacaatatcaccacggggaagatatatcagcatgtgatcaataaagagaggcgtggtgattacctggggaaaacagtgcaagttgtccctcacattactgatgctgtccaggagtgggttatgaatcaagccaaggtgccggtggatggtaataaggaagagccccaaatatgcgttattgagctgggaggcaccattggagacatcgaaggaatgccgtttgtggaggcgtttagacaattccagtttaaggcgaaaagagagaatttctgtaatatccacgttagccttgtcccacagctcagtgctaccggagaacaaaaaaccaaacccacccaaaacagcgtccgcgcactgaggggtttaggcctgtctccagatctgattgtctgccgaagttcaacgcccattgagatggccgtgaaggagaagatttctatgttttgtcacgtgaaccctgaacaggtcatatgtatccatgatgtttcttccacataccgagttcctgtgcttttagaggaacaaagcattgtgaaatattttaaggagagattgcacctgcccatcggtgattctgcaagtaatttgctttttaagtggagaaatatggctgacaggtatgaaaggttacagaaaatatgctccatagccctggttggcaaatacaccaagctcagagactgctacgcctctgtgttcaaagccctggaacactcagccctggccatcaaccacaagttgaatctgatgtacatagactccattgatctggagaagatcactgaaaccgaggaccctgtgaaatttcatgaagcttggcagaagctatgcaaagctgatggtattcttgtgcctggaggctttggaatcagaggaacattgggaaaactccaggcgatttcttgggcaaggacaaagaagattccttttctgggagtttgtcttgggatgcaactagcagtgatagagtttgcaagaaactgccttaacttgaaagatgctgattccacagagtttaggccaaatgccccagttcctctggtgattgatatgcccgagcacaaccctggcaatttgggaggaacaatgagactgggaataagaagaactgttttcaaaactgaaaattcaatattaaggaaactttatggtgatgttccttttatagaagaaagacacagacatcggttcgaggtaaaccctaacctgatcaaacaatttgagcagaatgacttaagttttgtaggtcaggatgttgatggagacaggatggaaatcattgaactggcaaatcatccttattttgttggtgtccagttccatcctgagttttcttctaggccgatgaagccttcccctccgtatctggggctgttacttgcagcaactgggaacctgaatgcctacttgcaacagggttgcaaactgtcttccagtgatagatacagtgatgccagtgatgacagcttttcagagccaaggatagctgagttggaaataagctgaaatgaatacatgactgggaataatggggactgcctgtgaggcctctgaaataattgaaggcaagatgaaggaactatctgaagaaatcactacactcttagagaatccctctgttctccagcaaacatgggatgtaaagcctcacagggaatctgataatacatacttctgtcaaccagaaccagaggggtagttttcttttccctccagaggcagcctttggtacttaaaatatctgtagctgattaaatttttcccaacaacctc

SEQ ID NO: 29902 - protein, 586 aa, Homo sapiens; identical to SEQ ID NO: 4121

SEQ ID NO: 29903 - DNA, 1262 bp, Homo sapiens
cggctgcggtgttcctccgacttccggacatctccctgggagtcgcgcagagtggagtcaaaggcaaccagtgctcgctgcggtctctggggatcgggaccgcggcggcggcccgcgagcgggatgttccggggcttgagcagttggttgggcttgcagcagccggtggcaggcggtgggcagcccaatggagatgctccacccgagcagccgtccgagacggtggctgagtctgcggaggaggagctgcagcaagcgggagaccaggagctcctccaccaggccaaagacttcggcaactatttatttaactttgcatctgctgccacaaaaaagataactgaatcagttgctgaaacagcacaaacaataaagaaatccgtagaagaaggaaaaatagatggcatcattgacaagacaattataggagattttcagaaggaacagaaaaaatttgttgaagagcaacatacaaagaagtcagaagcagctgtgcccccatgggttgacactaacgatgaagaaacaattcaacaacaaattttggccttatcagctgacaagaggaatttccttcgtgaccctccggctggcgtgcaatttaatttcgactttgatcagatgtaccccgtggccctggtcatgctccaggaggatgagctgctaagcaagatgagatttgccctcgttcctaaacttgtgaaggaagaagtgttctggaggaactacttttaccgcgtctccctgattaagcagtcagcccagctcacggccctggctgcccaacagcaggccgcagggaaggaggagaagagcaatggcagagagcaagatttgccgctggcagaggcagtacggcccaaaacgccacccgttgtaatcaaatctcagcttaaaactcaagaggatgaggaagaaatttctactagcccaggtgtttctgagtttgtcagtgatgccttcgatgcctgtaacctaaatcaggaagatctaaggaaagaaatggagcaactagtgcttgacaaaaagcaagaggagacagccgtactggaagaggattctgcagattgggaaaaagaactgcagcaggaacttcaagaatatgaagtggtgacagaatctgaaaaacgagatgaaaactgggataaggaaatagagaaaatgcttcaagaggaaaattagctgttcctgaaatagaagaataatccttaacagtctgcaaactgacattaaattctagatgttgacaattactgaatcag

SEQ ID NO: 29904 - protein, 352 aa, Homo sapiens; identical to SEQ ID NO: 4125

SEQ ID NO: 29905 - DNA, 1516 bp, Homo sapiens
cggctgcggtgttcctccgacttccggacatctccctgggagtcgcgcagagtggagtcaaaggcaaccagtgctcgctgcggtctctggggatcgggaccgcggcggcggcccgcgagcgggatgttccggggcttgagcagttggttgggcttgcagcagccggtggcaggcggtgggcagcccaatggagatgctccacccgagcagccgtccgagacggtggctgagtctgcggaggaggagctgcagcaagcgggagaccaggagctcctccaccaggccaaagacttcggcaactatttatttaactttgcatctgctgccacaaaaaagataactgaatcagttgctgaaacagcacaaacaataaagaaatccgtagaagaaggaaaaatagatggcatcattgacaagacaattataggagattttcagaaggaacagaaaaaatttgttgaagagcaacatacaaagaagtcagaagcagctgtgcccccatgggttgacactaacgatgaagaaacaattcaacaacaaattttggccttatcagctgacaagaggaatttccttcgtgaccctccggctggcgtgcaatttaatttcgactttgatcagatgtaccccgtggccctggtcatgctccaggaggatgagctgctaagcaagatgagatttgccctcgttcctaaacttgtgaaggaagaagtgttctggaggaactacttttaccgcgtctccctgattaagcagtcagcccagctcacggccctggctgcccaacagcaggccgcagggaaggaggagaagagcaatggcagagagcaagatttgccgctggcagaggcagtacggcccaaaacgccacccgttgtaatcaaatctcagcttaaaactcaagaggatgaggaagaaatttctactagcccaggtgtttctgagtttgtcagtgatgccttcgatgcctgtaacctaaatcaggaagatctaaggaaagaaatggagcaactagtgcttgacaaaaagcaagaggagacagccgtactggaagaggattctgcagattgggaaaaagaactgcagcaggaacttcaagaatatgaagtggtgacagaatctgaaaaacgagatgaaaactgggataaggaaatagagaaaatgcttcaagaggaaaattagctgttcctgaaatagaagaataatccttaacagtctgcaaactgacattaaattctagatgttgacaattactgaatcagaaggcatgaaagagtataattttatgaaattcaaaattattcttttttcaagttgaaacttgcctcttctactttaaaaaagtatatagaacagttacttctaataatcagaaagagatgttttatagaacatttctttaatataaagttagagatgtcttcataggcagtatggctatctttgccacagaaacataagtaaaattttagagttctgttttccatgaggtcaaaaatataatttattcctcagt

SEQ ID NO: 29906 - protein, 352 aa, Homo sapiens; identical to SEQ ID NO: 4125

SEQ ID NO: 29907 - DNA, 1727 bp, Homo sapiens
cggctgcggtgttcctccgacttccggacatctccctgggagtcgcgcagagtggagtcaaaggcaaccagtgctcgctgcggtctctggggatcgggaccgcggcggcggcccgcgagcgggatgttccggggcttgagcagttggttgggcttgcagcagccggtggcaggcggtgggcagcccaatggagatgctccacccgagcagccgtccgagacggtggctgagtctgcggaggaggagctgcagcaagcgggagaccaggagctcctccaccaggccaaagacttcggcaactatttatttaactttgcatctgctgccacaaaaaagataactgaatcagttgctgaaacagcacaaacaataaagaaatccgtagaagaaggaaaaatagatggcatcattgacaagacaattataggagattttcagaaggaacagaaaaaatttgttgaagagcaacatacaaagaagtcagaagcagctgtgcccccatgggttgacactaacgatgaagaaacaattcaacaacaaattttggccttatcagctgacaagaggaatttccttcgtgaccctccggctggcgtgcaatttaatttcgactttgatcagatgtaccccgtggccctggtcatgctccaggaggatgagctgctaagcaagatgagatttgccctcgttcctaaacttgtgaaggaagaagtgttctggaggaactacttttaccgcgtctccctgattaagcagtcagcccagctcacggccctggctgcccaacagcaggccgcagggaaggaggagaagagcaatggcagagagcaagatttgccgctggcagaggcagtacggcccaaaacgccacccgttgtaatcaaatctcagcttaaaactcaagaggatgaggaagaaatttctactagcccaggtgtttctgagtttgtcagtgatgccttcgatgcctgtaacctaaatcaggaagatctaaggaaagaaatggagcaactagtgcttgacaaaaagcaagaggagacagccgtactggaagaggattctgcagattgggaaaaagaactgcagcaggaacttcaagaatatgaagtggtgacagaatctgaaaaacgagatgaaaactgggataaggaaatagagaaaatgcttcaagaggaaaattagctgttcctgaaatagaagaataatccttaacagtctgcaaactgacattaaattctagatgttgacaattactgaatcagaaggcatgaaagagtataattttatgaaattcaaaattattcttttttcaagttgaaacttgcctcttctactttaaaaaagtatatagaacagttacttctaataatcagaaagagatgttttatagaacatttctttaatataaagttagagatgtcttcataggcagtatggctatctttgccacagaaacataagtaaaattttagagttctgttttccatgaggtcaaaaatataatttattcctcagtcatggttttctaaatatctgtactccacattccattttaattgatatgagggtgttaaagtacctacttaatgggttgattactatcaaaatgaccaaattataccaaagaacttaagaggaagcactttcagaactattcacttgccaggtattttctaaaattccacctgaaagccaaaagataaaataaataagttgattttaatgat

SEQ ID NO: 29908 - protein, 352 aa, Homo sapiens; identical to SEQ ID NO: 4125

SEQ ID NO: 29909 - DNA, 2033 bp, Homo sapiens
cggctgcggtgttcctccgacttccggacatctccctgggagtcgcgcagagtggagtcaaaggcaaccagtgctcgctgcggtctctggggatcgggaccgcggcggcggcccgcgagcgggatgttccggggcttgagcagttggttgggcttgcagcagccggtggcaggcggtgggcagcccaatggagatgctccacccgagcagccgtccgagacggtggctgagtctgcggaggaggagctgcagcaagcgggagaccaggagctcctccaccaggccaaagacttcggcaactatttatttaactttgcatctgctgccacaaaaaagataactgaatcagttgctgaaacagcacaaacaataaagaaatccgtagaagaaggaaaaatagatggcatcattgacaagacaattataggagattttcagaaggaacagaaaaaatttgttgaagagcaacatacaaagaagtcagaagcagctgtgcccccatgggttgacactaacgatgaagaaacaattcaacaacaaattttggccttatcagctgacaagaggaatttccttcgtgaccctccggctggcgtgcaatttaatttcgactttgatcagatgtaccccgtggccctggtcatgctccaggaggatgagctgctaagcaagatgagatttgccctcgttcctaaacttgtgaaggaagaagtgttctggaggaactacttttaccgcgtctccctgattaagcagtcagcccagctcacggccctggctgcccaacagcaggccgcagggaaggaggagaagagcaatggcagagagcaagatttgccgctggcagaggcagtacggcccaaaacgccacccgttgtaatcaaatctcagcttaaaactcaagaggatgaggaagaaatttctactagcccaggtgtttctgagtttgtcagtgatgccttcgatgcctgtaacctaaatcaggaagatctaaggaaagaaatggagcaactagtgcttgacaaaaagcaagaggagacagccgtactggaagaggattctgcagattgggaaaaagaactgcagcaggaacttcaagaatatgaagtggtgacagaatctgaaaaacgagatgaaaactgggataaggaaatagagaaaatgcttcaagaggaaaattagctgttcctgaaatagaagaataatccttaacagtctgcaaactgacattaaattctagatgttgacaattactgaatcagaaggcatgaaagagtataattttatgaaattcaaaattattcttttttcaagttgaaacttgcctcttctactttaaaaaagtatatagaacagttacttctaataatcagaaagagatgttttatagaacatttctttaatataaagttagagatgtcttcataggcagtatggctatctttgccacagaaacataagtaaaattttagagttctgttttccatgaggtcaaaaatataatttattcctcagtcatggttttctaaatatctgtactccacattccattttaattgatatgagggtgttaaagtacctacttaatgggttgattactatcaaaatgaccaaattataccaaagaacttaagaggaagcactttcagaactattcacttgccaggtattttctaaaattccacctgaaagccaaaagataaaataaataagttgattttaatgatataagcatcacacaattttacattaagaaatactgtgcaggccatgcgtggtggctcaggcctgtaatcccagcactttgggaggccgaggtgggcagatcaccggaggtcaggagttcgagaccagccttgccaacatagtgaaaccctgtctctactaaaaatacaaaaattagccgggcatggtggcaggcacctgtaatcccagctactagggaggcttttgaacccaggaggcagaggttgcagcgagctgagatcgcgccactgcactccagcctgggtgatagagtgagattcagtctc

SEQ ID NO: 29910 - protein, 352 aa, Homo sapiens; identical to SEQ ID NO: 4125

SEQ ID NO: 29911 - DNA, 2257 bp, Homo sapiens
cggctgcggtgttcctccgacttccggacatctccctgggagtcgcgcagagtggagtcaaaggcaaccagtgctcgctgcggtctctggggatcgggaccgcggcggcggcccgcgagcgggatgttccggggcttgagcagttggttgggcttgcagcagccggtggcaggcggtgggcagcccaatggagatgctccacccgagcagccgtccgagacggtggctgagtctgcggaggaggagctgcagcaagcgggagaccaggagctcctccaccaggccaaagacttcggcaactatttatttaactttgcatctgctgccacaaaaaagataactgaatcagttgctgaaacagcacaaacaataaagaaatccgtagaagaaggaaaaatagatggcatcattgacaagacaattataggagattttcagaaggaacagaaaaaatttgttgaagagcaacatacaaagaagtcagaagcagctgtgcccccatgggttgacactaacgatgaagaaacaattcaacaacaaattttggccttatcagctgacaagaggaatttccttcgtgaccctccggctggcgtgcaatttaatttcgactttgatcagatgtaccccgtggccctggtcatgctccaggaggatgagctgctaagcaagatgagatttgccctcgttcctaaacttgtgaaggaagaagtgttctggaggaactacttttaccgcgtctccctgattaagcagtcagcccagctcacggccctggctgcccaacagcaggccgcagggaaggaggagaagagcaatggcagagagcaagatttgccgctggcagaggcagtacggcccaaaacgccacccgttgtaatcaaatctcagcttaaaactcaagaggatgaggaagaaatttctactagcccaggtgtttctgagtttgtcagtgatgccttcgatgcctgtaacctaaatcaggaagatctaaggaaagaaatggagcaactagtgcttgacaaaaagcaagaggagacagccgtactggaagaggattctgcagattgggaaaaagaactgcagcaggaacttcaagaatatgaagtggtgacagaatctgaaaaacgagatgaaaactgggataaggaaatagagaaaatgcttcaagaggaaaattagctgttcctgaaatagaagaataatccttaacagtctgcaaactgacattaaattctagatgttgacaattactgaatcagaaggcatgaaagagtataattttatgaaattcaaaattattcttttttcaagttgaaacttgcctcttctactttaaaaaagtatatagaacagttacttctaataatcagaaagagatgttttatagaacatttctttaatataaagttagagatgtcttcataggcagtatggctatctttgccacagaaacataagtaaaattttagagttctgttttccatgaggtcaaaaatataatttattcctcagtcatggttttctaaatatctgtactccacattccattttaattgatatgagggtgttaaagtacctacttaatgggttgattactatcaaaatgaccaaattataccaaagaacttaagaggaagcactttcagaactattcacttgccaggtattttctaaaattccacctgaaagccaaaagataaaataaataagttgattttaatgatataagcatcacacaattttacattaagaaatactgtgcaggccatgcgtggtggctcaggcctgtaatcccagcactttgggaggccgaggtgggcagatcaccggaggtcaggagttcgagaccagccttgccaacatagtgaaaccctgtctctactaaaaatacaaaaattagccgggcatggtggcaggcacctgtaatcccagctactagggaggcttttgaacccaggaggcagaggttgcagcgagctgagatcgcgccactgcactccagcctgggtgatagagtgagattcagtctcaaaaaaaaaaaaaaaaaaaagctgtgcgaaaatatttgtttttctctggggccttttctttcttttctttttaaactataccagaaattttacatcacagtttttatacaaagtgggaccttccatactttttgtattacaataaccttcagaagcccattccccttaaagtctgttgttcttgttttaatcatcaccacatataaatgttttagctttgtctt

SEQ ID NO: 29912 - protein, 352 aa, Homo sapiens; identical to SEQ ID NO: 4125

SEQ ID NO: 29913 - DNA, 3279 bp, Homo sapiens
cggctgcggtgttcctccgacttccggacatctccctgggagtcgcgcagagtggagtcaaaggcaaccagtgctcgctgcggtctctggggatcgggaccgcggcggcggcccgcgagcgggatgttccggggcttgagcagttggttgggcttgcagcagccggtggcaggcggtgggcagcccaatggagatgctccacccgagcagccgtccgagacggtggctgagtctgcggaggaggagctgcagcaagcgggagaccaggagctcctccaccaggccaaagacttcggcaactatttatttaactttgcatctgctgccacaaaaaagataactgaatcagttgctgaaacagcacaaacaataaagaaatccgtagaagaaggaaaaatagatggcatcattgacaagacaattataggagattttcagaaggaacagaaaaaatttgttgaagagcaacatacaaagaagtcagaagcagctgtgcccccatgggttgacactaacgatgaagaaacaattcaacaacaaattttggccttatcagctgacaagaggaatttccttcgtgaccctccggctggcgtgcaatttaatttcgactttgatcagatgtaccccgtggccctggtcatgctccaggaggatgagctgctaagcaagatgagatttgccctcgttcctaaacttgtgaaggaagaagtgttctggaggaactacttttaccgcgtctccctgattaagcagtcagcccagctcacggccctggctgcccaacagcaggccgcagggaaggaggagaagagcaatggcagagagcaagatttgccgctggcagaggcagtacggcccaaaacgccacccgttgtaatcaaatctcagcttaaaactcaagaggatgaggaagaaatttctactagcccaggtgtttctgagtttgtcagtgatgccttcgatgcctgtaacctaaatcaggaagatctaaggaaagaaatggagcaactagtgcttgacaaaaagcaagaggagacagccgtactggaagaggattctgcagattgggaaaaagaactgcagcaggaacttcaagaatatgaagtggtgacagaatctgaaaaacgagatgaaaactgggataaggaaatagagaaaatgcttcaagaggaaaattagctgttcctgaaatagaagaataatccttaacagtctgcaaactgacattaaattctagatgttgacaattactgaatcagaaggcatgaaagagtataattttatgaaattcaaaattattcttttttcaagttgaaacttgcctcttctactttaaaaaagtatatagaacagttacttctaataatcagaaagagatgttttatagaacatttctttaatataaagttagagatgtcttcataggcagtatggctatctttgccacagaaacataagtaaaattttagagttctgttttccatgaggtcaaaaatataatttattcctcagtcatggttttctaaatatctgtactccacattccattttaattgatatgagggtgttaaagtacctacttaatgggttgattactatcaaaatgaccaaattataccaaagaacttaagaggaagcactttcagaactattcacttgccaggtattttctaaaattccacctgaaagccaaaagataaaataaataagttgattttaatgatataagcatcacacaattttacattaagaaatactgtgcaggccatgcgtggtggctcaggcctgtaatcccagcactttgggaggccgaggtgggcagatcaccggaggtcaggagttcgagaccagccttgccaacatagtgaaaccctgtctctactaaaaatacaaaaattagccgggcatggtggcaggcacctgtaatcccagctactagggaggcttttgaacccaggaggcagaggttgcagcgagctgagatcgcgccactgcactccagcctgggtgatagagtgagattcagtctcaaaaaaaaaaaaaaaaaaaagctgtgcgaaaatatttgtttttctctggggccttttctttcttttctttttaaactataccagaaattttacatcacagtttttatacaaagtgggaccttccatactttttgtattacaataaccttcagaagcccattccccttaaagtctgttgttcttgttttaatcatcaccacatataaatgttttagctttgtcttaaactgtgagtcttcataaaattgtgttcctccgagttcaccttctaggactttattgattaatccttctctttctgctataccagcagacacatattcatagaatatgattatttttaaagaacaaggtgaggaggctgaggcaggagaattgcttgaacctgggagatggaggttgcagtgagctgagatcacgccactgcactccagcctgggtgacagagtgagagactccgtctcaaaaatgaatgaatgaatgaatgaatgaatgaacgaacgaacaaggtggtttaatgtcagaaaacttcctaagcatttgctccccaaacctttcatgtttttcaagaagcctttattacataaaggggaatagaattaaaatgtttctttataagaaaaatatacatatttgtgttcttggccccattaaaactagtcagtagtcctttggcaaagatatagtcaacaagagaactgggtatgagtccaggcattactcctgttcatagttgtggatgcatgtgtctgagccagactgtctcaactggagtctcttgggttatagcagtaaacccgtgtattccatgaaaccactgggcccatcatcaaaaggtttccacttgtggtgccacagttgcttattactgagtttgggttccaagatgactggcaacttctgaaataatctcattgaaggaaagagtttcattttttttttaaaagagtttgctggaggaaaagaagcatgttaaatgtttttaagcagctaaaagtcctagatggaagcatatcaggatgtgtcggtgcttggctcttagtgaatgcactaaaattcttattgataaatgttgaataaacacacacaaaaaagtatcagagaaagagaaaaaccctacaatggcaatagaggtgtgtgacagttattgctatcaattttacataatatctcatttaaaaacaacctaattatgcattgcctgtgaaaataaaaggataaaataagattttgtacatactgtaag

SEQ ID NO: 29914 - protein, 352 aa, Homo sapiens; identical to SEQ ID NO: 4125

SEQ ID NO: 29915 - DNA, 3506 bp, Homo sapiens
cggctgcggtgttcctccgacttccggacatctccctgggagtcgcgcagagtggagtcaaaggcaaccagtgctcgctgcggtctctggggatcgggaccgcggcggcggcccgcgagcgggatgttccggggcttgagcagttggttgggcttgcagcagccggtggcaggcggtgggcagcccaatggagatgctccacccgagcagccgtccgagacggtggctgagtctgcggaggaggagctgcagcaagcgggagaccaggagctcctccaccaggccaaagacttcggcaactatttatttaactttgcatctgctgccacaaaaaagataactgaatcagttgctgaaacagcacaaacaataaagaaatccgtagaagaaggaaaaatagatggcatcattgacaagacaattataggagattttcagaaggaacagaaaaaatttgttgaagagcaacatacaaagaagtcagaagcagctgtgcccccatgggttgacactaacgatgaagaaacaattcaacaacaaattttggccttatcagctgacaagaggaatttccttcgtgaccctccggctggcgtgcaatttaatttcgactttgatcagatgtaccccgtggccctggtcatgctccaggaggatgagctgctaagcaagatgagatttgccctcgttcctaaacttgtgaaggaagaagtgttctggaggaactacttttaccgcgtctccctgattaagcagtcagcccagctcacggccctggctgcccaacagcaggccgcagggaaggaggagaagagcaatggcagagagcaagatttgccgctggcagaggcagtacggcccaaaacgccacccgttgtaatcaaatctcagcttaaaactcaagaggatgaggaagaaatttctactagcccaggtgtttctgagtttgtcagtgatgccttcgatgcctgtaacctaaatcaggaagatctaaggaaagaaatggagcaactagtgcttgacaaaaagcaagaggagacagccgtactggaagaggattctgcagattgggaaaaagaactgcagcaggaacttcaagaatatgaagtggtgacagaatctgaaaaacgagatgaaaactgggataaggaaatagagaaaatgcttcaagaggaaaattagctgttcctgaaatagaagaataatccttaacagtctgcaaactgacattaaattctagatgttgacaattactgaatcagaaggcatgaaagagtataattttatgaaattcaaaattattcttttttcaagttgaaacttgcctcttctactttaaaaaagtatatagaacagttacttctaataatcagaaagagatgttttatagaacatttctttaatataaagttagagatgtcttcataggcagtatggctatctttgccacagaaacataagtaaaattttagagttctgttttccatgaggtcaaaaatataatttattcctcagtcatggttttctaaatatctgtactccacattccattttaattgatatgagggtgttaaagtacctacttaatgggttgattactatcaaaatgaccaaattataccaaagaacttaagaggaagcactttcagaactattcacttgccaggtattttctaaaattccacctgaaagccaaaagataaaataaataagttgattttaatgatataagcatcacacaattttacattaagaaatactgtgcaggccatgcgtggtggctcaggcctgtaatcccagcactttgggaggccgaggtgggcagatcaccggaggtcaggagttcgagaccagccttgccaacatagtgaaaccctgtctctactaaaaatacaaaaattagccgggcatggtggcaggcacctgtaatcccagctactagggaggcttttgaacccaggaggcagaggttgcagcgagctgagatcgcgccactgcactccagcctgggtgatagagtgagattcagtctcaaaaaaaaaaaaaaaaaaaagctgtgcgaaaatatttgtttttctctggggccttttctttcttttctttttaaactataccagaaattttacatcacagtttttatacaaagtgggaccttccatactttttgtattacaataaccttcagaagcccattccccttaaagtctgttgttcttgttttaatcatcaccacatataaatgttttagctttgtcttaaactgtgagtcttcataaaattgtgttcctccgagttcaccttctaggactttattgattaatccttctctttctgctataccagcagacacatattcatagaatatgattatttttaaagaacaaggtgaggaggctgaggcaggagaattgcttgaacctgggagatggaggttgcagtgagctgagatcacgccactgcactccagcctgggtgacagagtgagagactccgtctcaaaaatgaatgaatgaatgaatgaatgaatgaacgaacgaacaaggtggtttaatgtcagaaaacttcctaagcatttgctccccaaacctttcatgtttttcaagaagcctttattacataaaggggaatagaattaaaatgtttctttataagaaaaatatacatatttgtgttcttggccccattaaaactagtcagtagtcctttggcaaagatatagtcaacaagagaactgggtatgagtccaggcattactcctgttcatagttgtggatgcatgtgtctgagccagactgtctcaactggagtctcttgggttatagcagtaaacccgtgtattccatgaaaccactgggcccatcatcaaaaggtttccacttgtggtgccacagttgcttattactgagtttgggttccaagatgactggcaacttctgaaataatctcattgaaggaaagagtttcattttttttttaaaagagtttgctggaggaaaagaagcatgttaaatgtttttaagcagctaaaagtcctagatggaagcatatcaggatgtgtcggtgcttggctcttagtgaatgcactaaaattcttattgataaatgttgaataaacacacacaaaaaagtatcagagaaagagaaaaaccctacaatggcaatagaggtgtgtgacagttattgctatcaattttacataatatctcatttaaaaacaacctaattatgcattgcctgtgaaaataaaaggataaaataagattttgtacatactgtaagaatacagttgtgctgtatttttatggattcatcaaggagtaaaatgttctgctttagtaaattatataggtaactgaagtgttattcctttaaagagcaaaataatttatcaccatgtttggtggaaaatttctaagtatttattacatgcctaggggttagccaacaagatataccaagcatgaaaacctgtaaaacttaataaaatgctaaaatatgaacatcac

SEQ ID NO: 29916 - protein, 352 aa, Homo sapiens; identical to SEQ ID NO: 4125

SEQ ID NO: 29917 - DNA, 766 bp, Homo sapiens
ggtgttcctccgacttccggacatctccctgggagtcgcgcagagtggagtcaaaggcaaccagtgctcgctgcggtctctggggatcgggaccgcggcggcggcccgcgagcgggatgttccggggcttgagcagttggttgggcttgcagcagccggtggcaggcggtgggcagcccaatggagatgctccacccgagcagccgtccgagacggtggctgagtctgcggaggaggagctgcagcaagcgggagaccaggagctcctccaccaggccaaagacttcggcaactatttatttaactttgcatctgctgccacaaaaaagataactgaatcagttgctgaaacagcacaaacaataaagaaatccgtagaagaaggaaaaatagatggcatcattgacaagacaattataggagattttcagaaggaacagaaaaaatttgttgaagagcaacatacaaagaagtcaggtatggtataggtttgtcttaattaacctgccaggttttattgagcacctgttatgtgctagataccacactgagggtctgagaacacaaaaatgcatatgcaatggccccatcctttgggtagcacaaagactagtgagggagacaaacccataaacttccatgatttaaaggaagggactagattgtttctgggtgagggctgccagtgctggccccactggggagctggctgtgaaaggggcaagtaagctttcagttctgactttctcttttcttttcccccacc

SEQ ID NO: 29918 - protein, 123 aa, Homo sapiens
MFRGLSSWLGLQQPVAGGGQPNGDAPPEQPSETVAESAEEELQQAGDQELLHQAKDFGNYLFNFASAATKKITESVAETAQTIKKSVEEGKIDGIIDKTIIGDFQKEQKKFVEEQHTKKSGMV

SEQ ID NO: 29919 - DNA, 963 bp, Homo sapiens
ggtgttcctccgacttccggacatctccctgggagtcgcgcagagtggagtcaaaggcaaccagtgctcgctgcggtctctggggatcgggaccgcggcggcggcccgcgagcgggatgttccggggcttgagcagttggttgggcttgcagcagccggtggcaggcggtgggcagcccaatggagatgctccacccgagcagccgtccgagacggtggctgagtctgcggaggaggagctgcagcaagcgggagaccaggagctcctccaccaggccaaagacttcggcaactatttatttaactttgcatctgctgccacaaaaaagataactgaatcagttgctgaaacagcacaaacaataaagaaatccgtagaagaaggaaaaatagatggcatcattgacaagacaattataggagattttcagaaggaacagaaaaaatttgttgaagacaaactgacattaaattctagatgttgacaattactgaatcagaaggcatgaaagagtataattttatgaaattcaaaattattcttttttcaagttgaaacttgcctcttctactttaaaaaagtatatagaacagttacttctaataatcagaaagagatgttttatagaacatttctttaatataaagttagagatgtcttcataggcagtatggctatctttgccacagaaacataagtaaaattttagagttctgttttccatgaggtcaaaaatataatttattcctcagtcatggttttctaaatatctgtactccacattccattttaattgatatgagggtgttaaagtacctacttaatgggttgattactatcaaaatgaccaaattataccaaagaacttaagaggaagcactttcagaactattcacttgccaggtattttctaaaattccacctgaaagccaaaagataaaataaataagttgattttaatg

SEQ ID NO: 29920 - protein, 122 aa, Homo sapiens
MFRGLSSWLGLQQPVAGGGQPNGDAPPEQPSETVAESAEEELQQAGDQELLHQAKDFGNYLFNFASAATKKITESVAETAQTIKKSVEEGKIDGIIDKTIIGDFQKEQKKFVEDKLTLNSRC

SEQ ID NO: 29921 - DNA, 1495 bp, Homo sapiens
ggtgttcctccgacttccggacatctccctgggagtcgcgcagagtggagtcaaaggcaaccagtgctcgctgcggtctctggggatcgggaccgcggcggcggcccgcgagcgggatgttccggggcttgagcagttggttgggcttgcagcagccggtggcaggcggtgggcagcccaatggagatgctccacccgagcagccgtccgagacggtggctgagtctgcggaggaggagctgcagcaagcgggagaccaggagctcctccaccaggccaaagacttcggcaactatttatttaactttgcatctgctgccacaaaaaagataactgaatcagttgctgaaacagcacaaacaataaagaaatccgtagaagaaggaaaaatagatggcatcattgacaagacaattataggagattttcagaaggaacagaaaaaatttgttgaagacaaactgacattaaattctagatgttgacaattactgaatcagaaggcatgaaagagtataattttatgaaattcaaaattattcttttttcaagttgaaacttgcctcttctactttaaaaaagtatatagaacagttacttctaataatcagaaagagatgttttatagaacatttctttaatataaagttagagatgtcttcataggcagtatggctatctttgccacagaaacataagtaaaattttagagttctgttttccatgaggtcaaaaatataatttattcctcagtcatggttttctaaatatctgtactccacattccattttaattgatatgagggtgttaaagtacctacttaatgggttgattactatcaaaatgaccaaattataccaaagaacttaagaggaagcactttcagaactattcacttgccaggtattttctaaaattccacctgaaagccaaaagataaaataaataagttgattttaatgatataagcatcacacaattttacattaagaaatactgtgcaggccatgcgtggtggctcaggcctgtaatcccagcactttgggaggccgaggtgggcagatcaccggaggtcaggagttcgagaccagccttgccaacatagtgaaaccctgtctctactaaaaatacaaaaattagccgggcatggtggcaggcacctgtaatcccagctactagggaggcttttgaacccaggaggcagaggttgcagcgagctgagatcgcgccactgcactccagcctgggtgatagagtgagattcagtctcaaaaaaaaaaaaaaaaaaaagctgtgcgaaaatatttgtttttctctggggccttttctttcttttctttttaaactataccagaaattttacatcacagtttttatacaaagtgggaccttccatactttttgtattacaataaccttcagaagcccattccccttaaagtctgttgttcttgttttaatcatcaccacatataaatgttttagctttgtctt

SEQ ID NO: 29922 - protein, 122 aa, Homo sapiens; identical to SEQ ID NO: 29920

SEQ ID NO: 29923 - DNA, 2517 bp, Homo sapiens
ggtgttcctccgacttccggacatctccctgggagtcgcgcagagtggagtcaaaggcaaccagtgctcgctgcggtctctggggatcgggaccgcggcggcggcccgcgagcgggatgttccggggcttgagcagttggttgggcttgcagcagccggtggcaggcggtgggcagcccaatggagatgctccacccgagcagccgtccgagacggtggctgagtctgcggaggaggagctgcagcaagcgggagaccaggagctcctccaccaggccaaagacttcggcaactatttatttaactttgcatctgctgccacaaaaaagataactgaatcagttgctgaaacagcacaaacaataaagaaatccgtagaagaaggaaaaatagatggcatcattgacaagacaattataggagattttcagaaggaacagaaaaaatttgttgaagacaaactgacattaaattctagatgttgacaattactgaatcagaaggcatgaaagagtataattttatgaaattcaaaattattcttttttcaagttgaaacttgcctcttctactttaaaaaagtatatagaacagttacttctaataatcagaaagagatgttttatagaacatttctttaatataaagttagagatgtcttcataggcagtatggctatctttgccacagaaacataagtaaaattttagagttctgttttccatgaggtcaaaaatataatttattcctcagtcatggttttctaaatatctgtactccacattccattttaattgatatgagggtgttaaagtacctacttaatgggttgattactatcaaaatgaccaaattataccaaagaacttaagaggaagcactttcagaactattcacttgccaggtattttctaaaattccacctgaaagccaaaagataaaataaataagttgattttaatgatataagcatcacacaattttacattaagaaatactgtgcaggccatgcgtggtggctcaggcctgtaatcccagcactttgggaggccgaggtgggcagatcaccggaggtcaggagttcgagaccagccttgccaacatagtgaaaccctgtctctactaaaaatacaaaaattagccgggcatggtggcaggcacctgtaatcccagctactagggaggcttttgaacccaggaggcagaggttgcagcgagctgagatcgcgccactgcactccagcctgggtgatagagtgagattcagtctcaaaaaaaaaaaaaaaaaaaagctgtgcgaaaatatttgtttttctctggggccttttctttcttttctttttaaactataccagaaattttacatcacagtttttatacaaagtgggaccttccatactttttgtattacaataaccttcagaagcccattccccttaaagtctgttgttcttgttttaatcatcaccacatataaatgttttagctttgtcttaaactgtgagtcttcataaaattgtgttcctccgagttcaccttctaggactttattgattaatccttctctttctgctataccagcagacacatattcatagaatatgattatttttaaagaacaaggtgaggaggctgaggcaggagaattgcttgaacctgggagatggaggttgcagtgagctgagatcacgccactgcactccagcctgggtgacagagtgagagactccgtctcaaaaatgaatgaatgaatgaatgaatgaatgaacgaacgaacaaggtggtttaatgtcagaaaacttcctaagcatttgctccccaaacctttcatgtttttcaagaagcctttattacataaaggggaatagaattaaaatgtttctttataagaaaaatatacatatttgtgttcttggccccattaaaactagtcagtagtcctttggcaaagatatagtcaacaagagaactgggtatgagtccaggcattactcctgttcatagttgtggatgcatgtgtctgagccagactgtctcaactggagtctcttgggttatagcagtaaacccgtgtattccatgaaaccactgggcccatcatcaaaaggtttccacttgtggtgccacagttgcttattactgagtttgggttccaagatgactggcaacttctgaaataatctcattgaaggaaagagtttcattttttttttaaaagagtttgctggaggaaaagaagcatgttaaatgtttttaagcagctaaaagtcctagatggaagcatatcaggatgtgtcggtgcttggctcttagtgaatgcactaaaattcttattgataaatgttgaataaacacacacaaaaaagtatcagagaaagagaaaaaccctacaatggcaatagaggtgtgtgacagttattgctatcaattttacataatatctcatttaaaaacaacctaattatgcattgcctgtgaaaataaaaggataaaataagattttgtacatactgtaag

SEQ ID NO: 29924 - protein, 122 aa, Homo sapiens; identical to SEQ ID NO: 29920

SEQ ID NO: 29925 - DNA, 2744 bp, Homo sapiens
ggtgttcctccgacttccggacatctccctgggagtcgcgcagagtggagtcaaaggcaaccagtgctcgctgcggtctctggggatcgggaccgcggcggcggcccgcgagcgggatgttccggggcttgagcagttggttgggcttgcagcagccggtggcaggcggtgggcagcccaatggagatgctccacccgagcagccgtccgagacggtggctgagtctgcggaggaggagctgcagcaagcgggagaccaggagctcctccaccaggccaaagacttcggcaactatttatttaactttgcatctgctgccacaaaaaagataactgaatcagttgctgaaacagcacaaacaataaagaaatccgtagaagaaggaaaaatagatggcatcattgacaagacaattataggagattttcagaaggaacagaaaaaatttgttgaagacaaactgacattaaattctagatgttgacaattactgaatcagaaggcatgaaagagtataattttatgaaattcaaaattattcttttttcaagttgaaacttgcctcttctactttaaaaaagtatatagaacagttacttctaataatcagaaagagatgttttatagaacatttctttaatataaagttagagatgtcttcataggcagtatggctatctttgccacagaaacataagtaaaattttagagttctgttttccatgaggtcaaaaatataatttattcctcagtcatggttttctaaatatctgtactccacattccattttaattgatatgagggtgttaaagtacctacttaatgggttgattactatcaaaatgaccaaattataccaaagaacttaagaggaagcactttcagaactattcacttgccaggtattttctaaaattccacctgaaagccaaaagataaaataaataagttgattttaatgatataagcatcacacaattttacattaagaaatactgtgcaggccatgcgtggtggctcaggcctgtaatcccagcactttgggaggccgaggtgggcagatcaccggaggtcaggagttcgagaccagccttgccaacatagtgaaaccctgtctctactaaaaatacaaaaattagccgggcatggtggcaggcacctgtaatcccagctactagggaggcttttgaacccaggaggcagaggttgcagcgagctgagatcgcgccactgcactccagcctgggtgatagagtgagattcagtctcaaaaaaaaaaaaaaaaaaaagctgtgcgaaaatatttgtttttctctggggccttttctttcttttctttttaaactataccagaaattttacatcacagtttttatacaaagtgggaccttccatactttttgtattacaataaccttcagaagcccattccccttaaagtctgttgttcttgttttaatcatcaccacatataaatgttttagctttgtcttaaactgtgagtcttcataaaattgtgttcctccgagttcaccttctaggactttattgattaatccttctctttctgctataccagcagacacatattcatagaatatgattatttttaaagaacaaggtgaggaggctgaggcaggagaattgcttgaacctgggagatggaggttgcagtgagctgagatcacgccactgcactccagcctgggtgacagagtgagagactccgtctcaaaaatgaatgaatgaatgaatgaatgaatgaacgaacgaacaaggtggtttaatgtcagaaaacttcctaagcatttgctccccaaacctttcatgtttttcaagaagcctttattacataaaggggaatagaattaaaatgtttctttataagaaaaatatacatatttgtgttcttggccccattaaaactagtcagtagtcctttggcaaagatatagtcaacaagagaactgggtatgagtccaggcattactcctgttcatagttgtggatgcatgtgtctgagccagactgtctcaactggagtctcttgggttatagcagtaaacccgtgtattccatgaaaccactgggcccatcatcaaaaggtttccacttgtggtgccacagttgcttattactgagtttgggttccaagatgactggcaacttctgaaataatctcattgaaggaaagagtttcattttttttttaaaagagtttgctggaggaaaagaagcatgttaaatgtttttaagcagctaaaagtcctagatggaagcatatcaggatgtgtcggtgcttggctcttagtgaatgcactaaaattcttattgataaatgttgaataaacacacacaaaaaagtatcagagaaagagaaaaaccctacaatggcaatagaggtgtgtgacagttattgctatcaattttacataatatctcatttaaaaacaacctaattatgcattgcctgtgaaaataaaaggataaaataagattttgtacatactgtaagaatacagttgtgctgtatttttatggattcatcaaggagtaaaatgttctgctttagtaaattatataggtaactgaagtgttattcctttaaagagcaaaataatttatcaccatgtttggtggaaaatttctaagtatttattacatgcctaggggttagccaacaagatataccaagcatgaaaacctgtaaaacttaataaaatgctaaaatatgaacatcac

SEQ ID NO: 29926 - protein, 122 aa, Homo sapiens; identical to SEQ ID NO: 29920

SEQ ID NO: 29927 - DNA, 3190 bp, Homo sapiens
tgaggcagaagcatcacctgggctggtgagatcaaggctacagtgagccatgttcacaccactgcactccggcctggatgacagagtgagactttgtctcaaaaaaaaataataataattaccaatttggccaatgggagactattcaagctgacttgtgtctttctaactcatccccatcatttcttcacacgtttccttgctttctggcacaagatagtattcttcctctgctctaaccctggaatcagccatttccccagggagctctggatccttttagtggaaagtctaaatcttggtattttgcaagatctggatgctaggtgtgctcattgccattggggtgccactgctctgcatgctctcagtggacacagccagggaatgtgtgtgtgctcatttctgtgtggaatgaaaaccatgtgttcatggtgctacctcatgacggaggtcattttcattttttccctttccatgtttgtagctctcctctctgatggtgagaaacctggtttctactatctttaatatttttacttattccctgtgcatgtggctgatctgtcatttttgctgccactcactcctctgctcaaacacccttctctccctgcttggttctcactctccgttccaggccacccccctgtgtggacacttacctcacccacttgggcaccaacacatcacaccaggtgattctaataggtagccaggtttgagaaccaccaagagttttcaggttgaactgcacttcaatctttttatcaagcatttcccaccccattgctaactcttactggttactagttattagcaagctgccaaacattctctttcataaggaacaacagccacaatgcttgcttctcactgctggaaggcatttaatcctcttgagaaacagcaagtgattggtggagtcctggctctgcttctggtttcccaggttgattatgctagtttcacaacaatgccatgttttcttctaccgagagcagtattggtatcattaagataccaagaaatgctgaggtttcattggtattctgtaacttgtattttgctgctacggggaagatagctgttaggtttatcctgttgttagctttcaattctaaagtgaatatgggctgggtgcggtggctcacgcctgtaatcccagcactttgggaggccgaggcgggcagatcatgaggtcaggagtttgagaccagccaggccaacattgtgaaaccccgtctctactaaaaatacaaaaattagctgtgcatggtggcgggcacctataatcccagcaactcgggaggctgaggcaagagaattgctggaacccaggaggcggaggttgcagtcagctgagatcacaccactgcactccaacctgggcaacagagcaagactccgtgtcaaaaaaaaaaaattgttaaagccaatatgaaccccctctgaacctcactcagctttgaaagtgctcttgcaaatcatctactccagtcccctttacaacaaataacccctgcgtgcacttgtctgtgtgcgttctcaaatgtgttcttgtctgtctgctttttattgattttcaattttgcctttttccactgttctaatttgcctttctttaaaagtgtgaaggaagaagtgttctggaggaactacttttaccgcgtctccctgattaagcagtcagcccagctcacggccctggctgcccaacagcaggccgcagggaaggaggagaagagcaatggcagagagcaagatttgccgctggcagaggcagtacggcccaaaacgccacccgttgtaatcaaatctcagcttaaaactcaagaggatgaggaagaaatttctactagcccaggtgtttctgagtttgtcagtgatgccttcgatgcctgtaacctaaatcaggaagatctaaggaaagaaatggagcaactagtgcttgacaaaaagcaagaggagacagccgtactggaagaggattctgcagattgggaaaaagaactgcagcaggaacttcaagaatatgaagtggtgacagaatctgaaaaacgagatgaaaactgggataaggaaatagagaaaatgcttcaagaggaaaattagctgttcctgaaatagaagaataatccttaacagtctgcaaactgacattaaattctagatgttgacaattactgaatcagaaggcatgaaagagtataattttatgaaattcaaaattattcttttttcaagttgaaacttgcctcttctactttaaaaaagtatatagaacagttacttctaataatcagaaagagatgttttatagaacatttctttaatataaagttagagatgtcttcataggcagtatggctatctttgccacagaaacataagtaaaattttagagttctgttttccatgaggtcaaaaatataatttattcctcagtcatggttttctaaatatctgtactccacattccattttaattgatatgagggtgttaaagtacctacttaatgggttgattactatcaaaatgaccaaattataccaaagaacttaagaggaagcactttcagaactattcacttgccaggtattttctaaaattccacctgaaagccaaaagataaaataaataagttgattttaatgatataagcatcacacaattttacattaagaaatactgtgcaggccatgcgtggtggctcaggcctgtaatcccagcactttgggaggccgaggtgggcagatcaccggaggtcaggagttcgagaccagccttgccaacatagtgaaaccctgtctctactaaaaatacaaaaattagccgggcatggtggcaggcacctgtaatcccagctactagggaggcttttgaacccaggaggcagaggttgcagcgagctgagatcgcgccactgcactccagcctgggtgatagagtgagattcagtctcaaaaaaaaaaaaaaaaaaaagctgtgcgaaaatatttgtttttctctggggccttttctttcttttctttttaaactataccagaaattttacatcacagtttttatacaaagtgggaccttccatactttttgtattacaataaccttcagaagcccattccccttaaagtctgttgttcttgttttaatcatcaccacatataaatgttttagctttgtctt

SEQ ID NO: 29928 - protein, 59 aa, Homo sapiens [sequence omitted]

SEQ ID NO: 29929 - DNA, 4212 bp, Homo sapiens
tgaggcagaagcatcacctgggctggtgagatcaaggctacagtgagccatgttcacaccactgcactccggcctggatgacagagtgagactttgtctcaaaaaaaaataataataattaccaatttggccaatgggagactattcaagctgacttgtgtctttctaactcatccccatcatttcttcacacgtttccttgctttctggcacaagatagtattcttcctctgctctaaccctggaatcagccatttccccagggagctctggatccttttagtggaaagtctaaatcttggtattttgcaagatctggatgctaggtgtgctcattgccattggggtgccactgctctgcatgctctcagtggacacagccagggaatgtgtgtgtgctcatttctgtgtggaatgaaaaccatgtgttcatggtgctacctcatgacggaggtcattttcattttttccctttccatgtttgtagctctcctctctgatggtgagaaacctggtttctactatctttaatatttttacttattccctgtgcatgtggctgatctgtcatttttgctgccactcactcctctgctcaaacacccttctctccctgcttggttctcactctccgttccaggccacccccctgtgtggacacttacctcacccacttgggcaccaacacatcacaccaggtgattctaataggtagccaggtttgagaaccaccaagagttttcaggttgaactgcacttcaatctttttatcaagcatttcccaccccattgctaactcttactggttactagttattagcaagctgccaaacattctctttcataaggaacaacagccacaatgcttgcttctcactgctggaaggcatttaatcctcttgagaaacagcaagtgattggtggagtcctggctctgcttctggtttcccaggttgattatgctagtttcacaacaatgccatgttttcttctaccgagagcagtattggtatcattaagataccaagaaatgctgaggtttcattggtattctgtaacttgtattttgctgctacggggaagatagctgttaggtttatcctgttgttagctttcaattctaaagtgaatatgggctgggtgcggtggctcacgcctgtaatcccagcactttgggaggccgaggcgggcagatcatgaggtcaggagtttgagaccagccaggccaacattgtgaaaccccgtctctactaaaaatacaaaaattagctgtgcatggtggcgggcacctataatcccagcaactcgggaggctgaggcaagagaattgctggaacccaggaggcggaggttgcagtcagctgagatcacaccactgcactccaacctgggcaacagagcaagactccgtgtcaaaaaaaaaaaattgttaaagccaatatgaaccccctctgaacctcactcagctttgaaagtgctcttgcaaatcatctactccagtcccctttacaacaaataacccctgcgtgcacttgtctgtgtgcgttctcaaatgtgttcttgtctgtctgctttttattgattttcaattttgcctttttccactgttctaatttgcctttctttaaaagtgtgaaggaagaagtgttctggaggaactacttttaccgcgtctccctgattaagcagtcagcccagctcacggccctggctgcccaacagcaggccgcagggaaggaggagaagagcaatggcagagagcaagatttgccgctggcagaggcagtacggcccaaaacgccacccgttgtaatcaaatctcagcttaaaactcaagaggatgaggaagaaatttctactagcccaggtgtttctgagtttgtcagtgatgccttcgatgcctgtaacctaaatcaggaagatctaaggaaagaaatggagcaactagtgcttgacaaaaagcaagaggagacagccgtactggaagaggattctgcagattgggaaaaagaactgcagcaggaacttcaagaatatgaagtggtgacagaatctgaaaaacgagatgaaaactgggataaggaaatagagaaaatgcttcaagaggaaaattagctgttcctgaaatagaagaataatccttaacagtctgcaaactgacattaaattctagatgttgacaattactgaatcagaaggcatgaaagagtataattttatgaaattcaaaattattcttttttcaagttgaaacttgcctcttctactttaaaaaagtatatagaacagttacttctaataatcagaaagagatgttttatagaacatttctttaatataaagttagagatgtcttcataggcagtatggctatctttgccacagaaacataagtaaaattttagagttctgttttccatgaggtcaaaaatataatttattcctcagtcatggttttctaaatatctgtactccacattccattttaattgatatgagggtgttaaagtacctacttaatgggttgattactatcaaaatgaccaaattataccaaagaacttaagaggaagcactttcagaactattcacttgccaggtattttctaaaattccacctgaaagccaaaagataaaataaataagttgattttaatgatataagcatcacacaattttacattaagaaatactgtgcaggccatgcgtggtggctcaggcctgtaatcccagcactttgggaggccgaggtgggcagatcaccggaggtcaggagttcgagaccagccttgccaacatagtgaaaccctgtctctactaaaaatacaaaaattagccgggcatggtggcaggcacctgtaatcccagctactagggaggcttttgaacccaggaggcagaggttgcagcgagctgagatcgcgccactgcactccagcctgggtgatagagtgagattcagtctcaaaaaaaaaaaaaaaaaaaagctgtgcgaaaatatttgtttttctctggggccttttctttcttttctttttaaactataccagaaattttacatcacagtttttatacaaagtgggaccttccatactttttgtattacaataaccttcagaagcccattccccttaaagtctgttgttcttgttttaatcatcaccacatataaatgttttagctttgtcttaaactgtgagtcttcataaaattgtgttcctccgagttcaccttctaggactttattgattaatccttctctttctgctataccagcagacacatattcatagaatatgattatttttaaagaacaaggtgaggaggctgaggcaggagaattgcttgaacctgggagatggaggttgcagtgagctgagatcacgccactgcactccagcctgggtgacagagtgagagactccgtctcaaaaatgaatgaatgaatgaatgaatgaatgaacgaacgaacaaggtggtttaatgtcagaaaacttcctaagcatttgctccccaaacctttcatgtttttcaagaagcctttattacataaaggggaatagaattaaaatgtttctttataagaaaaatatacatatttgtgttcttggccccattaaaactagtcagtagtcctttggcaaagatatagtcaacaagagaactgggtatgagtccaggcattactcctgttcatagttgtggatgcatgtgtctgagccagactgtctcaactggagtctcttgggttatagcagtaaacccgtgtattccatgaaaccactgggcccatcatcaaaaggtttccacttgtggtgccacagttgcttattactgagtttgggttccaagatgactggcaacttctgaaataatctcattgaaggaaagagtttcattttttttttaaaagagtttgctggaggaaaagaagcatgttaaatgtttttaagcagctaaaagtcctagatggaagcatatcaggatgtgtcggtgcttggctcttagtgaatgcactaaaattcttattgataaatgttgaataaacacacacaaaaaagtatcagagaaagagaaaaaccctacaatggcaatagaggtgtgtgacagttattgctatcaattttacataatatctcatttaaaaacaacctaattatgcattgcctgtgaaaataaaaggataaaataagattttgtacatactgtaag

SEQ ID NO: 29930 - protein, 59 aa, Homo sapiens [sequence omitted]

SEQ ID NO: 29931 - DNA, 4439 bp, Homo sapiens
tgaggcagaagcatcacctgggctggtgagatcaaggctacagtgagccatgttcacaccactgcactccggcctggatgacagagtgagactttgtctcaaaaaaaaataataataattaccaatttggccaatgggagactattcaagctgacttgtgtctttctaactcatccccatcatttcttcacacgtttccttgctttctggcacaagatagtattcttcctctgctctaaccctggaatcagccatttccccagggagctctggatccttttagtggaaagtctaaatcttggtattttgcaagatctggatgctaggtgtgctcattgccattggggtgccactgctctgcatgctctcagtggacacagccagggaatgtgtgtgtgctcatttctgtgtggaatgaaaaccatgtgttcatggtgctacctcatgacggaggtcattttcattttttccctttccatgtttgtagctctcctctctgatggtgagaaacctggtttctactatctttaatatttttacttattccctgtgcatgtggctgatctgtcatttttgctgccactcactcctctgctcaaacacccttctctccctgcttggttctcactctccgttccaggccacccccctgtgtggacacttacctcacccacttgggcaccaacacatcacaccaggtgattctaataggtagccaggtttgagaaccaccaagagttttcaggttgaactgcacttcaatctttttatcaagcatttcccaccccattgctaactcttactggttactagttattagcaagctgccaaacattctctttcataaggaacaacagccacaatgcttgcttctcactgctggaaggcatttaatcctcttgagaaacagcaagtgattggtggagtcctggctctgcttctggtttcccaggttgattatgctagtttcacaacaatgccatgttttcttctaccgagagcagtattggtatcattaagataccaagaaatgctgaggtttcattggtattctgtaacttgtattttgctgctacggggaagatagctgttaggtttatcctgttgttagctttcaattctaaagtgaatatgggctgggtgcggtggctcacgcctgtaatcccagcactttgggaggccgaggcgggcagatcatgaggtcaggagtttgagaccagccaggccaacattgtgaaaccccgtctctactaaaaatacaaaaattagctgtgcatggtggcgggcacctataatcccagcaactcgggaggctgaggcaagagaattgctggaacccaggaggcggaggttgcagtcagctgagatcacaccactgcactccaacctgggcaacagagcaagactccgtgtcaaaaaaaaaaaattgttaaagccaatatgaaccccctctgaacctcactcagctttgaaagtgctcttgcaaatcatctactccagtcccctttacaacaaataacccctgcgtgcacttgtctgtgtgcgttctcaaatgtgttcttgtctgtctgctttttattgattttcaattttgcctttttccactgttctaatttgcctttctttaaaagtgtgaaggaagaagtgttctggaggaactacttttaccgcgtctccctgattaagcagtcagcccagctcacggccctggctgcccaacagcaggccgcagggaaggaggagaagagcaatggcagagagcaagatttgccgctggcagaggcagtacggcccaaaacgccacccgttgtaatcaaatctcagcttaaaactcaagaggatgaggaagaaatttctactagcccaggtgtttctgagtttgtcagtgatgccttcgatgcctgtaacctaaatcaggaagatctaaggaaagaaatggagcaactagtgcttgacaaaaagcaagaggagacagccgtactggaagaggattctgcagattgggaaaaagaactgcagcaggaacttcaagaatatgaagtggtgacagaatctgaaaaacgagatgaaaactgggataaggaaatagagaaaatgcttcaagaggaaaattagctgttcctgaaatagaagaataatccttaacagtctgcaaactgacattaaattctagatgttgacaattactgaatcagaaggcatgaaagagtataattttatgaaattcaaaattattcttttttcaagttgaaacttgcctcttctactttaaaaaagtatatagaacagttacttctaataatcagaaagagatgttttatagaacatttctttaatataaagttagagatgtcttcataggcagtatggctatctttgccacagaaacataagtaaaattttagagttctgttttccatgaggtcaaaaatataatttattcctcagtcatggttttctaaatatctgtactccacattccattttaattgatatgagggtgttaaagtacctacttaatgggttgattactatcaaaatgaccaaattataccaaagaacttaagaggaagcactttcagaactattcacttgccaggtattttctaaaattccacctgaaagccaaaagataaaataaataagttgattttaatgatataagcatcacacaattttacattaagaaatactgtgcaggccatgcgtggtggctcaggcctgtaatcccagcactttgggaggccgaggtgggcagatcaccggaggtcaggagttcgagaccagccttgccaacatagtgaaaccctgtctctactaaaaatacaaaaattagccgggcatggtggcaggcacctgtaatcccagctactagggaggcttttgaacccaggaggcagaggttgcagcgagctgagatcgcgccactgcactccagcctgggtgatagagtgagattcagtctcaaaaaaaaaaaaaaaaaaaagctgtgcgaaaatatttgtttttctctggggccttttctttcttttctttttaaactataccagaaattttacatcacagtttttatacaaagtgggaccttccatactttttgtattacaataaccttcagaagcccattccccttaaagtctgttgttcttgttttaatcatcaccacatataaatgttttagctttgtcttaaactgtgagtcttcataaaattgtgttcctccgagttcaccttctaggactttattgattaatccttctctttctgctataccagcagacacatattcatagaatatgattatttttaaagaacaaggtgaggaggctgaggcaggagaattgcttgaacctgggagatggaggttgcagtgagctgagatcacgccactgcactccagcctgggtgacagagtgagagactccgtctcaaaaatgaatgaatgaatgaatgaatgaatgaacgaacgaacaaggtggtttaatgtcagaaaacttcctaagcatttgctccccaaacctttcatgtttttcaagaagcctttattacataaaggggaatagaattaaaatgtttctttataagaaaaatatacatatttgtgttcttggccccattaaaactagtcagtagtcctttggcaaagatatagtcaacaagagaactgggtatgagtccaggcattactcctgttcatagttgtggatgcatgtgtctgagccagactgtctcaactggagtctcttgggttatagcagtaaacccgtgtattccatgaaaccactgggcccatcatcaaaaggtttccacttgtggtgccacagttgcttattactgagtttgggttccaagatgactggcaacttctgaaataatctcattgaaggaaagagtttcattttttttttaaaagagtttgctggaggaaaagaagcatgttaaatgtttttaagcagctaaaagtcctagatggaagcatatcaggatgtgtcggtgcttggctcttagtgaatgcactaaaattcttattgataaatgttgaataaacacacacaaaaaagtatcagagaaagagaaaaaccctacaatggcaatagaggtgtgtgacagttattgctatcaattttacataatatctcatttaaaaacaacctaattatgcattgcctgtgaaaataaaaggataaaataagattttgtacatactgtaagaatacagttgtgctgtatttttatggattcatcaaggagtaaaatgttctgctttagtaaattatataggtaactgaagtgttattcctttaaagagcaaaataatttatcaccatgtttggtggaaaatttctaagtatttattacatgcctaggggttagccaacaagatataccaagcatgaaaacctgtaaaacttaataaaatgctaaaatatgaacatcac

SEQ ID NO: 29932 - protein, 59 aa, Homo sapiens [sequence omitted]

SEQ ID NO: 29933 - DNA, 429 bp, Homo sapiens
tcctattaataatttcttttttatgtttcttttttctttttttaaaattgagatagggtcttgctctgttgcccaggctggtctcaaactcctggactcaagtgatcctcccacctcagtgggagccacggtgccctgctccatgtttcttatcttttctcttctattttcctatatcctgttttgctacagacagttccagggttacaaggcatgagccaccacgcccggccaggttaagtgtattaaatgcattttccacttatgatattttcaacttctgatgggtttattggaacataacgccatcataagtcaggaaacatctgtactttgtagatgatctcaactttgtcttctaatactactaatgaagttttgatcaatgtcatattttatttactttttatttaattattaatttgtgag

SEQ ID NO: 29934 - protein, 64 aa, Homo sapiens [sequence omitted]

SEQ ID NO: 29935 - DNA, 2047 bp, Homo sapiens
gagattctgtgccccttgtcgggccgcttgtttggctgctgccgtcacctcatggcgacgcgggtagaggaggcagcgcggggaagaggcggcggcgccgaagaggcgactgaggccggacggggcggacggcgacgcagcccgcggcagaagtttgaaattggcacaatggaagaagctggaatttgtgggctaggggtgaaagcagatatgttgtgtaactctcaatcaaatgatattcttcaacatcaaggctcaaattgtggtggcacaagtaacaagcattcattggaagaggatgaaggcagtgactttataacagagaacaggaatttggtgagcccagcatactgcacgcaagaatcaagagaggaaatccctgggggagaagctcgaacagatccccctgatggtcagcaagattcagagtgcaacaggaacaaagaaaaaactttaggaaaagaagttttattactgatgcaagccctaaacaccctttcaaccccagaggagaagctggcagctctctgtaagaaatatgctgatcttctggaggagagcaggagtgttcagaagcaaatgaagatcctgcagaagaagcaagcccagattgtgaaagagaaagttcacttgcagagtgaacatagcaaggctatcttggcaagaagcaagctagaatctctttgcagagaacttcagcgtcacaataagacgttaaaggaggaaaatatgcagcaggcacgagaggaagaagaacgacgtaaagaagcaactgcacatttccagattaccttaaatgaaattcaagcccagctggagcagcatgacatccacaacgccaaactccgacaggaaaacattgagctgggggagaagctaaagaagctcatcgaacagtacgcactgagggaagagcacattgataaggtgttcaaacataaggaactgcaacagcagctcgtggatgccaaactgcagcaaacgacacaactgataaaagaagctgatgaaaaacatcagagagagagagagtttttattaaaagaagcgacagaatcgaggcacaaatacgaacaaatgaaacagcaagaagtacaactaaaacagcagctttctctttatatggataagtttgaagaattccagactaccatggcaaaaagcaatgaactgtttacaaccttcagacaggaaatggaaaagatgacaaagaaaattaaaaaactggaaaaagaaacaataatttggcgtaccaaatgggaaaacaataataaagcacttctgcaaatggctgaagagaaaacagtccgtgataaagagtacaaggcccttcaaataaaactggaacggttagagaagctgtgcagggctcttcagacagaaaggaatgagctcaatgagaaggtggaagtcctgaaagagcaggtatccatcaaagcggccatcaaagcggcgaacagggatttagcaacacctgtgatgcagccctgtactgccctggattctcacaaggagctgaacacttcctcgaaaagagccctgggagcgcacctggaggctgagcccaagagtcagagaagcgctgtgcaaaagcccccgtccacaggctctgctccggccatcgagtcggttgactaagatgaggtgtgatcactgtattgagagatatattttgtgtataactttctctgttagtagttaactattggttttgtggtgaaaattttcttactttttctaccatatctgtattttcttagaactactggacttatgtggtacaggaggctgcttagcagttttgaatagtttaatctataaattttcctcagctgtgttgcacatcagcctcgttctccctccactggaatgcatgtgttcattgccttgtcctttctctccctgctccttgcacattatcatcctaatgaaaatttcactgacagggccgaccattacaagggaactttgttctgacgatggttccttgatgtgaaaacaatattaatttaaacgtcttagcccccccccccataatattattcag

SEQ ID NO: 29936 - protein, 528 aa, Homo sapiens
MATRVEEAARGRGGGAEEATEAGRGGRRRSPRQKFEIGTMEEAGICGLGVKADMLCNSQSNDILQHQGSNCGGTSNKHSLEEDEGSDFITENRNLVSPAYCTQESREEIPGGEARTDPPDGQQDSECNRNKEKTLGKEVLLLMQALNTLSTPEEKLAALCKKYADLLEESRSVQKQMKILQKKQAQIVKEKVHLQSEHSKAILARSKLESLCRELQRHNKTLKEENMQQAREEEERRKEATAHFQITLNEIQAQLEQHDIHNAKLRQENIELGEKLKKLIEQYALREEHIDKVFKHKELQQQLVDAKLQQTTQLIKEADEKHQREREFLLKEATESRHKYEQMKQQEVQLKQQLSLYMDKFEEFQTTMAKSNELFTTFRQEMEKMTKKIKKLEKETIIWRTKWENNNKALLQMAEEKTVRDKEYKALQIKLERLEKLCRALQTERNELNEKVEVLKEQVSIKAAIKAANRDLATPVMQPCTALDSHKELNTSSKRALGAHLEAEPKSQRSAVQKPPSTGSAPAIESVD

SEQ ID NO: 29937 - DNA, 4391 bp, Homo sapiens
gagattctgtgccccttgtcgggccgcttgtttggctgctgccgtcacctcatggcgacgcgggtagaggaggcagcgcggggaagaggcggcggcgccgaagaggcgactgaggccggacggggcggacggcgacgcagcccgcggcagaagtttgaaattggcacaatggaagaagctggaatttgtgggctaggggtgaaagcagatatgttgtgtaactctcaatcaaatgatattcttcaacatcaaggctcaaattgtggtggcacaagtaacaagcattcattggaagaggatgaaggcagtgactttataacagagaacaggaatttggtgagcccagcatactgcacgcaagaatcaagagaggaaatccctgggggagaagctcgaacagatccccctgatggtcagcaagattcagagtgcaacaggaacaaagaaaaaactttaggaaaagaagttttattactgatgcaagccctaaacaccctttcaaccccagaggagaagctggcagctctctgtaagaaatatgctgatcttctggaggagagcaggagtgttcagaagcaaatgaagatcctgcagaagaagcaagcccagattgtgaaagagaaagttcacttgcagagtgaacatagcaaggctatcttggcaagaagcaagctagaatctctttgcagagaacttcagcgtcacaataagacgttaaaggaggaaaatatgcagcaggcacgagaggaagaagaacgacgtaaagaagcaactgcacatttccagattaccttaaatgaaattcaagcccagctggagcagcatgacatccacaacgccaaactccgacaggaaaacattgagctgggggagaagctaaagaagctcatcgaacagtacgcactgagggaagagcacattgataaggtgttcaaacataaggaactgcaacagcagctcgtggatgccaaactgcagcaaacgacacaactgataaaagaagctgatgaaaaacatcagagagagagagagtttttattaaaagaagcgacagaatcgaggcacaaatacgaacaaatgaaacagcaagaagtacaactaaaacagcagctttctctttatatggataagtttgaagaattccagactaccatggcaaaaagcaatgaactgtttacaaccttcagacaggaaatggaaaagatgacaaagaaaattaaaaaactggaaaaagaaacaataatttggcgtaccaaatgggaaaacaataataaagcacttctgcaaatggctgaagagaaaacagtccgtgataaagagtacaaggcccttcaaataaaactggaacggttagagaagctgtgcagggctcttcagacagaaaggaatgagctcaatgagaaggtggaagtcctgaaagagcaggtatccatcaaagcggccatcaaagcggcgaacagggatttagcaacacctgtgatgcagccctgtactgccctggattctcacaaggagctgaacacttcctcgaaaagagccctgggagcgcacctggaggctgagcccaagagtcagagaagcgctgtgcaaaagcccccgtccacaggctctgctccggccatcgagtcggttgactaagatgaggtgtgatcactgtattgagagatatattttgtgtataactttctctgttagtagttaactattggttttgtggtgaaaattttcttactttttctaccatatctgtattttcttagaactactggacttatgtggtacaggaggctgcttagcagttttgaatagtttaatctataaattttcctcagctgtgttgcacatcagcctcgttctccctccactggaatgcatgtgttcattgccttgtcctttctctccctgctccttgcacattatcatcctaatgaaaatttcactgacagggccgaccattacaagggaactttgttctgacgatggttccttgatgtgaaaacaatattaatttaaacgtcttagcccccccccccataatattattcagaaaaacaaaataccaaggcgattagttttgtctaataacccatttaaatgccaagtaaaaataaaactcctagtgttgggtcagaagcatatttgattgaaattagctttttgaaaacatttatatctcgggacaaattgagatggccacatgcctagaatcctaagtttcggcagaatatgtatataaagatgtcacttgtggacaaaatagtacatagaggcaaatcactagacaaataagcttagtgtttacgtgactgaacagtcatcctgctttggtttcaggtgtgggatttggaccatgaggggctcccgtagaggatggcggtttgtgtttgattctgatttgggatttcagtacatattctccacttcccatagaaggccacttattctttgaaaactggtgttcatgtttgccgttcaatgaagtcccttgtcaaagacaaggacggtcaattcacgtgtcactttcactaggcagaagtttctccaataccttctggctacttgaaagttactacaaaaattccaccagcaaagtactccaggtttttcaaaagggaattttcattatggatcagtaccaaccgaaattgattttcatttccaaaacaaacactggcaccaacatttttactttgggaagacttggcagagtgttagtcatgatctgttacttacgtgttcagtctgttttctcacccccttcttagttaccatctcttttttaagaagaaaaaagaaaagccacagtattatcaaggtctctacacttggactgggggaaaatttgaaattaagcacataacttttgaattagttctttgtttcaatgttgaatgtggcgcagttatgcagatgattaatcaggctgcactgatggaagttttgactttgtccctggtataatttgcattgaaatgctttatgaaataaaaggttctactagaactgatgttagcacattccactgagcaaaactatcagactgacacttgttaaattgcttactggactgaataaactctgttttgtccagttaaaagggttttctctttgttacaagtgttatttgtaaagtcctgtcacattcatggtcgaaactgggttgaaagaattgaaaattgtccaacagatagatagataggaaaccgcctggagtggaggagggttgtatctaagcctccactatcagtcatgttaattcaaggggccacagtggaggaaaataaatccacaaagtagattatctaattaccatcaaaatgagtcagaagcaaaaaacaccaccctccaacagcctcttaggagtacaccctgttctgctactaaaatactagactcatttccctggtggtgggggggaatgcaggtatagatcagaaatataatccaccttaaaattagtactaatgatcacattatttcacaagaactctgctggatgtacagctcttaacattttattaagccatttgtgtagcccaccacgtttctttgtggtgcttgtcctgtgtggaagattgtaaatcttgggcctgttgcatacttccaagggctttaaagcaatgtgattaacagtacttggcctgctgcttttggcttactttgtatttttagctagatgctattatagtgttgaaaggatatggattctgtctgggatgcatttgttgtcctttcagaacccttcctcccattaccctgtgaataaaaacaaatgggaccccctgagaaggacatcttcctacagtgatcacctcaccagcccagtgttgtggctttgtagcgcaccccgtatctaccatattctagaacactgtaatgctactaggctggcccagaaaaggtttaaatgttgaattcacttaaattgcaattgttgcaccatcatggaatcgtgatgtgtattatttatattggcggtggactccaaggtgtagagaaaacttgggtcttgggtaatatggaccatttcatcctcagacttgttaggagtacatttcttggtcttgagaccagtatttttcagttatgtatgcaactgcctttattacacctggttatcacaattcaattctcaggtgttgcagaaaaatctacctctttcagactgtagatggaaataactgtgaaaaaaatgatgcagatatcttctagtttgtgctaaacacactgctttatttttacagcccacgtctttcatgaggatacgaattgttaagaggcagtctcgttttgcttttcaaagacattttgtagagatttttcactaatgtgaatctgattttatctacttgattctgtatagattaagtaaatatgtatgataaacttaa

SEQ ID NO: 29938 - protein, 528 aa, Homo sapiens; identical to SEQ ID NO: 29936

SEQ ID NO: 29939 - DNA, 636 bp, Homo sapiens
acttcaagtgtgatccaaggtctggcagcatcatcactgttgcccgggcatttgttaaaatgcagatcctcaggccccaaccaaggcctagtgaatcagaatgtgcattttaaccacaagttcaatgatcggtgtgagtctgagaacaaccaccccagatcactgtttgttctctcttctaaccaattcatggctgtctgtcattgtcacatcactgggttgggtagctaaccttcgacactgctttttctggtttttactcttttctccattttttcttttcccttttctgttcttgtctttcttctttttccgccatttcttgcatgattctccccatgtgaaaggcaccaagggggactggcttccacagccaatggaagcattcctttcctgaagccatcaatccaaccacgctgtgttttcggccatctttgcatttgtgactgctctgggacattttcactgatgcacagggcgtcctgttgctacaaatagtgaaaggtgccaagctgctgaatgccagctaactgaggtatacctggaccacttcataaactaagggaaagtaactgtcattttttttttttttgagtcagagttaacagaattcagtttttttattttttatttttt

SEQ ID NO: 29940 - protein, 98 aa, Homo sapiens [sequence omitted]

SEQ ID NO: 29941 - DNA, 3231 bp, Homo sapiens
aaaaactggaaaaagaaacaataatttggcgtaccaaatgggaaaacaataataaagcacttctgcaaatggctgaagaggtgagatggtttcctgcgactaaggtgtagtcttagtcatggggactccttgagttcagaaaacagtccgtgataaagagtacaaggcccttcaaataaaactggaacggttagagaagctgtgcagggctcttcagacagaaaggaatgagctcaatgagaaggtggaagtcctgaaagagcaggtatccatcaaagcggccatcaaagcggcgaacagggatttagcaacacctgtgatgcagccctgtactgccctggattctcacaaggagctgaacacttcctcgaaaagagccctgggagcgcacctggaggctgagcccaagagtcagagaagcgctgtgcaaaagcccccgtccacaggctctgctccggccatcgagtcggttgactaagatgaggtgtgatcactgtattgagagatatattttgtgtataactttctctgttagtagttaactattggttttgtggtgaaaattttcttactttttctaccatatctgtattttcttagaactactggacttatgtggtacaggaggctgcttagcagttttgaatagtttaatctataaattttcctcagctgtgttgcacatcagcctcgttctccctccactggaatgcatgtgttcattgccttgtcctttctctccctgctccttgcacattatcatcctaatgaaaatttcactgacagggccgaccattacaagggaactttgttctgacgatggttccttgatgtgaaaacaatattaatttaaacgtcttagcccccccccccataatattattcagaaaaacaaaataccaaggcgattagttttgtctaataacccatttaaatgccaagtaaaaataaaactcctagtgttgggtcagaagcatatttgattgaaattagctttttgaaaacatttatatctcgggacaaattgagatggccacatgcctagaatcctaagtttcggcagaatatgtatataaagatgtcacttgtggacaaaatagtacatagaggcaaatcactagacaaataagcttagtgtttacgtgactgaacagtcatcctgctttggtttcaggtgtgggatttggaccatgaggggctcccgtagaggatggcggtttgtgtttgattctgatttgggatttcagtacatattctccacttcccatagaaggccacttattctttgaaaactggtgttcatgtttgccgttcaatgaagtcccttgtcaaagacaaggacggtcaattcacgtgtcactttcactaggcagaagtttctccaataccttctggctacttgaaagttactacaaaaattccaccagcaaagtactccaggtttttcaaaagggaattttcattatggatcagtaccaaccgaaattgattttcatttccaaaacaaacactggcaccaacatttttactttgggaagacttggcagagtgttagtcatgatctgttacttacgtgttcagtctgttttctcacccccttcttagttaccatctcttttttaagaagaaaaaagaaaagccacagtattatcaaggtctctacacttggactgggggaaaatttgaaattaagcacataacttttgaattagttctttgtttcaatgttgaatgtggcgcagttatgcagatgattaatcaggctgcactgatggaagttttgactttgtccctggtataatttgcattgaaatgctttatgaaataaaaggttctactagaactgatgttagcacattccactgagcaaaactatcagactgacacttgttaaattgcttactggactgaataaactctgttttgtccagttaaaagggttttctctttgttacaagtgttatttgtaaagtcctgtcacattcatggtcgaaactgggttgaaagaattgaaaattgtccaacagatagatagataggaaaccgcctggagtggaggagggttgtatctaagcctccactatcagtcatgttaattcaaggggccacagtggaggaaaataaatccacaaagtagattatctaattaccatcaaaatgagtcagaagcaaaaaacaccaccctccaacagcctcttaggagtacaccctgttctgctactaaaatactagactcatttccctggtggtgggggggaatgcaggtatagatcagaaatataatccaccttaaaattagtactaatgatcacattatttcacaagaactctgctggatgtacagctcttaacattttattaagccatttgtgtagcccaccacgtttctttgtggtgcttgtcctgtgtggaagattgtaaatcttgggcctgttgcatacttccaagggctttaaagcaatgtgattaacagtacttggcctgctgcttttggcttactttgtatttttagctagatgctattatagtgttgaaaggatatggattctgtctgggatgcatttgttgtcctttcagaacccttcctcccattaccctgtgaataaaaacaaatgggaccccctgagaaggacatcttcctacagtgatcacctcaccagcccagtgttgtggctttgtagcgcaccccgtatctaccatattctagaacactgtaatgctactaggctggcccagaaaaggtttaaatgttgaattcacttaaattgcaattgttgcaccatcatggaatcgtgatgtgtattatttatattggcggtggactccaaggtgtagagaaaacttgggtcttgggtaatatggaccatttcatcctcagacttgttaggagtacatttcttggtcttgagaccagtatttttcagttatgtatgcaactgcctttattacacctggttatcacaattcaattctcaggtgttgcagaaaaatctacctctttcagactgtagatggaaataactgtgaaaaaaatgatgcagatatcttctagtttgtgctaaacacactgctttatttttacagcccacgtctttcatgaggatacgaattgttaagaggcagtctcgttttgcttttcaaagacattttgtagagatttttcactaatgtgaatctgattttatctacttgattctgtatagattaagtaaatatgtatgataaacttaa

SEQ ID NO: 29942 - protein, 87 aa, Homo sapiens [sequence omitted]

SEQ ID NO: 29943 - DNA, 2131 bp, Homo sapiens
tttcagattttagctggaaccccaatgagccttgggtcatttgctcagtgtctgaggataacatcatgcagatatggcaaatggctgaaaatatttacaatgatgaagagtcagatgtcacgacatccgaactggagggacaaggatcttaaacccaaagtacgagaaatgtttctgttgaatgtaatgctacatgaatgcttgatttatcaagcgccaaaaaggcattgtatagtaggaaatgtaagtggggtggcttatggcttctttatcctctgattctagcactttcaagtgagctgttgcgtactgtatcatattgtagctattagggaagagaagaatgttgcttaagaaagaacatcaccattgattttaaatacaagtagcagggtattgcctttgattcaactgttttaagtcctcattttctcaaactaagtgcttgctgttcccaaatatgcaagaataacttttacactttttccttccaacacttcttgattggctttgcagaaataaagttttaaaataaaacttgtgtttttttaaaagcttagtgggggggggcgggggagtctactttttgagtagaaatgggtaaaatggtacctttggactcctacagttaaggtcacatggataatgaaagaatacacagaagctgttaagtttatcatacatatttacttaatctatacagaatcaagtagataaaatcagattcacattagtgaaaaatctctacaaaatgtctttgaaaagcaaaacgagactgcctcttaacaattcgtatcctcatgaaagacgtgggctgtaaaaataaagcagtgtgtttagcacaaactagaagatatctgcatcatttttttcacagttatttccatctacagtctgaaagaggtagatttttctgcaacacctgagaattgaattgtgataaccaggtgtaataaaggcagttgcatacataactgaaaaatactggtctcaagaccaagaaatgtactcctaacaagtctgaggatgaaatggtccatattacccaagacccaagttttctctacaccttggagtccaccgccaatataaataatacacatcacgattccatgatggtgcaacaattgcaatttaagtgaattcaacatttaaaccttttctgggccagcctagtagcattacagtgttctagaatatggtagatacggggtgcgctacaaagccacaacactgggctggtgaggtgatcactgtaggaagatgtccttctcagggggtcccatttgtttttattcacagggtaatgggaggaagggttctgaaaggacaacaaatgcatcccagacagaatccatatcctttcaacactataatagcatctagctaaaaatacaaagtaagccaaaagcagcaggccaagtactgttaatcacattgctttaaagcccttggaagtatgcaacaggcccaagatttacaatcttccacacaggacaagcaccacaaagaaacgtggtgggctacacaaatggcttaataaaatgttaagagctgtacatccagcagagttcttgtgaaataatgtgatcattagtactaattttaaggtggattatatttctgatctatacctgcattcccccccaccaccagggaaatgagtctagtattttagtagcagaacagggtgtactcctaagaggctgttggagggtggtgttttttgcttctgactcattttgatggtaattagataatctactttgtggatttattttcctccactgtggccccttgaattaacatgactgatagtggaggcttagatacaaccctcctccactccaggcggtttcctatctatctatctgttggacaattttcaattctttcaacccagtttcgaccatgaatgtgacaggactttacaaataacacttgtaacaaagagaaaacccttttaactggacaaaacagagtttattcagtccagtaagcaatttaacaagtgtcagtctgatagttttgctcagtggaatgtgctaacatcagttctagtagaaccttttatttcataaagcatttcaatgcaaattataccagggacaaagtcaaaacttccatcagt

SEQ ID NO: 29944 - protein, 84 aa, Homo sapiens
MSLGSFAQCLRITSCRYGKWLKIFTMMKSQMSRHPNWRDKDLKPKVREMFLLNVMLHECLIYQAPKRHCIVGNVSGVAYGFFIL

SEQ ID NO: 29945 - DNA, 2159 bp, Homo sapiens
tttattcatggaggacacactgctaagatttcagattttagctggaaccccaatgagccttgggtcatttgctcagtgtctgaggataacatcatgcagatatggcaaatggctgaaaatatttacaatgatgaagagtcagatgtcacgacatccgaactggagggacaaggatcttaaacccaaagtacgagaaatgtttctgttgaatgtaatgctacatgaatgcttgatttatcaagcgccaaaaaggcattgtatagtaggaaatgtaagtggggtggcttatggcttctttatcctctgattctagcactttcaagtgagctgttgcgtactgtatcatattgtagctattagggaagagaagaatgttgcttaagaaagaacatcaccattgattttaaatacaagtagcagggtattgcctttgattcaactgttttaagtcctcattttctcaaactaagtgcttgctgttcccaaatatgcaagaataacttttacactttttccttccaacacttcttgattggctttgcagaaataaagttttaaaataaaacttgtgtttttttaaaagcttagtgggggggggcgggggagtctactttttgagtagaaatgggtaaaatggtacctttggactcctacagttaaggtcacatggataatgaaagaatacacagaagctgttaagtttatcatacatatttacttaatctatacagaatcaagtagataaaatcagattcacattagtgaaaaatctctacaaaatgtctttgaaaagcaaaacgagactgcctcttaacaattcgtatcctcatgaaagacgtgggctgtaaaaataaagcagtgtgtttagcacaaactagaagatatctgcatcatttttttcacagttatttccatctacagtctgaaagaggtagatttttctgcaacacctgagaattgaattgtgataaccaggtgtaataaaggcagttgcatacataactgaaaaatactggtctcaagaccaagaaatgtactcctaacaagtctgaggatgaaatggtccatattacccaagacccaagttttctctacaccttggagtccaccgccaatataaataatacacatcacgattccatgatggtgcaacaattgcaatttaagtgaattcaacatttaaaccttttctgggccagcctagtagcattacagtgttctagaatatggtagatacggggtgcgctacaaagccacaacactgggctggtgaggtgatcactgtaggaagatgtccttctcagggggtcccatttgtttttattcacagggtaatgggaggaagggttctgaaaggacaacaaatgcatcccagacagaatccatatcctttcaacactataatagcatctagctaaaaatacaaagtaagccaaaagcagcaggccaagtactgttaatcacattgctttaaagcccttggaagtatgcaacaggcccaagatttacaatcttccacacaggacaagcaccacaaagaaacgtggtgggctacacaaatggcttaataaaatgttaagagctgtacatccagcagagttcttgtgaaataatgtgatcattagtactaattttaaggtggattatatttctgatctatacctgcattcccccccaccaccagggaaatgagtctagtattttagtagcagaacagggtgtactcctaagaggctgttggagggtggtgttttttgcttctgactcattttgatggtaattagataatctactttgtggatttattttcctccactgtggccccttgaattaacatgactgatagtggaggcttagatacaaccctcctccactccaggcggtttcctatctatctatctgttggacaattttcaattctttcaacccagtttcgaccatgaatgtgacaggactttacaaataacacttgtaacaaagagaaaacccttttaactggacaaaacagagtttattcagtccagtaagcaatttaacaagtgtcagtctgatagttttgctcagtggaatgtgctaacatcagttctagtagaaccttttatttcataaagcatttcaatgcaaattataccagggacaaagtcaaaacttccatcagt

SEQ ID NO: 29946 - protein, 99 aa, Homo sapiens
MEDTLLRFQILAGTPMSLGSFAQCLRITSCRYGKWLKIFTMMKSQMSRHPNWRDKDLKPKVREMFLLNVMLHECLIYQAPKRHCIVGNVSGVAYGFFIL

SEQ ID NO: 29947 - DNA, 2453 bp, Homo sapiens
cttgcagagcacttgaaagtcggggacaagagagtgaggccatcaggccaaggataagataatagagtgcaagatgggaaaatatcagattagaacaacagccacaaacctagcagcggatgattctttaaatacattttcaaaattatctattactaggtccactggtctccacataatgaaactattctggcttcaagtggtactgaccgccgcctgaatgtgtgggatttaagtaaaattggggaagaacaatcagcagaagatgcagaagatgggcctccagaactcctgtttattcatggaggacacactgctaagatttcagattttagctggaaccccaatgagccttgggtcatttgctcagtgtctgaggataacatcatgcagatatggcaaatggctgaaaatatttacaatgatgaagagtcagatgtcacgacatccgaactggagggacaaggatcttaaacccaaagtacgagaaatgtttctgttgaatgtaatgctacatgaatgcttgatttatcaagcgccaaaaaggcattgtatagtaggaaatgtaagtggggtggcttatggcttctttatcctctgattctagcactttcaagtgagctgttgcgtactgtatcatattgtagctattagggaagagaagaatgttgcttaagaaagaacatcaccattgattttaaatacaagtagcagggtattgcctttgattcaactgttttaagtcctcattttctcaaactaagtgcttgctgttcccaaatatgcaagaataacttttacactttttccttccaacacttcttgattggctttgcagaaataaagttttaaaataaaacttgtgtttttttaaaagcttagtgggggggggcgggggagtctactttttgagtagaaatgggtaaaatggtacctttggactcctacagttaaggtcacatggataatgaaagaatacacagaagctgttaagtttatcatacatatttacttaatctatacagaatcaagtagataaaatcagattcacattagtgaaaaatctctacaaaatgtctttgaaaagcaaaacgagactgcctcttaacaattcgtatcctcatgaaagacgtgggctgtaaaaataaagcagtgtgtttagcacaaactagaagatatctgcatcatttttttcacagttatttccatctacagtctgaaagaggtagatttttctgcaacacctgagaattgaattgtgataaccaggtgtaataaaggcagttgcatacataactgaaaaatactggtctcaagaccaagaaatgtactcctaacaagtctgaggatgaaatggtccatattacccaagacccaagttttctctacaccttggagtccaccgccaatataaataatacacatcacgattccatgatggtgcaacaattgcaatttaagtgaattcaacatttaaaccttttctgggccagcctagtagcattacagtgttctagaatatggtagatacggggtgcgctacaaagccacaacactgggctggtgaggtgatcactgtaggaagatgtccttctcagggggtcccatttgtttttattcacagggtaatgggaggaagggttctgaaaggacaacaaatgcatcccagacagaatccatatcctttcaacactataatagcatctagctaaaaatacaaagtaagccaaaagcagcaggccaagtactgttaatcacattgctttaaagcccttggaagtatgcaacaggcccaagatttacaatcttccacacaggacaagcaccacaaagaaacgtggtgggctacacaaatggcttaataaaatgttaagagctgtacatccagcagagttcttgtgaaataatgtgatcattagtactaattttaaggtggattatatttctgatctatacctgcattcccccccaccaccagggaaatgagtctagtattttagtagcagaacagggtgtactcctaagaggctgttggagggtggtgttttttgcttctgactcattttgatggtaattagataatctactttgtggatttattttcctccactgtggccccttgaattaacatgactgatagtggaggcttagatacaaccctcctccactccaggcggtttcctatctatctatctgttggacaattttcaattctttcaacccagtttcgaccatgaatgtgacaggactttacaaataacacttgtaacaaagagaaaacccttttaactggacaaaacagagtttattcagtccagtaagcaatttaacaagtgtcagtctgatagttttgctcagtggaatgtgctaacatcagttctagtagaaccttttatttcataaagcatttcaatgcaaattataccagggacaaagtcaaaacttccatcagt

SEQ ID NO: 29948 - protein, 111 aa, Homo sapiens
MQKMGLQNSCLFMEDTLLRFQILAGTPMSLGSFAQCLRITSCRYGKWLKIFTMMKSQMSRHPNWRDKDLKPKVREMFLLNVMLHECLIYQAPKRHCIVGNVSGVAYGFFIL

SEQ ID NO: 29949 - DNA, 3600 bp, Homo sapiens
acttccggagccgggcgcggggccgagggctgggcccccctcttcccttccctcctccagcggctgcgctccctccggcgccctcggccccggggcggaggcggcccccgccgctgggaagcgagcgccgcggctctttctacgcgcgcgcgcgcgttgaccgcctcggggtcgcggcccttgtccgggggttgctggggtcctcaggcctatggctgccgaggcgggcgtcgtgggagctggggcctcccctgatggggattggagagaccaggcctgtgggcttctgctacacgtgcatttgtcttcccgactgggtcgcgcagcccctgtacgtacaggtcgtcatcttagaacagtgtttgaagatactgtggaggagcgtgtcatcaatgaagaatataaaatctggaagaagaatacaccgtttctatatgacctggttatgacccatgctcttcagtggcccagtcttaccgttcagtggcttcctgaagtgactaaacctgaaggaaaagattatgcccttcattggctagtgctggggactcatacgtctgatgagcagaatcatctggtggttgctcgagtacatattcccaatgatgatgcacagtttgatgcttcccattgtgacagtgacaagggtgaatttggtggctttggttctgtaacaggaaaaattgaatgtgaaattaaaatcaatcacgaaggagaagtaaaccgtgctcgttacatgccgcagaatcctcacatcattgctacaaaaacaccatcttctgatgtgttggtttttgactatacaaaacaccctgctaaaccagacccaagtggagaatgtaatcctgatctcagattaagaggtcaccagaaggaaggctatggtctctcctggaattcaaatttgagtggacatctcctaagtgcatctgatgaccatactgtttgtctgtgggatataaacgcaggaccaaaagaaggcaaaattgtggatgctaaagccatctttactggccactcagctgttgtagaggatgtggcctggcacctgctgcacgagtcattgtttggatctgttgctgatgatcagaaacttatgatatgggacaccaggtccaataccacctccaagccgagtcacttggtggatgcgcacactgccgaagtcaactgcctctcattcaatccctacagcgaatttattctagccaccggctctgcggataagaccgtagctttatgggatctgcgtaacttaaaattaaaactccataccttcgaatctcataaagatgaaattttccaggtccactggtctccacataatgaaactattctggcttcaagtggtactgaccgccgcctgaatgtgtgggatttaagtaaaattggggaagaacaatcagcagaagatgcagaagatgggcctccagaactcctgtttattcatggaggacacactgctaagatttcagattttagctggaaccccaatgagccttgggtcatttgctcagtgtctgaggataacatcatgcagatatggcaaatggctgaaaatatttacaatgatgaagagtcagatgtcacgacatccgaactggagggacaaggatcttaaacccaaagtacgagaaatgtttctgttgaatgtaatgctacatgaatgcttgatttatcaagcgccaaaaaggcattgtatagtaggaaatgtaagtggggtggcttatggcttctttatcctctgattctagcactttcaagtgagctgttgcgtactgtatcatattgtagctattagggaagagaagaatgttgcttaagaaagaacatcaccattgattttaaatacaagtagcagggtattgcctttgattcaactgttttaagtcctcattttctcaaactaagtgcttgctgttcccaaatatgcaagaataacttttacactttttccttccaacacttcttgattggctttgcagaaataaagttttaaaataaaacttgtgtttttttaaaagcttagtgggggggggcgggggagtctactttttgagtagaaatgggtaaaatggtacctttggactcctacagttaaggtcacatggataatgaaagaatacacagaagctgttaagtttatcatacatatttacttaatctatacagaatcaagtagataaaatcagattcacattagtgaaaaatctctacaaaatgtctttgaaaagcaaaacgagactgcctcttaacaattcgtatcctcatgaaagacgtgggctgtaaaaataaagcagtgtgtttagcacaaactagaagatatctgcatcatttttttcacagttatttccatctacagtctgaaagaggtagatttttctgcaacacctgagaattgaattgtgataaccaggtgtaataaaggcagttgcatacataactgaaaaatactggtctcaagaccaagaaatgtactcctaacaagtctgaggatgaaatggtccatattacccaagacccaagttttctctacaccttggagtccaccgccaatataaataatacacatcacgattccatgatggtgcaacaattgcaatttaagtgaattcaacatttaaaccttttctgggccagcctagtagcattacagtgttctagaatatggtagatacggggtgcgctacaaagccacaacactgggctggtgaggtgatcactgtaggaagatgtccttctcagggggtcccatttgtttttattcacagggtaatgggaggaagggttctgaaaggacaacaaatgcatcccagacagaatccatatcctttcaacactataatagcatctagctaaaaatacaaagtaagccaaaagcagcaggccaagtactgttaatcacattgctttaaagcccttggaagtatgcaacaggcccaagatttacaatcttccacacaggacaagcaccacaaagaaacgtggtgggctacacaaatggcttaataaaatgttaagagctgtacatccagcagagttcttgtgaaataatgtgatcattagtactaattttaaggtggattatatttctgatctatacctgcattcccccccaccaccagggaaatgagtctagtattttagtagcagaacagggtgtactcctaagaggctgttggagggtggtgttttttgcttctgactcattttgatggtaattagataatctactttgtggatttattttcctccactgtggccccttgaattaacatgactgatagtggaggcttagatacaaccctcctccactccaggcggtttcctatctatctatctgttggacaattttcaattctttcaacccagtttcgaccatgaatgtgacaggactttacaaataacacttgtaacaaagagaaaacccttttaactggacaaaacagagtttattcagtccagtaagcaatttaacaagtgtcagtctgatagttttgctcagtggaatgtgctaacatcagttctagtagaaccttttatttcataaagcatttcaatgcaaattataccagggacaaagtcaaaacttccatcagt

SEQ ID NO: 29950 - protein, 469 aa, Homo sapiens
MAAEAGVVGAGASPDGDWRDQACGLLLHVHLSSRLGRAAPVRTGRHLRTVFEDTVEERVINEEYKIWKKNTPFLYDLVMTHALQWPSLTVQWLPEVTKPEGKDYALHWLVLGTHTSDEQNHLVVARVHIPNDDAQFDASHCDSDKGEFGGFGSVTGKIECEIKINHEGEVNRARYMPQNPHIIATKTPSSDVLVFDYTKHPAKPDPSGECNPDLRLRGHQKEGYGLSWNSNLSGHLLSASDDHTVCLWDINAGPKEGKIVDAKAIFTGHSAVVEDVAWHLLHESLFGSVADDQKLMIWDTRSNTTSKPSHLVDAHTAEVNCLSFNPYSEFILATGSADKTVALWDLRNLKLKLHTFESHKDEIFQVHWSPHNETILASSGTDRRLNVWDLSKIGEEQSAEDAEDGPPELLFIHGGHTAKISDFSWNPNEPWVICSVSEDNIMQIWQMAENIYNDEESDVTTSELEGQGS

SEQ ID NO: 29951 - DNA, 3606 bp, Homo sapiens
ggagccgttggctcccagacccgcctctccgcctcctctcacttttcccagggcggatgcgcctgcgctcagctgcctgggcgggctgggaggcgcgggttgaaaagtctcgttccaagtttggagagagagagaagagcgcctcagacctcggtacccgcgagcggggaggaggcaggaaagaaggacgcggcgtctggggagcacccaggcagcaagacggggcccgggctttcgacagtggggagtgtgacgcgcttgggaaaggcaggagcgccagcggtcgggctgctcttggctaacgagaggagtccgaggcggcggcgaggggcgaacgacccgacgcaagatggcgagtaaagagatgtttgaagatactgtggaggagcgtgtcatcaatgaagaatataaaatctggaagaagaatacaccgtttctatatgacctggttatgacccatgctcttcagtggcccagtcttaccgttcagtggcttcctgaagtgactaaacctgaaggaaaagattatgcccttcattggctagtgctggggactcatacgtctgatgagcagaatcatctggtggttgctcgagtacatattcccaatgatgatgcacagtttgatgcttcccattgtgacagtgacaagggtgaatttggtggctttggttctgtaacaggaaaaattgaatgtgaaattaaaatcaatcacgaaggagaagtaaaccgtgctcgttacatgccgcagaatcctcacatcattgctacaaaaacaccatcttctgatgtgttggtttttgactatacaaaacaccctgctaaaccagacccaagtggagaatgtaatcctgatctcagattaagaggtcaccagaaggaaggctatggtctctcctggaattcaaatttgagtggacatctcctaagtgcatctgatgaccatactgtttgtctgtgggatataaacgcaggaccaaaagaaggcaaaattgtggatgctaaagccatctttactggccactcagctgttgtagaggatgtggcctggcacctgctgcacgagtcattgtttggatctgttgctgatgatcagaaacttatgatatgggacaccaggtccaataccacctccaagccgagtcacttggtggatgcgcacactgccgaagtcaactgcctctcattcaatccctacagcgaatttattctagccaccggctctgcggataagaccgtagctttatgggatctgcgtaacttaaaattaaaactccataccttcgaatctcataaagatgaaattttccaggtccactggtctccacataatgaaactattctggcttcaagtggtactgaccgccgcctgaatgtgtgggatttaagtaaaattggggaagaacaatcagcagaagatgcagaagatgggcctccagaactcctgtttattcatggaggacacactgctaagatttcagattttagctggaaccccaatgagccttgggtcatttgctcagtgtctgaggataacatcatgcagatatggcaaatggctgaaaatatttacaatgatgaagagtcagatgtcacgacatccgaactggagggacaaggatcttaaacccaaagtacgagaaatgtttctgttgaatgtaatgctacatgaatgcttgatttatcaagcgccaaaaaggcattgtatagtaggaaatgtaagtggggtggcttatggcttctttatcctctgattctagcactttcaagtgagctgttgcgtactgtatcatattgtagctattagggaagagaagaatgttgcttaagaaagaacatcaccattgattttaaatacaagtagcagggtattgcctttgattcaactgttttaagtcctcattttctcaaactaagtgcttgctgttcccaaatatgcaagaataacttttacactttttccttccaacacttcttgattggctttgcagaaataaagttttaaaataaaacttgtgtttttttaaaagcttagtgggggggggcgggggagtctactttttgagtagaaatgggtaaaatggtacctttggactcctacagttaaggtcacatggataatgaaagaatacacagaagctgttaagtttatcatacatatttacttaatctatacagaatcaagtagataaaatcagattcacattagtgaaaaatctctacaaaatgtctttgaaaagcaaaacgagactgcctcttaacaattcgtatcctcatgaaagacgtgggctgtaaaaataaagcagtgtgtttagcacaaactagaagatatctgcatcatttttttcacagttatttccatctacagtctgaaagaggtagatttttctgcaacacctgagaattgaattgtgataaccaggtgtaataaaggcagttgcatacataactgaaaaatactggtctcaagaccaagaaatgtactcctaacaagtctgaggatgaaatggtccatattacccaagacccaagttttctctacaccttggagtccaccgccaatataaataatacacatcacgattccatgatggtgcaacaattgcaatttaagtgaattcaacatttaaaccttttctgggccagcctagtagcattacagtgttctagaatatggtagatacggggtgcgctacaaagccacaacactgggctggtgaggtgatcactgtaggaagatgtccttctcagggggtcccatttgtttttattcacagggtaatgggaggaagggttctgaaaggacaacaaatgcatcccagacagaatccatatcctttcaacactataatagcatctagctaaaaatacaaagtaagccaaaagcagcaggccaagtactgttaatcacattgctttaaagcccttggaagtatgcaacaggcccaagatttacaatcttccacacaggacaagcaccacaaagaaacgtggtgggctacacaaatggcttaataaaatgttaagagctgtacatccagcagagttcttgtgaaataatgtgatcattagtactaattttaaggtggattatatttctgatctatacctgcattcccccccaccaccagggaaatgagtctagtattttagtagcagaacagggtgtactcctaagaggctgttggagggtggtgttttttgcttctgactcattttgatggtaattagataatctactttgtggatttattttcctccactgtggccccttgaattaacatgactgatagtggaggcttagatacaaccctcctccactccaggcggtttcctatctatctatctgttggacaattttcaattctttcaacccagtttcgaccatgaatgtgacaggactttacaaataacacttgtaacaaagagaaaacccttttaactggacaaaacagagtttattcagtccagtaagcaatttaacaagtgtcagtctgatagttttgctcagtggaatgtgctaacatcagttctagtagaaccttttatttcataaagcatttcaatgcaaattataccagggacaaagtcaaaacttccatcagt

SEQ ID NO: 29952 - protein, 425 aa, Homo sapiens; identical to SEQ ID NO: 4129

SEQ ID NO: 29953 - DNA, 561 bp, Homo sapiens
tttattcatggaggacacactgctaagatttcagattttagctggaaccccaatgagccttgggtcatttgctcagtgtctgaggataacatcatgcagatatggcaaatggctgaaaatatttacaatgatgaagagtcagatgtcacgacatccgaactggagggacaaggatcttaaacccaaagtacgagaaatgtttctgttgaatgtaatgctacatgaatgcttgatttatcaagcgccaaaaaggcattgtatagtaggaaatgtaagtggggtggcttatggcttctttatcctctgattctagcactttcaagtgagctgttgcgtactgtatcatattgtagctattagggaagagaagaatgttgcttaagaaagaacatcaccattgattttaaatacaagtagcagggtattgcctttgattcaactgttttaagtcctcattttctcaaactaagtgcttgctgttcccaaatatgcaagaataacttttacactttttccttccaacacttcttgattggctttgcagaaataaagttttaaaat

SEQ ID NO: 29954 - protein, 99 aa, Homo sapiens; identical to SEQ ID NO: 29946

SEQ ID NO: 29955 - DNA, 855 bp, Homo sapiens
cttgcagagcacttgaaagtcggggacaagagagtgaggccatcaggccaaggataagataatagagtgcaagatgggaaaatatcagattagaacaacagccacaaacctagcagcggatgattctttaaatacattttcaaaattatctattactaggtccactggtctccacataatgaaactattctggcttcaagtggtactgaccgccgcctgaatgtgtgggatttaagtaaaattggggaagaacaatcagcagaagatgcagaagatgggcctccagaactcctgtttattcatggaggacacactgctaagatttcagattttagctggaaccccaatgagccttgggtcatttgctcagtgtctgaggataacatcatgcagatatggcaaatggctgaaaatatttacaatgatgaagagtcagatgtcacgacatccgaactggagggacaaggatcttaaacccaaagtacgagaaatgtttctgttgaatgtaatgctacatgaatgcttgatttatcaagcgccaaaaaggcattgtatagtaggaaatgtaagtggggtggcttatggcttctttatcctctgattctagcactttcaagtgagctgttgcgtactgtatcatattgtagctattagggaagagaagaatgttgcttaagaaagaacatcaccattgattttaaatacaagtagcagggtattgcctttgattcaactgttttaagtcctcattttctcaaactaagtgcttgctgttcccaaatatgcaagaataacttttacactttttccttccaacacttcttgattggctttgcagaaataaagttttaaaat

SEQ ID NO: 29956 - protein, 111 aa, Homo sapiens; identical to SEQ ID NO: 29948

SEQ ID NO: 29957 - DNA, 2002 bp, Homo sapiens
acttccggagccgggcgcggggccgagggctgggcccccctcttcccttccctcctccagcggctgcgctccctccggcgccctcggccccggggcggaggcggcccccgccgctgggaagcgagcgccgcggctctttctacgcgcgcgcgcgcgttgaccgcctcggggtcgcggcccttgtccgggggttgctggggtcctcaggcctatggctgccgaggcgggcgtcgtgggagctggggcctcccctgatggggattggagagaccaggcctgtgggcttctgctacacgtgcatttgtcttcccgactgggtcgcgcagcccctgtacgtacaggtcgtcatcttagaacagtgtttgaagatactgtggaggagcgtgtcatcaatgaagaatataaaatctggaagaagaatacaccgtttctatatgacctggttatgacccatgctcttcagtggcccagtcttaccgttcagtggcttcctgaagtgactaaacctgaaggaaaagattatgcccttcattggctagtgctggggactcatacgtctgatgagcagaatcatctggtggttgctcgagtacatattcccaatgatgatgcacagtttgatgcttcccattgtgacagtgacaagggtgaatttggtggctttggttctgtaacaggaaaaattgaatgtgaaattaaaatcaatcacgaaggagaagtaaaccgtgctcgttacatgccgcagaatcctcacatcattgctacaaaaacaccatcttctgatgtgttggtttttgactatacaaaacaccctgctaaaccagacccaagtggagaatgtaatcctgatctcagattaagaggtcaccagaaggaaggctatggtctctcctggaattcaaatttgagtggacatctcctaagtgcatctgatgaccatactgtttgtctgtgggatataaacgcaggaccaaaagaaggcaaaattgtggatgctaaagccatctttactggccactcagctgttgtagaggatgtggcctggcacctgctgcacgagtcattgtttggatctgttgctgatgatcagaaacttatgatatgggacaccaggtccaataccacctccaagccgagtcacttggtggatgcgcacactgccgaagtcaactgcctctcattcaatccctacagcgaatttattctagccaccggctctgcggataagaccgtagctttatgggatctgcgtaacttaaaattaaaactccataccttcgaatctcataaagatgaaattttccaggtccactggtctccacataatgaaactattctggcttcaagtggtactgaccgccgcctgaatgtgtgggatttaagtaaaattggggaagaacaatcagcagaagatgcagaagatgggcctccagaactcctgtttattcatggaggacacactgctaagatttcagattttagctggaaccccaatgagccttgggtcatttgctcagtgtctgaggataacatcatgcagatatggcaaatggctgaaaatatttacaatgatgaagagtcagatgtcacgacatccgaactggagggacaaggatcttaaacccaaagtacgagaaatgtttctgttgaatgtaatgctacatgaatgcttgatttatcaagcgccaaaaaggcattgtatagtaggaaatgtaagtggggtggcttatggcttctttatcctctgattctagcactttcaagtgagctgttgcgtactgtatcatattgtagctattagggaagagaagaatgttgcttaagaaagaacatcaccattgattttaaatacaagtagcagggtattgcctttgattcaactgttttaagtcctcattttctcaaactaagtgcttgctgttcccaaatatgcaagaataacttttacactttttccttccaacacttcttgattggctttgcagaaataaagttttaaaat

SEQ ID NO: 29958 - protein, 469 aa, Homo sapiens; identical to SEQ ID NO: 29950

SEQ ID NO: 29959 - DNA, 2008 bp, Homo sapiens
ggagccgttggctcccagacccgcctctccgcctcctctcacttttcccagggcggatgcgcctgcgctcagctgcctgggcgggctgggaggcgcgggttgaaaagtctcgttccaagtttggagagagagagaagagcgcctcagacctcggtacccgcgagcggggaggaggcaggaaagaaggacgcggcgtctggggagcacccaggcagcaagacggggcccgggctttcgacagtggggagtgtgacgcgcttgggaaaggcaggagcgccagcggtcgggctgctcttggctaacgagaggagtccgaggcggcggcgaggggcgaacgacccgacgcaagatggcgagtaaagagatgtttgaagatactgtggaggagcgtgtcatcaatgaagaatataaaatctggaagaagaatacaccgtttctatatgacctggttatgacccatgctcttcagtggcccagtcttaccgttcagtggcttcctgaagtgactaaacctgaaggaaaagattatgcccttcattggctagtgctggggactcatacgtctgatgagcagaatcatctggtggttgctcgagtacatattcccaatgatgatgcacagtttgatgcttcccattgtgacagtgacaagggtgaatttggtggctttggttctgtaacaggaaaaattgaatgtgaaattaaaatcaatcacgaaggagaagtaaaccgtgctcgttacatgccgcagaatcctcacatcattgctacaaaaacaccatcttctgatgtgttggtttttgactatacaaaacaccctgctaaaccagacccaagtggagaatgtaatcctgatctcagattaagaggtcaccagaaggaaggctatggtctctcctggaattcaaatttgagtggacatctcctaagtgcatctgatgaccatactgtttgtctgtgggatataaacgcaggaccaaaagaaggcaaaattgtggatgctaaagccatctttactggccactcagctgttgtagaggatgtggcctggcacctgctgcacgagtcattgtttggatctgttgctgatgatcagaaacttatgatatgggacaccaggtccaataccacctccaagccgagtcacttggtggatgcgcacactgccgaagtcaactgcctctcattcaatccctacagcgaatttattctagccaccggctctgcggataagaccgtagctttatgggatctgcgtaacttaaaattaaaactccataccttcgaatctcataaagatgaaattttccaggtccactggtctccacataatgaaactattctggcttcaagtggtactgaccgccgcctgaatgtgtgggatttaagtaaaattggggaagaacaatcagcagaagatgcagaagatgggcctccagaactcctgtttattcatggaggacacactgctaagatttcagattttagctggaaccccaatgagccttgggtcatttgctcagtgtctgaggataacatcatgcagatatggcaaatggctgaaaatatttacaatgatgaagagtcagatgtcacgacatccgaactggagggacaaggatcttaaacccaaagtacgagaaatgtttctgttgaatgtaatgctacatgaatgcttgatttatcaagcgccaaaaaggcattgtatagtaggaaatgtaagtggggtggcttatggcttctttatcctctgattctagcactttcaagtgagctgttgcgtactgtatcatattgtagctattagggaagagaagaatgttgcttaagaaagaacatcaccattgattttaaatacaagtagcagggtattgcctttgattcaactgttttaagtcctcattttctcaaactaagtgcttgctgttcccaaatatgcaagaataacttttacactttttccttccaacacttcttgattggctttgcagaaataaagttttaaaat

SEQ ID NO: 29960 - protein, 425 aa, Homo sapiens; identical to SEQ ID NO: 4129

SEQ ID NO: 29961 - DNA, 466 bp, Homo sapiens
tgtttgaagatactgtggaggagcgtgtcatcaatgaagaatataaaatctggaagaagaatacaccgtttctatatgacctggttatgacccatgctcttcagtggcccagtcttaccgttcagtggcttcctgaagtgactaaacctgaaggaaaagattatgcccttcattggctagtgctggggactcatacgtctgatgagcagaatcatctggtggttgctcgagtacatattcccaatgatgatgcacagtttgatgcttcccattgtgacagtgacaagggtggtaggtatatcatatattccaatattggtgtcaaagggaaaatgtctctttcaaagcatatgctattaaaactatactattagcttttggcccagtaatttaacttctaggactttattctacagaacttcccacccacatgtgcacaaggattttagtcgtaattgcagaattg

SEQ ID NO: 29962 - protein, 95 aa, Homo sapiens
MTHALQWPSLTVQWLPEVTKPEGKDYALHWLVLGTHTSDEQNHLVVARVHIPNDDAQFDASHCDSDKGGRYIIYSNIGVKGKMSLSKHMLLKLYY

SEQ ID NO: 29963 - DNA, 867 bp, Homo sapiens
gaaacccgcccgccgcgcgtcattggtctcggcgccggagccgttggctcccagacccgcctctccgcctcctctcacttttcccagggcggatgcgcctgcgctcagctgcctgggcgggctgggaggcgcgggttgaaaagtctcgttccaagtttggagagagagagaagagcgcctcagacctcggtacccgcgagcggggaggaggcaggaaagaaggacgcggcgtctggggagcacccaggcagcaagacggggcccgggctttcgacagtggggagtgtgacgcgcttgggaaaggcaggagcgccagcggtcgggctgctcttggctaacgagaggagtccgaggcggcggcgaggggcgaacgacccgacgcaagatggcgagtaaagagatgtttgaagatactgtggaggagcgtgtcatcaatgaagaatataaaatctggaagaagaatacaccgtttctatatgacctggttatgacccatgctcttcagtggcccagtcttaccgttcagtggcttcctgaagtgactaaacctgaaggaaaagattatgcccttcattggctagtgctggggactcatacgtctgatgagcagaatcatctggtggttgctcgagtacatattcccaatgatgatgcacagtttgatgcttcccattgtgacagtgacaagggtggtaggtatatcatatattccaatattggtgtcaaagggaaaatgtctctttcaaagcatatgctattaaaactatactattagcttttggcccagtaatttaacttctaggactttattctacagaacttcccacccacatgtgcacaaggattttagtcgtaattgcagaattg

SEQ ID NO: 29964 - protein, 129 aa, Homo sapiens
MASKEMFEDTVEERVINEEYKIWKKNTPFLYDLVMTHALQWPSLTVQWLPEVTKPEGKDYALHWLVLGTHTSDEQNHLVVARVHIPNDDAQFDASHCDSDKGGRYIIYSNIGVKGKMSLSKHMLLKLYY

SEQ ID NO: 29965 - DNA, 550 bp, Homo sapiens
ttttcccagggcggatgcgcctgcgctcagctgcctgggcgggctgggaggcgcgggttgaaaagtctcgttccaagtttggagagagagagaagagcgcctcagacctcggtacccgcgagcggggaggaggcaggaaagaaggacgcggcgtctggggagcacccaggcagcaagacggggcccgggctttcgacagtggggagtgtgacgcgcttgggaaaggcaggagcgccagcggtcgggctgctcttggctaacgagaggagtccgaggcggcggcgaggggcgaacgacccgacgcaagatggcgagtaaagagatgtttgaagatactgtggaggagcgtgtcatcaatgaagaatataaaatctggaagaagaatacaccgtttctatatgacctggttatgacccatgctcttcagtggcccagtcttaccgttcagtggcttcctgaagtgactaagtaaggcagaatcatctggtggttgctcgagtacatattcccaatgatgatgcacagtttgatgcttcccattgtgacagtg

SEQ ID NO: 29966 - protein, 54 aa, Homo sapiens
MASKEMFEDTVEERVINEEYKIWKKNTPFLYDLVMTHALQWPSLTVQWLPEVTK

SEQ ID NO: 29967 - DNA, 2298 bp, Homo sapiens
ccgggaggaagcggccgcgcggcagctgcggggcgtgggggtggtggtggcggcggcggtggtggcggcggcggcggcggcggcagctgaggccgaggaggcggtggctgtggcggacgcagcagcaccccagctagggacagggctccgccgcgcccccttgctggccccatggaggcggcagcggcggcggcggcggcggcagcggcagcggcagcggcgggcgggggctgtggctccgggccgccgccgctgctgctgagcgagggcgagcagcagtgctactccgagctcttcgcgcgctgtgccggcgccgcgggcgggggccccgggtctgggccccccgaggccgccagagtcgcccccggcacggccactgcggccgccggccccgtggctgacctgtttcgggcatcgcagctgcccgccgagacgctgcaccagatcacagaactgtgtggtgcaaagcgggttggttattttggtccaacacagttttacattgccctgaaattaattgctgcagcacaatctggcctcccggtacggatagagagtattaaatgtgaattgcctctgcctcgctttatgatgtcaaagaatgatggtgagatacgatttgggaacccagctgagctgcatggaactaaggttcagattccatatttaactacagaaaaaaattccttcaaaagaatggacgatgaggataaacaggaaacacagtctcccacgatgtcacccctcgcctcccctccttcttccccgcctcattaccagagggtgcccttgagccatggctacagcaaactgcggagcagcgcagaacagatgcatccagcaccttatgaagctaggcagccccttgtccagcccgagggatcctcatcagggggcccaggaaccaagccccttcggcatcaggcttcccttatccggtccttttcagtggagagggaactacaggataacagcagttaccccgacgaaccctggaggataacagaagaacagcgcgagtactatgtcaatcagttccgatcccttcagccagacccaagctctttcatttcaggttctgtggccaagaacttcttcaccaaatcaaagctttccattccagaactctcctatatatgggagcttagtgatgctgactgtgatggagccctgaccctgcctgagttctgtgctgcgtttcatctcattgtggctcggaagaacggctacccattgcctgagggcctccctccaactctgcagccagaatacctgcaggcagcttttcctaagcccaaatgggactgtcaattatttgattcttattctgagtcactgccggcaaatcaacaacctcgtgacttgaatcggatggagaagacatctgttaaagacatggctgaccttcctgtccctaaccaggatgtaactagtgatgacaaacaagctttgaaaagtactatcaatgaagccttaccaaaggacgtgtctgaggatccagcaactcccaaggattccaacagtctcaaagcaagaccaagatccagatcttactctagcacctccatagaagaggccatgaaaaggggcgaggaccctcccaccccgccacctcggccacagaaaacccattccagagcctcctccttggatctgaataaagtcttccagcccagtgtgccagctaccaagtcaggattgttacccccaccacctgcgctccctccaagaccttgtccatcacagtctgaacaagtgtcggaggccgagttactcccacagctgagcagagccccatcccaggctgcagaaagtagtccagcaaagaaggatgtactgtattctcagccaccatcaaagcccattcgtaggaaattcagaccagaaaaccaagctacagaaaaccaagagccttccactgctgcaagtgggccagcttctgcggcaaccatgaaaccgcatccaacagtccaaaagcagtcttccaaacagaagaaggccattcaaactgctatccgcaaaaataaagaggcaaacgcagtgctggctcggctgaacagtgagctccagcagcagctcaaggaggttcatcaagaacgaattgcattggaaaaccaattggaacaacttcgtccggtcactgtgttgtgacccccccatggttcaagtgacagtgggtgaccttgtctgccaagatctttcttttgaatgttttgaacccaactacttgtcatagatgtttgactgtgtcaaaagctgtgagcagcaaaatataatccatatgaccttttctcttgc

SEQ ID NO: 29968 - protein, 659 aa, Homo sapiens
MEAAAAAAAAAAAAAAAGGGCGSGPPPLLLSEGEQQCYSELFARCAGAAGGGPGSGPPEAARVAPGTATAAAGPVADLFRASQLPAETLHQITELCGAKRVGYFGPTQFYIALKLIAAAQSGLPVRIESIKCELPLPRFMMSKNDGEIRFGNPAELHGTKVQIPYLTTEKNSFKRMDDEDKQETQSPTMSPLASPPSSPPHYQRVPLSHGYSKLRSSAEQMHPAPYEARQPLVQPEGSSSGGPGTKPLRHQASLIRSFSVERELQDNSSYPDEPWRITEEQREYYVNQFRSLQPDPSSFISGSVAKNFFTKSKLSIPELSYIWELSDADCDGALTLPEFCAAFHLIVARKNGYPLPEGLPPTLQPEYLQAAFPKPKWDCQLFDSYSESLPANQQPRDLNRMEKTSVKDMADLPVPNQDVTSDDKQALKSTINEALPKDVSEDPATPKDSNSLKARPRSRSYSSTSIEEAMKRGEDPPTPPPRPQKTHSRASSLDLNKVFQPSVPATKSGLLPPPPALPPRPCPSQSEQVSEAELLPQLSRAPSQAAESSPAKKDVLYSQPPSKPIRRKFRPENQATENQEPSTAASGPASAATMKPHPTVQKQSSKQKKAIQTAIRKNKEANAVLARLNSELQQQLKEVHQERIALENQLEQLRPVTVL

SEQ ID NO: 29969 - DNA, 2914 bp, Homo sapiens
ccgggaggaagcggccgcgcggcagctgcggggcgtgggggtggtggtggcggcggcggtggtggcggcggcggcggcggcggcagctgaggccgaggaggcggtggctgtggcggacgcagcagcaccccagctagggacagggctccgccgcgcccccttgctggccccatggaggcggcagcggcggcggcggcggcggcagcggcagcggcagcggcgggcgggggctgtggctccgggccgccgccgctgctgctgagcgagggcgagcagcagtgctactccgagctcttcgcgcgctgtgccggcgccgcgggcgggggccccgggtctgggccccccgaggccgccagagtcgcccccggcacggccactgcggccgccggccccgtggctgacctgtttcgggcatcgcagctgcccgccgagacgctgcaccagatcacagaactgtgtggtgcaaagcgggttggttattttggtccaacacagttttacattgccctgaaattaattgctgcagcacaatctggcctcccggtacggatagagagtattaaatgtgaattgcctctgcctcgctttatgatgtcaaagaatgatggtgagatacgatttgggaacccagctgagctgcatggaactaaggttcagattccatatttaactacagaaaaaaattccttcaaaagaatggacgatgaggataaacaggaaacacagtctcccacgatgtcacccctcgcctcccctccttcttccccgcctcattaccagagggtgcccttgagccatggctacagcaaactgcggagcagcgcagaacagatgcatccagcaccttatgaagctaggcagccccttgtccagcccgagggatcctcatcagggggcccaggaaccaagccccttcggcatcaggcttcccttatccggtccttttcagtggagagggaactacaggataacagcagttaccccgacgaaccctggaggataacagaagaacagcgcgagtactatgtcaatcagttccgatcccttcagccagacccaagctctttcatttcaggttctgtggccaagaacttcttcaccaaatcaaagctttccattccagaactctcctatatatgggagcttagtgatgctgactgtgatggagccctgaccctgcctgagttctgtgctgcgtttcatctcattgtggctcggaagaacggctacccattgcctgagggcctccctccaactctgcagccagaatacctgcaggcagcttttcctaagcccaaatgggactgtcaattatttgattcttattctgagtcactgccggcaaatcaacaacctcgtgacttgaatcggatggagaagacatctgttaaagacatggctgaccttcctgtccctaaccaggatgtaactagtgatgacaaacaagctttgaaaagtactatcaatgaagccttaccaaaggacgtgtctgaggatccagcaactcccaaggattccaacagtctcaaagcaagaccaagatccagatcttactctagcacctccatagaagaggccatgaaaaggggcgaggaccctcccaccccgccacctcggccacagaaaacccattccagagcctcctccttggatctgaataaagtcttccagcccagtgtgccagctaccaagtcaggattgttacccccaccacctgcgctccctccaagaccttgtccatcacagtctgaacaagtgtcggaggccgagttactcccacagctgagcagagccccatcccaggctgcagaaagtagtccagcaaagaaggatgtactgtattctcagccaccatcaaagcccattcgtaggaaattcagaccagaaaaccaagctacagaaaaccaagagccttccactgctgcaagtgggccagcttctgcggcaaccatgaaaccgcatccaacagtccaaaagcagtcttccaaacagaagaaggccattcaaactgctatccgcaaaaataaagaggcaaacgcagtgctggctcggctgaacagtgagctccagcagcagctcaaggaggttcatcaagaacgaattgcattggaaaaccaattggaacaacttcgtccggtcactgtgttgtgacccccccatggttcaagtgacagtgggtgaccttgtctgccaagatctttcttttgaatgttttgaacccaactacttgtcatagatgtttgactgtgtcaaaagctgtgagcagcaaaatataatccatatgaccttttctcttgcacttcacttgtatgttttactgtggtggaaaaaatacttcaactgattatcacacttgaaatgctaattatcagtggaatttgtctcctattcttaagtacttctgcaaggtattagatgctgctccttaccaaaaatcagtcttctagcaaataaaaataacttagagcattatttatttaaagaatttatgttttctataaaaccttataaccaagaaccttcaggatgcttgtaaccaagtactttcaggatgctttttgtatgtatatcacatagagtaggttggtttcctgagtaattgggattccaactagatagtcattggtgtgaccataataaaaacaaaagctaaaataaaagcatcagatttagactggcgctgtgccctctaccactatatgccaaaaattgcttctctagtgccattttgatattatatctagctataaataatacatgactatcgttttctattgaatgtcaaagacttactgggtctttacacctctgtaaagtggaggttttggcaatgagctgtttaacttggccaagctaggctgtcaacccagacaactcagtcctttcatgtaaatttttgggcaagagaagtctg

SEQ ID NO: 29970 - protein, 659 aa, Homo sapiens; identical to SEQ ID NO: 29968

SEQ ID NO: 29971 - DNA, 438 bp, Homo sapiens
cggccgccggccccgtggctgacctgtttcgggcatcgcagctgcccgccgagacgctgcaccagatcacagaactgtgtggtgcaaagcgggttggttattttggtccaacacagttttacattgccctgaaattaattgctgcagcacaatctggcctcccggtacggatagagagtattaaatgtgaattgcctctgcctcgctttatgatgtcaaagaatgatggtgagatacgatttgggaacccagctgagctgcatggaactaaggttcagattccatatttaactacagaaaaaaattccttcaaaagaatggacgatgaggataaacaggtaaacagtttgttcagatgtgttcatttgattctgaccatgaaaccgcatgtagcagggcctcgtatctactgttcagcttccagcaaatctcaccatc

SEQ ID NO: 29972 - protein, 75 aa, Homo sapiens
MMSKNDGEIRFGNPAELHGTKVQIPYLTTEKNSFKRMDDEDKQVNSLFRCVHLILTMKPHVAGPRIYCSASSKSH

SEQ ID NO: 29973 - DNA, 710 bp, Homo sapiens
caaggtgaacaccaaaaagtaaaaagtctgggtaataaaatctacagtagggaaagaaaatgcttctgataacttcagtgaagcttgcagtttcagctaccaagtcaggattgttacccccaccacctgcgctccctccaagaccttgtccatcacagtctgaacaagtgtcggaggccgagttactcccacagctgagcagagccccatcccaggctgcagaaagtagtccagcaaagaaggatgtactgtattctcagccaccatcaaagcccattcgtaggaaattcagaccagaaaaccaagctacagaaaaccaagagccttccactgctgcaagtgggccagcttctgcggcaaccatgaaaccgcatccaacagtccaaaagcagtcttccaaacagaagaaggccattcaaactgctatccgcaaaaataaagaggcaaacgcagtgctggctcggctgaacagtgagctccagcagcagctcaaggaggttcatcaagaacgaattgcattggaaaaccaattggaacaacttcgtccggtcactgtgttgtgacccccccatggttcaagtgacagtgggtgaccttgtctgccaagatctttcttttgaatgttttgaacccaactacttgtcatagatgtttgactgtgtcaaaagctgtgagcagcaaaatataatccatatgaccttttctcttgc

SEQ ID NO: 29974 - protein, 167 aa, Homo sapiens
MLLITSVKLAVSATKSGLLPPPPALPPRPCPSQSEQVSEAELLPQLSRAPSQAAESSPAKKDVLYSQPPSKPIRRKFRPENQATENQEPSTAASGPASAATMKPHPTVQKQSSKQKKAIQTAIRKNKEANAVLARLNSELQQQLKEVHQERIALENQLEQLRPVTVL

SEQ ID NO: 29975 - DNA, 3484 bp, Homo sapiens
ccttgtgagggcccaaattttcctggcaagatgaaagtattgtaagtggcaattttgcctctctgcctgtgttatctccttttccttcagggcaaatggctagctccttcacccacagacacactttcagtaggtgtggtatgtgattcttttaaaatctccgtaaagagtttctgttgttggtcgcctcagcacagaatggatacatgcagaacttccattatatttatctaaccagctggaacaggtattggagggagggtgaagacacctgtggacatggccagggactgagacaatgatgctctggacaaactatccttctctgtaaaactttggctttgagaagagccatcacttgcttcaatttctttgtagtgaaattgagggaggtgttgaggacagaaacctgctcctgtcacttgactgcaagtgagcctgaccggtcactaacataaatgctcaagacccatcatgaccctgcttttggggtcttgcaggtctcagatgctgctgcagattttcttctgcttacacgttgtagaatgaaaagcagcaggttctgtgggagatgttagcaacttgtctttgaagccaaagtcccattctgaatctctgcagccctctccttcagaagattttctttttttcaaatggacaggtccctggtggtatcagtccataaaggaagtatattttgttcatcacattcaccgagaactttgaccatcttccagcccctgttaagcctggaaggtgaagaatccctatcagggacaaagatggctcaattttcttccatgttctaccccagcactccactttaatttcagctttatgttcattttagtcagcagtggcttaacagtctccagagtagatgtcagggcatctggtggagttcatacagagatcttttctttttctcttttttataacagctttattgcaatataattcacatagcatacagttcatgtttttaaatgtacaattcagtggttcttagtttattcacaaagtcatgcaaccatcaccacaatctaacttttgtcatgcctaaaataatatatatccacgcccattagcaatcactccccattctctccttccccctcagcccctggcaaccacgaatctcctttctgtctccatggctttgcatattcttgtcatttcacataaatggaataatgaaacgtggtcttttgtgactggcttctttcacttagcataatattttcaaggtttatccaagttgtagcataaatctgaacttatctttttatggctgaataatattccattgtatggatagaccacattttattcatccattcatcagtcaatggacattttggttatttctgcttttttggctcttaagagtaatgccactatactgtttgtgtacatgtttttgtgtggacttacattttcatttctcttgggtctgtacctaggagtggaattgctaggtcatgtggtaactctgtctttaatatttcgaagaactaccacacttttcatagtggctgcaccattttatgttcccgttggcaacgtatgagggttccaatttctccattttgtcaacacttatcttttttttttattatagccatcctagtgagtgtgaagtgtgatctcatggttttgatttgcatttcttttgtggctaacgacattgatcatcttttcatgtgcctattggccatttgtttatcttctttggagaaatgtgtattcacaccctttgcccacttttaattggattattaatctttttacttttgagttatgaattctttatatattctggatacaactcccttgttagatatatgagaaaattgagccctctttgtaaatattttctctcattctgtgggctgtcttttcactttctattttttatttttattttttagagacaaagtctcactctgtcacccaggctggggtgcagtagcatgatcatggctcattgtagcctcgaattcctgggctcaagtgatcctttccccctcagcctcctgagtagctggaactacaggcatgagccaccattcccagccaatttcattttattttttatagtgatggagtcttactatgttgcccagtctggtctcaaactcctggcctcaagtgatcatcctgcctcaacctctcaaagtgctgggattacaggcctgagccactgcacccagccaattatcaatattaatcagatctgtacagtggtcacagtccattctagttcagttgctcttttctagaacctatctcccagtaatggcacatatggctgtttttctaggagaacatcagttgctcttttgctctaagaattcggtgtttcttgctgtgggatgaaaggttgtagattatccctgtggtaactgcactgatttatcatcccaaccatggacggttttgaaaagtaaagagagtgctaatgtacttatgctggacagacagttttaaatggagactgtaatgggcgcagtaggatgcgtggtcactctggttatgcgtgttctgtgaatttgttgttaattgggaaatactggtattaaaacgttctgtatttttctcaagagccacagatatatgctggtccatgcacatacacgagtgcacatttatgcacacacacacatatacttaggcattcatgcctaataatacataaggtagaggtaggtagtctggctaagttaatgtagaatttttgctaaaaataatgttcttgtattattttccttcagacttgttcacaggggacacctgcaggtcttctaagtgctattaattcttacacaaaaagggcattccagttaatatggtttgtcaggaagaaatacttattaaaatgtcttggaataaatggaacacaaatgtttgaaaaggcccatttcacagcttttattcaagttataaaatgggaattacttcaggtgtaaataattcatcccaataaatttgtttcatttggtgtctatcttcctgaccgcctgtgaatatgagattttatttttggagccctgtgttgttaaccacttgttagtttaacacctctcatgaatcagagttctgaccctcaagggtccagacctctaagtcctttttcactgaagtgtttgtgcttttctataggcagtcttccaaacagaagaaggccattcaaactgctatccgcaaaaataaagaggcaaacgcagtgctggctcggctgaacagtgagctccagcagcagctcaaggaggttcatcaagaacgaattgcattggaaaaccaattggaacaacttcgtccggtcactgtgttgtgacccccccatggttcaagtgacagtgggtgaccttgtctgccaagatctttcttttgaatgttttgaacccaactacttgtcatagatgtttgactgtgtcaaaagctgtgagcagcaaaatataatccatatgaccttttctcttgc

SEQ ID NO: 29976 - protein, 102 aa, Homo sapiens [sequence omitted]

SEQ ID NO: 29977 - DNA, 4100 bp, Homo sapiens
ccttgtgagggcccaaattttcctggcaagatgaaagtattgtaagtggcaattttgcctctctgcctgtgttatctccttttccttcagggcaaatggctagctccttcacccacagacacactttcagtaggtgtggtatgtgattcttttaaaatctccgtaaagagtttctgttgttggtcgcctcagcacagaatggatacatgcagaacttccattatatttatctaaccagctggaacaggtattggagggagggtgaagacacctgtggacatggccagggactgagacaatgatgctctggacaaactatccttctctgtaaaactttggctttgagaagagccatcacttgcttcaatttctttgtagtgaaattgagggaggtgttgaggacagaaacctgctcctgtcacttgactgcaagtgagcctgaccggtcactaacataaatgctcaagacccatcatgaccctgcttttggggtcttgcaggtctcagatgctgctgcagattttcttctgcttacacgttgtagaatgaaaagcagcaggttctgtgggagatgttagcaacttgtctttgaagccaaagtcccattctgaatctctgcagccctctccttcagaagattttctttttttcaaatggacaggtccctggtggtatcagtccataaaggaagtatattttgttcatcacattcaccgagaactttgaccatcttccagcccctgttaagcctggaaggtgaagaatccctatcagggacaaagatggctcaattttcttccatgttctaccccagcactccactttaatttcagctttatgttcattttagtcagcagtggcttaacagtctccagagtagatgtcagggcatctggtggagttcatacagagatcttttctttttctcttttttataacagctttattgcaatataattcacatagcatacagttcatgtttttaaatgtacaattcagtggttcttagtttattcacaaagtcatgcaaccatcaccacaatctaacttttgtcatgcctaaaataatatatatccacgcccattagcaatcactccccattctctccttccccctcagcccctggcaaccacgaatctcctttctgtctccatggctttgcatattcttgtcatttcacataaatggaataatgaaacgtggtcttttgtgactggcttctttcacttagcataatattttcaaggtttatccaagttgtagcataaatctgaacttatctttttatggctgaataatattccattgtatggatagaccacattttattcatccattcatcagtcaatggacattttggttatttctgcttttttggctcttaagagtaatgccactatactgtttgtgtacatgtttttgtgtggacttacattttcatttctcttgggtctgtacctaggagtggaattgctaggtcatgtggtaactctgtctttaatatttcgaagaactaccacacttttcatagtggctgcaccattttatgttcccgttggcaacgtatgagggttccaatttctccattttgtcaacacttatcttttttttttattatagccatcctagtgagtgtgaagtgtgatctcatggttttgatttgcatttcttttgtggctaacgacattgatcatcttttcatgtgcctattggccatttgtttatcttctttggagaaatgtgtattcacaccctttgcccacttttaattggattattaatctttttacttttgagttatgaattctttatatattctggatacaactcccttgttagatatatgagaaaattgagccctctttgtaaatattttctctcattctgtgggctgtcttttcactttctattttttatttttattttttagagacaaagtctcactctgtcacccaggctggggtgcagtagcatgatcatggctcattgtagcctcgaattcctgggctcaagtgatcctttccccctcagcctcctgagtagctggaactacaggcatgagccaccattcccagccaatttcattttattttttatagtgatggagtcttactatgttgcccagtctggtctcaaactcctggcctcaagtgatcatcctgcctcaacctctcaaagtgctgggattacaggcctgagccactgcacccagccaattatcaatattaatcagatctgtacagtggtcacagtccattctagttcagttgctcttttctagaacctatctcccagtaatggcacatatggctgtttttctaggagaacatcagttgctcttttgctctaagaattcggtgtttcttgctgtgggatgaaaggttgtagattatccctgtggtaactgcactgatttatcatcccaaccatggacggttttgaaaagtaaagagagtgctaatgtacttatgctggacagacagttttaaatggagactgtaatgggcgcagtaggatgcgtggtcactctggttatgcgtgttctgtgaatttgttgttaattgggaaatactggtattaaaacgttctgtatttttctcaagagccacagatatatgctggtccatgcacatacacgagtgcacatttatgcacacacacacatatacttaggcattcatgcctaataatacataaggtagaggtaggtagtctggctaagttaatgtagaatttttgctaaaaataatgttcttgtattattttccttcagacttgttcacaggggacacctgcaggtcttctaagtgctattaattcttacacaaaaagggcattccagttaatatggtttgtcaggaagaaatacttattaaaatgtcttggaataaatggaacacaaatgtttgaaaaggcccatttcacagcttttattcaagttataaaatgggaattacttcaggtgtaaataattcatcccaataaatttgtttcatttggtgtctatcttcctgaccgcctgtgaatatgagattttatttttggagccctgtgttgttaaccacttgttagtttaacacctctcatgaatcagagttctgaccctcaagggtccagacctctaagtcctttttcactgaagtgtttgtgcttttctataggcagtcttccaaacagaagaaggccattcaaactgctatccgcaaaaataaagaggcaaacgcagtgctggctcggctgaacagtgagctccagcagcagctcaaggaggttcatcaagaacgaattgcattggaaaaccaattggaacaacttcgtccggtcactgtgttgtgacccccccatggttcaagtgacagtgggtgaccttgtctgccaagatctttcttttgaatgttttgaacccaactacttgtcatagatgtttgactgtgtcaaaagctgtgagcagcaaaatataatccatatgaccttttctcttgcacttcacttgtatgttttactgtggtggaaaaaatacttcaactgattatcacacttgaaatgctaattatcagtggaatttgtctcctattcttaagtacttctgcaaggtattagatgctgctccttaccaaaaatcagtcttctagcaaataaaaataacttagagcattatttatttaaagaatttatgttttctataaaaccttataaccaagaaccttcaggatgcttgtaaccaagtactttcaggatgctttttgtatgtatatcacatagagtaggttggtttcctgagtaattgggattccaactagatagtcattggtgtgaccataataaaaacaaaagctaaaataaaagcatcagatttagactggcgctgtgccctctaccactatatgccaaaaattgcttctctagtgccattttgatattatatctagctataaataatacatgactatcgttttctattgaatgtcaaagacttactgggtctttacacctctgtaaagtggaggttttggcaatgagctgtttaacttggccaagctaggctgtcaacccagacaactcagtcctttcatgtaaatttttgggcaagagaagtctg

SEQ ID NO: 29978 - protein, 102 aa, Homo sapiens [sequence omitted]

SEQ ID NO: 29979 - DNA, 760 bp, Homo sapiens
agatgaaccatccaatctcctgcctcgagtattgaagcctggctactgtgactgtggggaagggattaatggtctcagcattcagccaacaacaatacctgctcactataagcattcagaaaacagaaaagtttcaagaagcaggaagaaaagactcacctatgatcccaacacccagagataagagtcctgaagctcagatgacacagctgataacagggaagccaggacagaatctcattgttttgaacaccaaaacccgttcccttgacaacttggctatactacactattcgaatgttgcagatactgtggtcacatttcaaaggccagatctttcccagggcttaagctgttccttggatacttttggtaagtcatttatccactaatcatttagtaatcgtctctgacatgccaaacaccctgctcagggctggaaatgcagaacctgggaagccactggccttgtcctcaagatctctctctggctccctttgaatttgctaattcagactttcacatttcccccaggaaaaatcataaggaccaaatcatatccgttttctcaaatggcttcaaagacccatgtcatcgtttggcatcatgtaattctttactgatgtactttaagagtcacgttttattctctttatgcagctgtcaaggacagacacaaagagtgggggtgtcttcctcactaaatactttcccacaacactccagagtagattcatcatttaaataaacactaacagct

SEQ ID NO: 29980 - protein, 107 aa, Homo sapiens
MVSAFSQQQYLLTISIQKTEKFQEAGRKDSPMIPTPRDKSPEAQMTQLITGKPGQNLIVLNTKTRSLDNLAILHYSNVADTVVTFQRPDLSQGLSCSLDTFGKSFIH

SEQ ID NO: 29981 - DNA, 2130 bp, Homo sapiens
ccatcttttggtgcagaaggtgacgggaaacaggccgcagacctgaacttccaaccgtatgtaggcgagaagccggtgccgatactcccactatcccacaatgtcccactgggccccagagtggaagagggcggaggctaatccaagagaccttggggccagctgggatgtcaggggcagcagaggcagtggctggagtggccccttcggccatcagggaccgagagcagcaggctcccgtgaaccaccactctgctttaaaataaagaacaatatggttggtgtggtcattggttacagtggatcaaaaataaaagatctacaacattcgacaaacactaaaatacagatcataaacggggaatctgaagcaaaagtcagaatttttggcaatagggaaatgaaagcaaaggccaaagcggctatagaaacacttattagaaaacaagaaagctacaactcagaatccagtgtggataatgctgcatcccaaacccctattggaagaaatctaggcagaaatgacattgttggagaagctgagccattgtcaaattgggatcgcattagggcagcagtcgtggagtgcgaaaagagaaaatgggcagatctaccaccagttaagaaaaacttttacatagaatccaaagcaacaagctgcatgtctgaaatgcaggtgattaactggagaaaggaaaatttcaacataacgtgtgatgacttgaaaagtggtgaaaagcgtctcattccaaaaccaacttgcaggtttaaagacgcttttcagcaataccctgatcttctgaaaagcataataagggtagggattgtaaagccaacgccaattcagtcacaggcatggccaattattctacaaggaatagatcttatagtagttgcacaaaccggaacagggaaaacattgtcctatctaatgcctgggtttattcatcttgattctcaaccaatatctagagagcaaaggaatgggcctgggatgctagtccttacacccactagagagttggctcttcacgtggaagctgaatgttcaaagtattcatataaaggtctcaaaagcatttgcatatatggtggtagaaacagaaatggacaaatagaagacattagcaaaggtgtagatatcattattgcaactcctgggaggctgaatgacctacaaatgaataactctgtcaacctaagaagcataacctacttggttatagatgaggcagataaaatgctggatatggaatttgaaccccagataaggaagattttattagatgtgcgcccagaccgacagactgttatgacaagtgcaacttggccagatactgtacgtcaactagcactttcttatttgaaagatcctatgattgtttatgttggtaatctgaatctagtggctgtaaatacagtgaagcaaaatataattgttaccacagaaaaagaaaaacgagctctcacccaagaattcgtagagaacatgtcacccaacgacaaagtcatcatgtttgtcagccaaaaacatattgctgatgacttgtcaagcgacttcaatatccaaggcatatctgcagaatcattacatggcaacagtgaacagagtgatcaagagcgagcagtagaggactttaaaagcggaaacataaagatactgattacaactgatatagtatcccgaggtcttgatcttaatgatgtcacacatgtatataattatgatttcccaaggaatattgacgtatatgtacacagagtagggtacattggacggacaggaaagactggcacatcagttaccctcatcactcagagagattcgaaaatggccggtgaattgattaaaattctggacagagcaaatcagagtgttccggaagatcttgtagtaatggctgagcaatacaagttaaatcaacaaaagaggcacagagaaacacgatcaagaaaacctggacaaagacgcaaggagttttattttttaagttgaaaagttgtaccaggctactggaagattccaggcatgttaaagatatgcagtattgaatatatgtaaggaagtattggaaacatactagccatttgaagacataactaattcttaaataatactgctaaactttc

SEQ ID NO: 29982 - protein, 631 aa, Homo sapiens; identical to SEQ ID NO: 4133

SEQ ID NO: 29983 - DNA, 2342 bp, Homo sapiens
ggcagccgggggagtccgagaggaagcggaggcgcgagctggaggcggcggctcccgtcggcctccggcaggactgagcgctgggaagccggaaggcgggcgcgcacggcggagaggcgggcgggaggccggagcatattaatgaaaagtgccataaactgaaaaaccaaacatgagggtagcaggtgctctgcacgttctacaaagcctcccagatataagtgtgggatctcaaaagcttgccctgagaagcattttgcttttaaaatggcaagtggagcagccaacgtggtgggacccaaaatctgcctggaagataatgttttaatgagtggtgttaagaataatgttggaagagggatcaatgttgccttggcaaatggaaaaacaggagaagtattagacactaaatattttgacatgtggggaggagatgtggcaccatttattgagtttctgaaggccatacaagatggaacaatagttttaatgggaacatacgatgatggagcaaccaaactcaatgatgaggcacggcggctcattgctgatttggggagcacatctattactaatcttggttttagagacaactgggtcttctgtggtgggaagggcattaagacaaaaacccttttgaacagcacataaagaacaataaggatacaaacaaatatgaaggatggcctgaagttgtagaaatggaaggatgcatcccccagaagcaagactaatggaaatgtggagagaattgaagaaagcgcactttcactcttaatgggagagctataaaaggcagagctatgtgtaaatattttaagagcatgcagccatcttggtgtgtgcatgagtattgtctcttttgatatcaggattatttattgctaacgtaaatagatagcattgtaaataatcatcacaatgatcaaatcactgaaccatgtctccgcacatttccctaaaagtacaatgtttagactgctatggtaatacatattttaaattctaaaagcatacacaatgtgtaactgaatggtttgtgaaaaatatattgatatatatactagttgctgtgaaaatatcatggaataatagggattttagggtggatactttattttcttttatatttctatatgttgccttgtgatgacattatcttttaaattaaaaagagatttggctagttgtgtgtgtaatgttactttacagtccgactctcctgatgtacctcttttcatgatctttttctttccttcccaagaaactgaggaatgtttaatatgaaaacatacatcggatatgtgaaaagcacaacaaaattcttaatgtacacagtaaaaaagtaaatatataaatgtagatggcatttaggaccacagcttgctggatttgtgttagctatgggaataacttgattttgtataagctatttagagtgaggctggaggtggcagcttcacagaactggagaaccaggccaagtcccctccccaacctaattaggtcattcaggacagctaagtcagtatatttagagcaatactagcatacgtttttcttagttgttatcagcattgaccaagtggtttggaaggaggcatgctttaatatcacaataattttgatttgtaaaccaagaaattaatcctgtgtttatctaacttcataatagcaattattgcccgaagctatagtggcatatttacaaaagttcttattactgggtggactgataatatttaaaaaataattgtgtttgaccccaaatgactttatacccaattctacataaaaatatacaagatctatctttttttgttaccttcagatgttcactaaataactcagtttttaagcagaagttttcagggcattaaatatatgttgtgtatgaagtatctcaaactggaacataaatttagtgatcaaactgccattcacagtgtaaggcagcacttaaatttcgaacctaaggtttagatgcattgtataaaaaaacctaaaagcagtatctgttatttagctgtaaaccaagttggaagctattcggataatttcttaaatattgatgaactttggagtactgtttcttccttcaaactgaatgtaattaattcatgaataaatgcaccttatatgtttaaacaatctttgtatacttttgggatttttggtgcttatatgctaaatcacattcagcatgtgtattttgacatttaaaatacttccctcaattctgtaaattaaaagaatagttattttacagttccagggattgtgaaataaacgttgcagttttttaaaataatgaaaataaatactcttggttttgctttgtg

SEQ ID NO: 29984 - protein, 127 aa, Homo sapiens
MASGAANVVGPKICLEDNVLMSGVKNNVGRGINVALANGKTGEVLDTKYFDMWGGDVAPFIEFLKAIQDGTIVLMGTYDDGATKLNDEARRLIADLGSTSITNLGFRDNWVFCGGKGIKTKTLLNST

SEQ ID NO: 29985 - DNA, 2463 bp, Homo sapiens
ggcagccgggggagtccgagaggaagcggaggcgcgagctggaggcggcggctcccgtcggcctccggcaggactgagcgctgggaagccggaaggcgggcgcgcacggcggagaggcgggcgggaggccggagcatattaatgaaaagtgccataaactgaaaaaccaaacatgagggtagcaggtgctgcaaagttggtggtagctgtggcagtgtttttactgacattttatgttatttctcaagtatttgaaataaaaatggatgcaagtttaggaaatctatttgcaagatcagcattggacacagctgcacgttctacaaagcctcccagatataagtgtgggatctcaaaagcttgccctgagaagcattttgcttttaaaatggcaagtggagcagccaacgtggtgggacccaaaatctgcctggaagataatgttttaatgagtggtgttaagaataatgttggaagagggatcaatgttgccttggcaaatggaaaaacaggagaagtattagacactaaatattttgacatgtggggaggagatgtggcaccatttattgagtttctgaaggccatacaagatggaacaatagttttaatgggaacatacgatgatggagcaaccaaactcaatgatgaggcacggcggctcattgctgatttggggagcacatctattactaatcttggttttagagacaactgggtcttctgtggtgggaagggcattaagacaaaaacccttttgaacagcacataaagaacaataaggatacaaacaaatatgaaggatggcctgaagttgtagaaatggaaggatgcatcccccagaagcaagactaatggaaatgtggagagaattgaagaaagcgcactttcactcttaatgggagagctataaaaggcagagctatgtgtaaatattttaagagcatgcagccatcttggtgtgtgcatgagtattgtctcttttgatatcaggattatttattgctaacgtaaatagatagcattgtaaataatcatcacaatgatcaaatcactgaaccatgtctccgcacatttccctaaaagtacaatgtttagactgctatggtaatacatattttaaattctaaaagcatacacaatgtgtaactgaatggtttgtgaaaaatatattgatatatatactagttgctgtgaaaatatcatggaataatagggattttagggtggatactttattttcttttatatttctatatgttgccttgtgatgacattatcttttaaattaaaaagagatttggctagttgtgtgtgtaatgttactttacagtccgactctcctgatgtacctcttttcatgatctttttctttccttcccaagaaactgaggaatgtttaatatgaaaacatacatcggatatgtgaaaagcacaacaaaattcttaatgtacacagtaaaaaagtaaatatataaatgtagatggcatttaggaccacagcttgctggatttgtgttagctatgggaataacttgattttgtataagctatttagagtgaggctggaggtggcagcttcacagaactggagaaccaggccaagtcccctccccaacctaattaggtcattcaggacagctaagtcagtatatttagagcaatactagcatacgtttttcttagttgttatcagcattgaccaagtggtttggaaggaggcatgctttaatatcacaataattttgatttgtaaaccaagaaattaatcctgtgtttatctaacttcataatagcaattattgcccgaagctatagtggcatatttacaaaagttcttattactgggtggactgataatatttaaaaaataattgtgtttgaccccaaatgactttatacccaattctacataaaaatatacaagatctatctttttttgttaccttcagatgttcactaaataactcagtttttaagcagaagttttcagggcattaaatatatgttgtgtatgaagtatctcaaactggaacataaatttagtgatcaaactgccattcacagtgtaaggcagcacttaaatttcgaacctaaggtttagatgcattgtataaaaaaacctaaaagcagtatctgttatttagctgtaaaccaagttggaagctattcggataatttcttaaatattgatgaactttggagtactgtttcttccttcaaactgaatgtaattaattcatgaataaatgcaccttatatgtttaaacaatctttgtatacttttgggatttttggtgcttatatgctaaatcacattcagcatgtgtattttgacatttaaaatacttccctcaattctgtaaattaaaagaatagttattttacagttccagggattgtgaaataaacgttgcagttttttaaaataatgaaaataaatactcttggttttgctttgtg

SEQ ID NO: 29986 - protein, 199 aa, Homo sapiens
MRVAGAAKLVVAVAVFLLTFYVISQVFEIKMDASLGNLFARSALDTAARSTKPPRYKCGISKACPEKHFAFKMASGAANVVGPKICLEDNVLMSGVKNNVGRGINVALANGKTGEVLDTKYFDMWGGDVAPFIEFLKAIQDGTIVLMGTYDDGATKLNDEARRLIADLGSTSITNLGFRDNWVFCGGKGIKTKTLLNST

SEQ ID NO: 29987 - DNA, 2389 bp, Homo sapiens
cagccgggggagtccgagaggaagcggaggcgcgagctggaggcgggcgggaggccggagcatattaatgaaaagtgccataaactgaaaaaccaaacatgagggtagcaggtgctgcaaagttggtggtagctgtggcagtgtttttactgacattttatgttatttctcaagtatttgaaataaaaatggatgcaagtttaggaaatctatttgcaagatcagcattggacacagctgcacgttctacaaagcctcccagatataagtgtgggatctcaaaagcttgccctgagaagcattttgcttttaaaatggcaagtggagcagccaacgtggtgggacccaaaatctgcctggaagataatgttttaatgagtggtgttaagaataatgttggaagagggatcaatgttgccttggcaaatggaaaaacaggagaagtattagacactaaatattttgacatgtggggaggagatgtggcaccatttattgagtttctgaaggccatacaagatggaacaatagttttaatgggaacatacgatgatggagcaaccaaactcaatgatgaggcacggcggctcattgctgatttggggagcacatctattactaatcttggttttagagacaactgggtcttctgtggtgggaagggcattaagacaaaaacccttttgaacagcacataaagaacaataaggatacaaacaaatatgaaggatggcctgaagttgtagaaatggaaggatgcatcccccagaagcaagactaatggaaatgtggagagaattgaagaaagcgcactttcactcttaatgggagagctataaaaggcagagctatgtgtaaatattttaagagcatgcagccatcttggtgtgtgcatgagtattgtctcttttgatatcaggattatttattgctaacgtaaatagatagcattgtaaataatcatcacaatgatcaaatcactgaaccatgtctccgcacatttccctaaaagtacaatgtttagactgctatggtaatacatattttaaattctaaaagcatacacaatgtgtaactgaatggtttgtgaaaaatatattgatatatatactagttgctgtgaaaatatcatggaataatagggattttagggtggatactttattttcttttatatttctatatgttgccttgtgatgacattatcttttaaattaaaaagagatttggctagttgtgtgtgtaatgttactttacagtccgactctcctgatgtacctcttttcatgatctttttctttccttcccaagaaactgaggaatgtttaatatgaaaacatacatcggatatgtgaaaagcacaacaaaattcttaatgtacacagtaaaaaagtaaatatataaatgtagatggcatttaggaccacagcttgctggatttgtgttagctatgggaataacttgattttgtataagctatttagagtgaggctggaggtggcagcttcacagaactggagaaccaggccaagtcccctccccaacctaattaggtcattcaggacagctaagtcagtatatttagagcaatactagcatacgtttttcttagttgttatcagcattgaccaagtggtttggaaggaggcatgctttaatatcacaataattttgatttgtaaaccaagaaattaatcctgtgtttatctaacttcataatagcaattattgcccgaagctatagtggcatatttacaaaagttcttattactgggtggactgataatatttaaaaaataattgtgtttgaccccaaatgactttatacccaattctacataaaaatatacaagatctatctttttttgttaccttcagatgttcactaaataactcagtttttaagcagaagttttcagggcattaaatatatgttgtgtatgaagtatctcaaactggaacataaatttagtgatcaaactgccattcacagtgtaaggcagcacttaaatttcgaacctaaggtttagatgcattgtataaaaaaacctaaaagcagtatctgttatttagctgtaaaccaagttggaagctattcggataatttcttaaatattgatgaactttggagtactgtttcttccttcaaactgaatgtaattaattcatgaataaatgcaccttatatgtttaaacaatctttgtatacttttgggatttttggtgcttatatgctaaatcacattcagcatgtgtattttgacatttaaaatacttccctcaattctgtaaattaaaagaatagttattttacagttccagggattgtgaaataaacgttgcagttttttaaaataatgaaaataaatactcttggttttgctttgtg

SEQ ID NO: 29988 - protein, 199 aa, Homo sapiens; identical to SEQ ID NO: 29986

SEQ ID NO: 29989 - DNA, 2288 bp, Homo sapiens
atttggaaggaggcgtgatttccacgttcgagcgtcttcgctccccaccccctctcggcaccagccagtgcgcgccaccacctgagcctggcgagagccgggacgcacgcagtcttcagcctgctcctttaagcctctggagagactcggctctgagcgggtccgcccgacacccgccccctccccccactcctgagaactctttactttttgtttggaaaatcggggccatttctttatttatctctgggtcttcccggaggagggcagagaaggggagagcgagatcgagcgcaacctcgttaacagcctcttcccggtcaaccgctccaagcaccgtctctactcggacctgcagacccccgggcgctacggccgggtcatcgtcacctccttccagaaagccaacatgctggaccagcatcacaccgacctgatcttaaagttgcatgctgctgtcaccaagatccaggttccaaggcctggttttaattacacgtttgcccatatatgtatcctgaataatgataagacttgcatcgtggatgacatagtgcacgtcctggaagagctaaagaatgctcgggccaccaatcggaccaattttgctatcacatacccaatcactcacttaaaggacgggagggctgtgtacaatgggcaccagcttgggggcgtcactgtgcacagcaaagaccgggtgaaatctgcagaggccatccagctcacctactacctgcagtcaatcaacagtctcaatgacatggtggctgagaggtgggagtccagcttctgcgacactgtcagactgtttcagaaatccaacagcaaagtcaaaatgtacccttacacgtcctcctcactgagggaagatttccagaagaccagccgcgtatcagaacgttacctggtcaccagcctgattctggtggttaccatggccatcctgtgttgctctatgcaggactgcgtccgcagcaaaccctggctaggcctgctcggattggtgaccataagcctggccactctcactgcagccgggatcatcaatcttactggtgggaaatataattccaccttcctgggagtccctttcgtcatgctaggtaattactactcttctttcttctgtttccgcctgctggtggtgttgactaggttcctaaaaggccaggagtagccttctaacaactttgtttcatttaacagtatcttcattttgcccaaaagtcctgggacccactctataaagtgctggtaatcagcaaaaaacaacctaatctggtaaatgtgccagaagttcaaagtcctgggttctagcgctgactctccattgagcagccatgtggtgtctagcaggtattaatcttctccttgtcccagtgtcttaggttgggcttccccataagcagggccctgagaaaaagatttggatacaagtagtgtatttgggaggtgagcccaggaagcaccagtatgggagtgaggaagtggaagttgaaggcacttcagttgaaggcaggcagttgaaggtatgttaatgagcccaagatatatcacattctgccggttgctgtgggcacctgtggttcagccccacaggggacctttgggagaccttgtgaaacacacctcagagaggtcctcccccggggtgaggaatttgggctattttcccacagaccctttgtgattcattgagggctgctccccaggccagttaactgccagcacttcccagggaggtgctcctgcagcacactcctgcagccagagaaatccttcaggtgactttgtagttataagccttcagcaagctcaagaatggggaatgggagggcatgttgggttggcactgagagcgcctgctactctcagtttccccaccttatgaatagagtggatgtgagcatcacacaaaaggacatgataaatgtataagaactttgaaagtgacatgtgagataccagtaggaagtaactttttttcctattcttactatgaactcaggagaatattttaaagcgatgctgatggtgacagcgtgcttccagtgtgtccactcagggggctgctggaactccctgatagagattaatggtcaaaacaaagccatagtggccataacatcggttgccctgtccatctgttatcgaaaatggcatgcccagcaagcctgatggcagggttcttgcgggccaaggattcaagaggttcactttcccccttttctatggtagcttctcatcaattcctttaacaaaattaaaatgtcatttggaatcag

SEQ ID NO: 29990 - protein, 256 aa, Homo sapiens
MLDQHHTDLILKLHAAVTKIQVPRPGFNYTFAHICILNNDKTCIVDDIVHVLEELKNARATNRTNFAITYPITHLKDGRAVYNGHQLGGVTVHSKDRVKSAEAIQLTYYLQSINSLNDMVAERWESSFCDTVRLFQKSNSKVKMYPYTSSSLREDFQKTSRVSERYLVTSLILVVTMAILCCSMQDCVRSKPWLGLLGLVTISLATLTAAGIINLTGGKYNSTFLGVPFVMLGNYYSSFFCFRLLVVLTRFLKGQE

SEQ ID NO: 29991 - DNA, 2695 bp, Homo sapiens
atctccatcctgctcggcgccagcttcagccgctaccaggtcgaggagagcgtggagcacctgctggcgccccagcacagcctggccaagatcgagcgcaacctcgttaacagcctcttcccggtcaaccgctccaagcaccgtctctactcggacctgcagacccccgggcgctacggccgggtcatcgtcacctccttccagaaagccaacatgctggaccagcatcacaccgacctgatcttaaagttgcatgctgctgtcaccaagatccaggttccaaggcctggttttaattacacgtttgcccatatatgtatcctgaataatgataagacttgcatcgtggatgacatagtgcacgtcctggaagagctaaagaatgctcgggccaccaatcggaccaattttgctatcacatacccaatcactcacttaaaggacgggagggctgtgtacaatgggcaccagcttgggggcgtcactgtgcacagcaaagaccgggtgaaatctgcagaggccatccagctcacctactacctgcagtcaatcaacagtctcaatgacatggtggctgagaggtgggagtccagcttctgcgacactgtcagactgtttcagaaatccaacagcaaagtcaaaatgtacccttacacgtcctcctcactgagggaagatttccagaagaccagccgcgtatcagaacgttacctggtcaccagcctgattctggtggttaccatggccatcctgtgttgctctatgcaggactgcgtccgcagcaaaccctggctaggcctgctcggattggtgaccataagcctggccactctcactgcagccgggatcatcaatcttactggtgggaaatataattccaccttcctgggagtccctttcgtcatgctaggtcatggattatatgggacttttgaaatgttatcctcctggaggaaaactagagaagaccaacatgttaaagagagaactgcagcagtctatgcagactccatgctctccttttctctcaccactgccatgtacctggtcacctttggcataggggccagccctttcacgaacattgaggcagccaggattttctgctgcaattcctgtattgcaatcttcttcaactacctctatgtactctcgttttatggttccagcctagtgttcactggctacatagaaaacaattaccagcatagtatcttctgtagaaaagtcccaaagcctgaggcattgcaggagaagccggcatggtacaggtttctcctgacggccagattcagtgaggacacagctgaaggcgaggaagcgaacacttacgagagtcacctattggtatgtttcctcaaacgctattactgtgactggataaccaacacctatgtcaagccttttgtagttctcttttaccttatttatatttcctttgccttaatgggctatctgcaggtcagtgaagggtcagaccttagtaacattgtagcaaccgcgacacaaaccattgagtacactactgcccagcaaaagtacttcagcaactacagtcctgtgattgggttttacatatatgagtctatagaatactggaacactagtgtccaagaagatgttctagaatacaccaaggggtttgtgcggatatcctggtttgagagctatttaaattaccttcggaaactcaatgtatccactggcttgcctaagaaaaatttcacagacatgttgaggaattcctttctgaaagcccctcaattttcacattttcaagaggacatcatcttctctaaaaaatacaatgatgaggtcgatgtagtggcctccagaatgtttttggtggccaagaccatggaaacaaacagagaagaactctatgatctcttggaaaccctgaggagactttctgtcacctccaaggtgaagttcatcgtcttcaatccgtcctttgtatacatggatcgatatgcctcctctctgggagcccccctgcacaactcctgcatcagtgctttgttcctgctcttcttctcggcattcctggtggcagattcactgattaacgtctggatcactctcacagttgtgtccgtggagtttggagtgataggtttcatgacattatggaaagtagaactggactgcatttctgtgctatgcttaatttatggaattaattacacaattgacaattgtgctccaatgttatccacatttgttctgggcaaggatttcacaagaactaaatgggtaaaaaatgccctggaagtgcatggggtagctattttacagagttacctctgctatattgttggtctgattcctcttgcagctgtgccttcaaatctgacctgtacactgttcaggtgcttgtttttaatagcatttgtcaccttctttcactgctttgccattttacctgtgatactgactttcctgccaccctctaagaaaaaaaggaaagagaagaaaaatcctgagaaccgggaggaaattgagtgtgtagaaatggtagatatcgatagtacccgtgtggttgaccaaattacaacagtgtgataatgtctgcttggcatattttcaccttaggtcttatcaagaccaaagagattatgttaatgaaacaattaaattcaaagttcttcccttttttaaagataggaaacaggcattgccaaaaaaaaaaaaa

SEQ ID NO: 29992 - protein, 783 aa, Homo sapiens
MLDQHHTDLILKLHAAVTKIQVPRPGFNYTFAHICILNNDKTCIVDDIVHVLEELKNARATNRTNFAITYPITHLKDGRAVYNGHQLGGVTVHSKDRVKSAEAIQLTYYLQSINSLNDMVAERWESSFCDTVRLFQKSNSKVKMYPYTSSSLREDFQKTSRVSERYLVTSLILVVTMAILCCSMQDCVRSKPWLGLLGLVTISLATLTAAGIINLTGGKYNSTFLGVPFVMLGHGLYGTFEMLSSWRKTREDQHVKERTAAVYADSMLSFSLTTAMYLVTFGIGASPFTNIEAARIFCCNSCIAIFFNYLYVLSFYGSSLVFTGYIENNYQHSIFCRKVPKPEALQEKPAWYRFLLTARFSEDTAEGEEANTYESHLLVCFLKRYYCDWITNTYVKPFVVLFYLIYISFALMGYLQVSEGSDLSNIVATATQTIEYTTAQQKYFSNYSPVIGFYIYESIEYWNTSVQEDVLEYTKGFVRISWFESYLNYLRKLNVSTGLPKKNFTDMLRNSFLKAPQFSHFQEDIIFSKKYNDEVDVVASRMFLVAKTMETNREELYDLLETLRRLSVTSKVKFIVFNPSFVYMDRYASSLGAPLHNSCISALFLLFFSAFLVADSLINVWITLTVVSVEFGVIGFMTLWKVELDCISVLCLIYGINYTIDNCAPMLSTFVLGKDFTRTKWVKNALEVHGVAILQSYLCYIVGLIPLAAVPSNLTCTLFRCLFLIAFVTFFHCFAILPVILTFLPPSKKKRKEKKNPENREEIECVEMVDIDSTRVVDQITTV

SEQ ID NO: 29993 - DNA, 3595 bp, Homo sapiens
cagtactgtacaaggaaaaccccgtcggatctgttattgcgggatacttgtgaaatatacataggattctttcttatggctgcatcccggatctggaaattttacttggggaccaggaggatttgaaaggctgcatgtactcagaagatttgcaagcaacactccaattcttgtcatagagctcgcagacttctcacttatcggcttttttccttccttattttttaagaattattcttattttcccctctctttttctgctctctcctctctcagtctctccttttctatctgcctcttcatttttctcctagtctgtttttttttttcctgctctgcacctggattgtatcttcagcaaacaatcgggcactttgagaactaactggagacagtcttgtagggaagatctgtatggaattatctgcttttatggtgaacttggcatttgtgaatgggaatcttgttcacaatattaattgctagcaaaaacaagaaaaagaacacaggagtaaaacgtggatttttctgaatacgcattgtgatgaccagcaattaccttaccgactaatatccagaggagaataatttggaagactgttgtggggaacggcctttaagagctggaagatgaaagctccgattccacacttgattctcttatacgctacttttactcagagtttgaaggttgtgaccaaaagaggctccgccgatggatgcactgactggtctatcgatatcaagaaatatcaagttttggtgggagagcctgttcgaatcaaatgtgcactcttttatggttatatcagaacaaattactcccttgcccaaagtgctggactcagtttgatgtggtacaaaagttctggtcctggagactttgaagagccaatagcctttgacggaagtagaatgagcaaagaagaagactccatttggttccggccaacattgctacaggacagtggtctctacgcctgtgtcatcagaaactccacttactgtatgaaagtatccatctcactgacagtgggtgaaaatgacactggactctgctataattccaagatgaagtattttgaaaaagctgaacttagcaaaagcaaggaaatttcatgccgtgacatagaggattttctactgccaaccagagaacctgaaatcctttggtacaaggaatgcaggacaaaaacatggaggccaagtattgtattcaaaagagatactctgcttataagagaagtcagagaagatgacattggaaattatacctgtgaattaaaatatggaggctttgttgtgagaagaactactgaattaactgttacagcccctctgactgataagccacccaagcttttgtatcctatggaaagtaaactgacaattcaggagacccagctgggtgactctgctaatctaacctgcagagctttctttgggtacagcggagatgtcagtcctttaatttactggatgaaaggagaaaaatttattgaagatctggatgaaaatcgagtttgggaaagtgacattagaattcttaaggagcatcttggggaacaggaagtttccatctcattaattgtggactctgtggaagaaggtgacttgggaaattactcctgttatgttgaaaatggaaatggacgtcgacacgccagcgttctccttcataaacgagagctaatgtacacagtggaacttgctggaggccttggtgctatactcttgctgcttgtatgtttggtgaccatctacaagtgttacaagatagaaatcatgctcttctacaggaatcattttggagctgaagagctcgatggagacaataaagattatgatgcatacttatcatacaccaaagtggatcctgaccagtggaatcaagagactggggaagaagaacgttttgcccttgaaatcctacctgatatgcttgaaaagcattatggatataagttgtttataccagatagagatttaatcccaactggaacatacattgaagatgtggcaagatgtgtagatcaaagcaagcggctgattattgtcatgaccccaaattacgtagttagaaggggctggagcatctttgagctggaaaccagacttcgaaatatgcttgtgactggagaaattaaagtgattctaattgaatgcagtgaactgagaggaattatgaactaccaggaggtggaggccctgaagcacaccatcaagctcctgacggtcattaaatggcatggaccaaaatgcaacaagttgaactccaagttctggaaacgtttacagtatgaaatgccttttaagaggatagaacccattacacatgagcaggctttagatgtcagtgagcaagggccttttggggagctgcagactgtctcggccatttccatggccgcggccacctccacagctctagccactgcccatccagatctccgttctacctttcacaacacgtaccattcacaaatgcgtcagaaacactactaccgaagctatgagtacgacgtacctcctaccggcaccctgcctcttacctccataggcaatcagcatacctactgtaacatccctatgacactcatcaacgggcagcggccacagacaaaatcgagcagggagcagaatccagatgaggcccacacaaacagtgccatcctgccgctgttgccaagggagaccagtatatccagtgtgatatggtgacagaaaagcaagggacatcccgtccctgggaggttgagtggaatctgcagtccagtgcctggaactaaatcctcgactgctgctgttaaaaaacatgcattagaatctctagaacacgaggaaaaacagggtcttgtacatatgttttttggaatttctttgtagcatcagtgtcctcctgttttaccatgtcttttaccattacattttttgactttgttttatatgtcgttggaatttgtaaatttacattttttttaaagaagagactgatgtgtagatagaaaaccctttttttgcttcattagtttagttttagaatgggtttttattttatttccttttttaaaattttactttgcttttaacatttccttggggtgcttggacaaatctatccgatgggacaaggagcaccggattctttctcgggttctgcctagcatcaactgggccacgtcggccttcagagaacagtgcaacaaatgccagcattgccattcgggggaaaaaaaaaaaaaaaaaaaaaagatgagaagaacacttgttcataggagggccccaccagtcagagccctgaatctcttccttgtcccacctcattccccacctctacctttctaatggcggcatgatgtgtaaactctgtgcaggggtgggggcgggtctaactgtcttaacattcaagtcactgctcttcagaatacactctagacccaaaggtgtgctaatcacttcacagtgaccactacagagtactaagaagagaagatcaagggcatgaaattggggaagagtgttatttccgttttttaaatgagttgatgtacccttatatatatatacatatatatataaatataaatatatataa

SEQ ID NO: 29994 - protein, 696 aa, Homo sapiens; identical to SEQ ID NO: 4137

SEQ ID NO: 29995 - DNA, 1610 bp, Homo sapiens
ctgacttccgctttggaggcgaggacccgagcgagtgtagggggtgcggcgtctggtcagccaggggtgaattctcaggactggtcggcagtcaagccatcatgcctcgtggtcagaagagtaagctccgtgcccgtgagaaacgccgcaaggcccgagatgagacccggggtctcaatgttcctcaggtcactgaagcagaggaagaagaggccccctgctgttcctcttctgtttctgggggtgctgcttcaagctctcctgctgctggcattccccaggagcctcagagagccccaaccactgccgctgctgcggctgcgggtgtttcatccacaaaatctaaaaaaggtgccaagagccaccaaggtgagaaaaatgcaagttcctcccaggcctcaacatccactaagagcccaagcgaagatcctctaaccaggaagtcagggtcgttggtgcagttcctgttgtacaagtataaaataaaaaagtccgttacaaagggagaaatgctgaaaattgttggcaaaaggttcagggagcacttccctgagatcctcaagaaagcctctgagggcctcagtgttgtctttggccttgagctgaataaagtcaaccccaacggccacacttacaccttcatcgacaaggtagacctcactgatgaggaatccctgctcagttcctgggactttcccaggagaaagcttctgatgcctctcctgggtgtgatcttcttaaatggcaactcagctactgaggaagagatctgggaattcctgaatatgttgggagtctatgatggagaggagcactcagtctttggggaaccctggaagctcatcaccaaagatctggtgcaggaaaaatatctggagtacaagcaggtgcccagcagtgatcccccacgctttcaattcctgtggggtccgagagcctatgctgaaaccagcaagatgaaagtcctggagtttttggccaaggtaaatggtaccaccccctgtgccttcccaacccattacgaagaagctttgaaagatgaagagaaagccggagtctgagccagagttgtagccaggccttgcactactgccatagccaatcaatctcccaaagccaagtttacctgctgttctcacccccaatgaggtcttaggcagattctttactttgtaattcaaaaggcctgttaacctttgttcttgttatgcatgaataacttgttgactttttttttttctctttttcaactagtgtttcaacaggtttatttagattcagaatgtaaatttacaaatgatatagatcaccctgttattgctgtttttcagggacagtagaaagtgttttgttttttgagtgaaacaacttattaataaaaatccttaaatcacttttgtaatccaggacaagaaaatgtggcattagagtagaaatatctttggaaatgtgaaagaccccatagtgaaatatttgggatcagaagccagaggtgtaaaagtggtcaattcttggtttacttcatttaatctttcttttcataaagatacatacctggatttgtttatgttattcaagaatgtgtgagaaattaaaccatagttagttaa

SEQ ID NO: 29996 - protein, 319 aa, Homo sapiens
MPRGQKSKLRAREKRRKARDETRGLNVPQVTEAEEEEAPCCSSSVSGGAASSSPAAGIPQEPQRAPTTAAAAAAGVSSTKSKKGAKSHQGEKNASSSQASTSTKSPSEDPLTRKSGSLVQFLLYKYKIKKSVTKGEMLKIVGKRFREHFPEILKKASEGLSVVFGLELNKVNPNGHTYTFIDKVDLTDEESLLSSWDFPRRKLLMPLLGVIFLNGNSATEEEIWEFLNMLGVYDGEEHSVFGEPWKLITKDLVQEKYLEYKQVPSSDPPRFQFLWGPRAYAETSKMKVLEFLAKVNGTTPCAFPTHYEEALKDEEKAGV

SEQ ID NO: 29997 - DNA, 1339 bp, Homo sapiens
gatgggccccctcccctgacccctgtctacactcagccagaagctgatttgagctggtcccacagtgctgcctgtgggaacccaagcccttcctgctcctatctgcctctggctggatgacgccccgggcaattccgcccactgttttgaccccaggccccaaacctaggtgaggaacgccctcctcacagtccttccctgcttccagttcagtgttgacagtgagcagtgctcgctttgctatggctaggccctcactctcctctcttttcaaggccccaagagagtaagccatttattcacaccctatcttgacagcaaagccggggccttgaacctggggcactgctttcagccattattcttgcagaggccccagagctcccagcctgcatttttggagtctgagcagggcccacagctgttttgcttcagctaggagtgaaggctgacaaagagcaaggtctctggagaaggaggaaatgttttctggatgccaaactggtgactgtggggaggtgtggggcagcggggagggaggagctctcacttgtgcctagggaaaggtcatggtcaatgagaaagcctttgatggggagagtctgagatgggacccaggaacatcaccatgaagctgtccaggatggatgtgggaccctctgtcagaccaggccagttctcttaatgtaagatcagcaggccaaggtcctgggatatgggagctcccaggaagtggactgggatgcctgagggatccaagaattagcagtgtcctgtgtggtctcgctgagggaagccaggcaaaatctagcggctcagctgtaacagccggagctcttggctcccaagcaacaggaaacaattctggcttatttaagcagaaaaggactttatcaaaaggatcttggggaactcacaaaataaccaagagggctgaagaatacagttggtgagtcgaccaaggaggctgcacagcagtcaggaccacagccaaagtcaggcaatccagggatgacctcgctgccaaatccaggactccctggcatacactgccaccttgggacgtggatatggtccctgtcgccccaggaactggaatgccattgacttggcgactgccaccatccaccagaatggacttctgtgctccttgcatctctgtattattagttcccaactccaagcctttgatgggggcatctgatggattgagcctaagaaagacgaatgcccactttcggattccatcttctgccgcggacgcatccgggacgcgcagccgcccggcgcagaggaagcccgggacgctggggacaccgcctggagcctccgcgcatag

SEQ ID NO: 29998 - protein, 88 aa, Homo sapiens
MVPVAPGTGMPLTWRLPPSTRMDFCAPCISVLLVPNSKPLMGASDGLSLRKTNAHFRIPSSAADASGTRSRPAQRKPGTLGTPPGASA

SEQ ID NO: 29999 - DNA, 3584 bp, Homo sapiens
gatgggccccctcccctgacccctgtctacactcagccagaagctgatttgagctggtcccacagtgctgcctgtgggaacccaagcccttcctgctcctatctgcctctggctggatgacgccccgggcaattccgcccactgttttgaccccaggccccaaacctaggtgaggaacgccctcctcacagtccttccctgcttccagttcagtgttgacagtgagcagtgctcgctttgctatggctaggccctcactctcctctcttttcaaggccccaagagagtaagccatttattcacaccctatcttgacagcaaagccggggccttgaacctggggcactgctttcagccattattcttgcagaggccccagagctcccagcctgcatttttggagtctgagcagggcccacagctgttttgcttcagctaggagtgaaggctgacaaagagcaaggtctctggagaaggaggaaatgttttctggatgccaaactggtgactgtggggaggtgtggggcagcggggagggaggagctctcacttgtgcctagggaaaggtcatggtcaatgagaaagcctttgatggggagagtctgagatgggacccaggaacatcaccatgaagctgtccaggatggatgtgggaccctctgtcagaccaggccagttctcttaatgtaagatcagcaggccaaggtcctgggatatgggagctcccaggaagtggactgggatgcctgagggatccaagaattagcagtgtcctgtgtggtctcgctgagggaagccaggcaaaatctagcggctcagctgtaacagccggagctcttggctcccaagcaacaggaaacaattctggcttatttaagcagaaaaggactttatcaaaaggatcttggggaactcacaaaataaccaagagggctgaagaatacagttggtgagtcgaccaaggaggctgcacagcagtcaggaccacagccaaagtcaggcaatccagggatgacctcgctgccaaatccaggactccctggcatacactgccaccttgggacgtggatatggtccctgtcgccccaggaactggaatgccattgacttggcgactgccaccatccaccagaatggacttctgtgctccttgcatctctgtattattagttcccaactccaagcctttgatgggggcatctgatggattgagcctaaggattctgatggtgcctgttggctgcttccgtgatgtctggagttgcaaaatgtgccagaaagcagaaggatacaccgctattcagagaggattttcttagggacttgaagaaattgacctcaaaatttcagtagatgagaggactgtggctggcctgtgtctttggcactggttgttggagcccaatgaaaaattctacattgaagactaagggaaaaagaggtttcattatagagctgggactgattgcattttcaaaaggtggctgcaacaatatcccacacacttttctgctgtataatctgccacttctccatcaagtagaggagacaatttctcccctcctttgaatctgagtgagttctgtgactgttttgactgatagaatgatgtggaagacagactgtgtgacctgaaaggtgaggtcacagaaagccttgcaacttccacctggcctgtgaagaacacttgctcttgggatactccttcttggaacccagccaccatgctgtaagaagcccaatctacatgcagacaccacatataaggcatcgtagtcaacagccacagttaagttcccagccggcagccaacatcaactaccagtcttgtgagtgagctatcttggacatccagcttggttaaaccttcagatgactccagccccagctgacacctgactgcaaccacatgagaaaccaggaatgaaaatccaccagctgagcccagtcaactcatagaactgtgagagataataataagttgtggtactaagccactaggattggggcaccatgcaataataggtaaccaagacagtagcaactttggttagacacatgagccatgggatgacacataattaggtatatttttaaaaacttggattcagctttagggcaatgtgtccctaacatagagaggcactatttcagttcacatctgctgcctctgatcaaaacactctcttgcacttccagagagagagagagagagagcaaatgtgtgtatttactgacaggtgtccctttgtgtccccatctgtgtgactgtggagctcagtgtctctcacacattctagtatgatacttggtgccatatttgcaggtcctgaggtaagaacccatgctgttgtcttcagagagtttcatgggttggactgtgccatatatgggcaaaaatccacccacacgttttcttttaatcacctttatggatgtataatttacatatatacttttttcttattactttttatttatgtaatttattcattttttgagatagggtctcactctcttgcccaggctggagtgcagtggagtgatcatggctcactgcagccttgacctcctgggcttaagcaatcctcccacttcagccacctgagtagctgggaccacaggcacacaccaccactcctggctaatttaaaaagttgtttttttttttttttttgtagagacagggtctcactatgttgtcaaggctggtctcaaactcctgggctcaagcgatcctagtgcctcagccttccaaagttccgggattacaagcatgagccaccatgcctggcatcttttgtggatgtgtaatttacatacgtacaataatatgtacctattttaagtatacagtttgatgagctttgacgaatgtagcccacgaaaccaccaccataatcgaagtatagaactttttttttttttttttttgagacgaagtctctctcttgtcacccaggctggagtgcaatggcatgatcccggctcactgaaacttccgcctcccaggttcaagcgattctcctgcctcagcctcctgagtagctgggattacaggcacctgccaccacgcccagctaatttttgtatttttagtagagacagggtttcaccatgctggccaggctggtctcgagctcctgacctcaggtgatcccccctcctcggcctcccaaagtgctgggattacaggcatgagccactgcgcccggcctatagaacattttaatcaccccagagatgtgccccctgtgcagccagttccctcctctcaccccccagcccctggcaagcattgatttgctttgccactatcaatcaatttttgtcttttctggtatttcatatgaatggaatcatataggatagatttttatgtgactacacactattttagcataatatttttgaagttcttccatgttgttgtgtatatctatagttaatttctttttctcactgaattgtataccactgtatgatgtatcacaatttgtttattcattctcccgttgctggacatttggactgtttattgtttggggctactatgaataaaactgctatggatgtttatgtac

SEQ ID NO: 30000 - protein, 82 aa, Homo sapiens
MVPVAPGTGMPLTWRLPPSTRMDFCAPCISVLLVPNSKPLMGASDGLSLRILMVPVGCFRDVWSCKMCQKAEGYTAIQRGFS

SEQ ID NO: 30001 - DNA, 554 bp, Homo sapiens
caggaacacagactggaaagatacacacaaaattcaggatggtaaaagaagaaagatcgggacagagacctgcttggagatttctcatactcatccttagatctgctttgagaacaagaacaggagcccagatcagatttgggcatagatttgctccttgagctagatttcctgccttttgaacgagaacgtgatcgacctttgctccgcaacctgatcaggagtgactttttgagatacttcgagatctactgtggctgctcctgcgactcctacttcgtgaccatcttctagatctatacctggatctgcttccagaatcagatcgcctatggcttgtgcctggcttaccttcaataagcctaatatttctgcaccatccagtttgtccaaagcaagcttcatgtcaaaataggagtgaaactcaacgccctcacttgtgcattccttgtgagcatcaacataggttacttcatctgcttgttgcataaaatcctttaaatcttgccaactgtaacaactagaaagactttctataataagctcgtattctg

SEQ ID NO: 30002 - protein, 40 aa, Homo sapiens [sequence omitted]

SEQ ID NO: 30003 - DNA, 845 bp, Homo sapiens
aacacagactggaaagatacacacaaaattcaggatggtaaaagaagaaaggagattcctcttgcaaaagaagccaagtataaacatggaagaacaactgcctaagcaagtagaaaagtgttccataatagtgcgcaatgaatgaagagttctggattaatctctggaactcaacctgcaccctgatctttattttgaatgggatctagaacgggatcttgaagtagctctttttggcggaggggacacagaatgaccctttgagggtggagcaggtaggggtgaattggaacgagactggctccttgatctgtattttgacttcatatcaccttttccattttctttggaagatcgggacagagacctgcttggagatttctcatactcatccttagatctgctttgagaacaagaacaggagcccagatcagatttgggcatagatttgctccttgagctagatttcctgccttttgaacgagaacgtgatcgacctttgctccgcaacctgatcaggagtgactttttgagatacttcgagatctactgtggctgctcctgcgactcctacttcgtgaccatcttctagatctatacctggatctgcttccagaatcagatcgcctatggcttgtgcctggcttaccttcaataagcctaatatttctgcaccatccagtttgtccaaagcaagcttcatgtcaaaataggagtgaaactcaacgccctcacttgtgcattccttgtgagcatcaacataggttacttcatctgcttgttgcataaaatcctttaaatcttgccaactgtaacaactagaaagactttctataataagctcg

SEQ ID NO: 30004 - protein, 36 aa, Homo sapiens
MVKEERRFLLQKKPSINMEEQLPKQVEKCSIIVRNE

SEQ ID NO: 30005 - DNA, 6573 bp, Homo sapiens
cctactaccaggtcattgtgcaggagaacaacacgcctggcgcctatctgctctctgtgtctgctcgcgaccccgacctgggtctcaacggcagtgtctcctaccagatcgtgccgtcgcaggtgcgggacatgcctgtcttcacctatgtctccatcaatcccaactcaggcgacatctacgcgctgcgatcctttaaccacgagcagaccaaggcgttcgaattcaaggtgctggccaaggacggcggccttccctcactgcaaagcaacgctacggtgcgggtcatcatcctcgacgtcaacgacaacaccccggtcatcacagccccacctctgattaacggcactgccgaggtctacataccccgcaactctggcataggctacctggtgactgttgtcaaggcagaagactacgatgagggcgaaaatggccgagtcacctacgacatgaccgagggcgaccgcggcttctttgaaatagaccaggtcaatggcgaagtcagaaccacccgcaccttcggggagagctccaagtcctcctatgagcttatcgtggtggctcacgaccacggcaagacatctctctctgcctctgctctcgtcctaatctacttgtcccctgctctcgatgcccaagagtcaatgggctctgtgaacttgtccttgattttcattattgccctgggctccattgcgggcatcctctttgtaactatgatcttcgtggcaatcaagtgcaagcgagacaacaaagagatccggacctacaactgcagaattgctgagtactcctatgggcatcaaaagaaatcaagcaagaagaaaaaaatcagtaagaatgacatccgcctggtaccccgggatgtggaggagacagacaagatgaacgttgtcagttgctcttccctgacctcctccctcaactattttgactaccaccagcagacgctgcccctgggctgccgccgctctgagagcactttcctgaatgtggagaaccagaatacccgcaacaccagtgctaaccacatctaccatcactctttcaacagccaggggccccagcagcctgacctgattatcaacggtgtgcctctgcctgagactgaaaactattcttttgactccaactacgtgaatagccgagcccatttaatcaagagcagctccaccttcaaggacttagagggcaacagcctgaaggatagtggacatgaggagagtgaccaaactgacagtgagcatgatgtccagcggagcctgtattgtgatactgctgtcaacgatgtgctgaacaccagtgtgacctccatgggatctcagatgcctgatcatgatcagaatgaaggatttcattgccgggaagaatgccggattcttggccactctgacaggtgctggatgccccggaaccccatgcccatccgttccaagtcccctgagcatgtgaggaacatcatcgcgctgtctattgaagctactgctgctgatgtcgaggcttatgacgactgcggccccaccaaacggactttcgcaacctttgggaaagatgtcagcgaccacccggctgaggagaggcctaccctgaaaggcaagaggactgtcgatgtgaccatctgcagccccaaggtcaacagcgttatccgggaggcaggcaatggctgtgaggcgattagccctgtcacctcccccctccacctcaagagctctctgcccaccaagccttccgtgtcttacaccattgccctggctcccccagcccgtgatctggagcagtatgtcaacaatgtcaacaatggccctactcgtccctctgaagctgagccccgtggagctgatagcgagaaagtcatgcatgaggtcagccccattctgaaggaaggtcgcaacaaagagtcccctggtgtgaagcgtctgaaggatatcgttctctaaaccagtctccaggaagaagagaaagaaaccacactggctagtgaagaagcaggagcttcttgttttaattgctcaccaatggttggttcttgagtggctatatttcagagcttttcctaaatgtattgtttataggtgattatcattctgtgacagtcccttgtttcaacaggcagcaggggtgttcagttggagcaaattagctttggcttgagttgttcatggggccttgatgttggggaaacagagacaaattcagttgtgaaaagtattatgtattaagtgtttgaatttatatatttttctatgtcaaaattataatataaattaccattgtttgtggaggattacatttaaaaaagcaaaaagtgaaaaaaaaaagctctggacacctttaataagctcgccactgttttttgtagtgtagacaagttaatggtcatttattgtgtactattcattgattcagtgatgtgaaattgagcccccaaaaggttgtttctgaagctcgagtacttcccaatgccgctactttgctgtggacacccctgctttaaaaacccttttgctagctgtgctattgttgtatttgatattgcaaattgctatgtgtgtggtgatggcaaaaggcttttaaaagttggtgttttctttttcttaaaaaaataataaaactacagacaaaaacaaagtgcaaacaactgagacagcaaatgaatgagcaacaccatgcatatagattgagtacttggagaatactcacgttttttaactcatgtagtgattgctcaccactttgcaaagtatttttcctgcctttcagtggtctgcccaggtccatgatagatcattgcagaaagtcatttttggataggctgctatctaatttgcagttgtcagaaatactgtgctgaaagttttatgacatccatcttttaaattttcaggccctgaacaggaaagttgctcctgaagttatgtttccaggcttagaaattccctctctccaatcatctaaaattgaagatgactgaatctattttaagatctaaattagcatctcttcagacacacacttcctgattcagtgtttcccaatcatgattagaattagactgcaaagcacgtcatgggctgggattgagaactccatgttgctctgtatcttaggcttatatacgtagggatagagtaagcagtacaaagtgtatattttggaaaagacaggtaacaggtaacagcatcgctaatccaattactgtgccttctaaacggagacactcagacacttgaactcatctttttatgactaatagttttttgattaaaaatgtgaacaagaaaatactaaaataaaaatcctttcgatttagccaactctttttgctgtaggctaggaatacaccctttttaaattaacacactgtagatcctttttttctgttttaacattcctctaactcccccatttatcttttgtctattaatattcactagccaacatagtatttttgcagcctaagagttcattatttaaaaataaactaaagaaatatgtcacctttgttctgccttggtcttaagagagttgtttctagagaaacaagttttatggttctgttttcatttgtttcattttttgaaattcaggaatacacagagagaaggcctagaggttagagcactagaatgcaaaagaggatttattttcttaagtttaggtagataagtcagctcttttgaatgttttacttatttttgcctgagttcctagctttacgcattactaggaatattttcttttacaggagggagaagggttttgagggagggggtgggtaaggcagtagggatggggttaggtaggggagaacatttctgaaaaagaacttataatgaagctacaaatccatccttatttcttattcagtgctgaatactacctcatgcaaaatattggtgtggctgcaaatttccctctgaagctgacacaattaaggatgaattaccataacatcttcatttttcctcatttcattgcctctcatacagttttctccctctgatttatttcattttggtagtggattttgaattaagtatttatttctctttgcaagtgactatttgattaacacattaaaaattttttaaaaatttcccctttaagttatgatggctgcctatagaatttagactgtttctcaccctgatccatcctgatattatgttattagctacgatttcaaggtcactttgaagtcagacttcacagttttctacaggtgtatttcttgctatgctcagtgggaaccagggagcagaaaagattgtggaaagtgggaacattaattgtcacgtggctgttgagccagagaggccactggctgccatgcctcttaccagccaagttttaaatggttagagtggcattggcattgattttgcttttctcttgggttttcttcatttcttttcataattcatcttcaagctatagatccatccttcttccctatccaaatactttgttctcagtgggcagtcagatttttttggcttccaaacctcactgagcatgttcagagaattcctctcattaaggaaatatttttccccacaattgtctgatgtatgagtcctctcagaagcacaagtgcatactaggaaggctttgtaaactggttttgtaggcaggctgtacctgcaaataggcattctgagcaaggatcctaaatttccctttggctcatgtcccccccgccccaccccaccttctcctttttggcatgtctggtgaaaagctacaaggttcacagggccaaatattctcccttttgttctctaaacatgttgcacacataaactcaagggagtgatttcggttcctaagtcctagggagttctattccatttattctgatgtcccttttaaggaggagttggtgttgaagtgtgacatgctttaatgataactgctttggcaattccccagacaggtatacttcttcatccaaaattgcacctaaggtgttcatttagacaaaattgttcgcttagtgatccactgatctctaatcagaaatatttttaaaaaatacaatttagatctctgaaaattggaaccactcaagagtatcatcttgatagtgttacttcagcatatgactgactgattttatgaagggagtttagctgacttttccctgtagccctatcatattaaaaacaaaaagtggtccacttgaagcagcaaggacaaagggcagtttagggagaggcagggtgaaggggatagctcgattgggcatccagagtggaaaaggattattattgtacataatagcagttctggctggaattccaatccactttctggggatcattttgatgttgaatgttcccccaaagcattctgacaagtttggtccacttggctctttaccccgggtaataagacccttattgactttgaaaaactggcataaatgagcttaagaaatccattgtatacagtcctagtgtttgccttcttggtaaaattacatttaaggatgtcatttcatgagtcaaattgtatctgctgacactgaagtgtattgagatgttgttctttagtttaagtatgtaacaaagtaatattcaaaggggatgtttgggggtggggctgggaccgggtggctttatattgataatgaaatattccagagcaaaacacattgtcctaatgaagttgttgcagctctcttcgttttcttgtgccgctggaattggcttgtgggtcacttgttgtgcaaaagtgaattaatttcaaataggaatcatattgcttttgtgaaacaaagaaaatttaccaccttgtctgatacatagattggaaggcgctcttggtaaagaataacccacaaacacctgatcttgattggaaagcattgtaggtcattagggaaaactgatgatgctgactgttgctccagctgtgttggcaattcaagatgaccttgttactaactgaaagttgctgtcaaccttagcaaacaaaccagctaacaccattacagcactggttaagtagatttttactggcactggctggcgttcagctgaggaaggctaggatacagactttaatgaccaagagccagactagctcgagctagaaatcagcaacaaatacctccttgtgctatttgaatgctaaggtattagttgcaataggcttacgccttcgctcctctagtgaggggaatgagcctgatgacactattactgtttacctgtcaaaccagggtggaaatttagagggatgcaagtacagtatgtctcattaagcagtctctgttgctgattatatgaagataaaattgttgtatatgctgatctgtatgttatgtacattttcacagtgattgaatcattgtaaaaagaaaaaagacaaaaaagaatcaccactgtctattttatgaagatgataaagcagctttattaaattattacagttatgtttcaaatggtgttatctgccacattgtttccttttatctggtggttctctgtttccccctttaaatgtgttttctctgcttcaaaaatttaatgcattttagtattaaaggctattatggaaaaagta

SEQ ID NO: 30006 - protein, 602 aa, Homo sapiens
MPVFTYVSINPNSGDIYALRSFNHEQTKAFEFKVLAKDGGLPSLQSNATVRVIILDVNDNTPVITAPPLINGTAEVYIPRNSGIGYLVTVVKAEDYDEGENGRVTYDMTEGDRGFFEIDQVNGEVRTTRTFGESSKSSYELIVVAHDHGKTSLSASALVLIYLSPALDAQESMGSVNLSLIFIIALGSIAGILFVTMIFVAIKCKRDNKEIRTYNCRIAEYSYGHQKKSSKKKKISKNDIRLVPRDVEETDKMNVVSCSSLTSSLNYFDYHQQTLPLGCRRSESTFLNVENQNTRNTSANHIYHHSFNSQGPQQPDLIINGVPLPETENYSFDSNYVNSRAHLIKSSSTFKDLEGNSLKDSGHEESDQTDSEHDVQRSLYCDTAVNDVLNTSVTSMGSQMPDHDQNEGFHCREECRILGHSDRCWMPRNPMPIRSKSPEHVRNIIALSIEATAADVEAYDDCGPTKRTFATFGKDVSDHPAEERPTLKGKRTVDVTICSPKVNSVIREAGNGCEAISPVTSPLHLKSSLPTKPSVSYTIALAPPARDLEQYVNNVNNGPTRPSEAEPRGADSEKVMHEVSPILKEGRNKESPGVKRLKDIVL

SEQ ID NO: 30007 - DNA, 8080 bp, Homo sapiens
atggagtcgctcctgctgccggtgctgctgctgctggccatactgtggacgcaggctgccgccctcattaatctcaagtactcggtagaagaggagcagcgcgccgggacggtgattgccaacgtggccaaagacgcgcgagaggcgggcttcgcgctggacccccggcaggcttcagcctttcgcgtggtgtccaactcggctccacacctagtggacatcaatcccagctctggcctgctggtcaccaagcagaagattgaccgtgatctgctgtgccgccagagccccaagtgcatcatctcgctcgaggtcatgtccagctcaatggaaatctgcgtgataaaggtggagatcaaggacctgaacgacaatgcgcccagtttcccggcagcacagatcgagctggagatctcggaggcagccagccctggcacgcgcatcccgctggacagcgcttacgatccagactcaggaagctttggcgtgcagacttacgagctcacgcccaacgagctgttcggcctggagatcaagacgcgcggcgacggctcccgctttgccgaactcgtggtggaaaagagcctggaccgcgagacgcagtcgcactacagcttccgaatcactgcgctagacggtggcgacccgccgcgcctgggcaccgttggccttagtatcaaggtgaccgactccaatgacaacaacccggtgtttagcgagtccacctacgcggtgagcgtgccagaaaactcgcctcccaacacacccgtcatccgcctcaacgccagcgatccagacgagggcaccaacggccaggtggtctactccttctatggctacgtcaacgaccgcacgcgcgagctctttcagatcgacccgcacagtggcctggtcactgtcactggcgctttagactacgaagaggggcacgtgtacgaactggacgtgcaggctaaggacttggggcccaattccatcccggcacactgcaaggtcaccgtcagcgtgctggacaccaatgacaatccgccggtcatcaacctgctgtcagtcaacagtgagcttgtggaggtcagcgagagcgcccccccgggctacgtgatcgccttggtgcgggtgtctgatcgcgactcaggcctcaatggacgtgtgcagtgccgtttgctgggcaatgtgccctttcgactgcaggaatatgagagcttctccactattctggtggacggacggctggaccgcgagcagcacgaccaatacaacctcacaattcaggcacgcgacggcggcgtgcccatgctgcagagtgccaagtcctttaccgtgctcatcactgacgaaaatgacaaccacccgcacttttccaagccctactaccaggtcattgtgcaggagaacaacacgcctggcgcctatctgctctctgtgtctgctcgcgaccccgacctgggtctcaacggcagtgtctcctaccagatcgtgccgtcgcaggtgcgggacatgcctgtcttcacctatgtctccatcaatcccaactcaggcgacatctacgcgctgcgatcctttaaccacgagcagaccaaggcgttcgaattcaaggtgctggccaaggacggcggccttccctcactgcaaagcaacgctacggtgcgggtcatcatcctcgacgtcaacgacaacaccccggtcatcacagccccacctctgattaacggcactgccgaggtctacataccccgcaactctggcataggctacctggtgactgttgtcaaggcagaagactacgatgagggcgaaaatggccgagtcacctacgacatgaccgagggcgaccgcggcttctttgaaatagaccaggtcaatggcgaagtcagaaccacccgcaccttcggggagagctccaagtcctcctatgagcttatcgtggtggctcacgaccacggcaagacatctctctctgcctctgctctcgtcctaatctacttgtcccctgctctcgatgcccaagagtcaatgggctctgtgaacttgtccttgattttcattattgccctgggctccattgcgggcatcctctttgtaactatgatcttcgtggcaatcaagtgcaagcgagacaacaaagagatccggacctacaactgcagtaattgtttaaccatcacttgtctcctcggctgttttataaaaggacaaaacagcaagtgtctgcattgcatctcggtttctcccattagcgaggagcaagacaaaaagacagaggagaaagtgagcctaaggggaaagagaattgctgagtactcctatgggcatcaaaagaaatcaagcaagaagaaaaaaatcagtaagaatgacatccgcctggtaccccgggatgtggaggagacagacaagatgaacgttgtcagttgctcttccctgacctcctccctcaactattttgactaccaccagcagacgctgcccctgggctgccgccgctctgagagcactttcctgaatgtggagaaccagaatacccgcaacaccagtgctaaccacatctaccatcactctttcaacagccaggggccccagcagcctgacctgattatcaacggtgtgcctctgcctgagactgaaaactattcttttgactccaactacgtgaatagccgagcccatttaatcaagagcagctccaccttcaaggacttagagggcaacagcctgaaggatagtggacatgaggagagtgaccaaactgacagtgagcatgatgtccagcggagcctgtattgtgatactgctgtcaacgatgtgctgaacaccagtgtgacctccatgggatctcagatgcctgatcatgatcagaatgaaggatttcattgccgggaagaatgccggattcttggccactctgacaggtgctggatgccccggaaccccatgcccatccgttccaagtcccctgagcatgtgaggaacatcatcgcgctgtctattgaagctactgctgctgatgtcgaggcttatgacgactgcggccccaccaaacggactttcgcaacctttgggaaagatgtcagcgaccacccggctgaggagaggcctaccctgaaaggcaagaggactgtcgatgtgaccatctgcagccccaaggtcaacagcgttatccgggaggcaggcaatggctgtgaggcgattagccctgtcacctcccccctccacctcaagagctctctgcccaccaagccttccgtgtcttacaccattgccctggctcccccagcccgtgatctggagcagtatgtcaacaatgtcaacaatggccctactcgtccctctgaagctgagccccgtggagctgatagcgagaaagtcatgcatgaggtcagccccattctgaaggaaggtcgcaacaaagagtcccctggtgtgaagcgtctgaaggatatcgttctctaaaccagtctccaggaagaagagaaagaaaccacactggctagtgaagaagcaggagcttcttgttttaattgctcaccaatggttggttcttgagtggctatatttcagagcttttcctaaatgtattgtttataggtgattatcattctgtgacagtcccttgtttcaacaggcagcaggggtgttcagttggagcaaattagctttggcttgagttgttcatggggccttgatgttggggaaacagagacaaattcagttgtgaaaagtattatgtattaagtgtttgaatttatatatttttctatgtcaaaattataatataaattaccattgtttgtggaggattacatttaaaaaagcaaaaagtgaaaaaaaaaagctctggacacctttaataagctcgccactgttttttgtagtgtagacaagttaatggtcatttattgtgtactattcattgattcagtgatgtgaaattgagcccccaaaaggttgtttctgaagctcgagtacttcccaatgccgctactttgctgtggacacccctgctttaaaaacccttttgctagctgtgctattgttgtatttgatattgcaaattgctatgtgtgtggtgatggcaaaaggcttttaaaagttggtgttttctttttcttaaaaaaataataaaactacagacaaaaacaaagtgcaaacaactgagacagcaaatgaatgagcaacaccatgcatatagattgagtacttggagaatactcacgttttttaactcatgtagtgattgctcaccactttgcaaagtatttttcctgcctttcagtggtctgcccaggtccatgatagatcattgcagaaagtcatttttggataggctgctatctaatttgcagttgtcagaaatactgtgctgaaagttttatgacatccatcttttaaattttcaggccctgaacaggaaagttgctcctgaagttatgtttccaggcttagaaattccctctctccaatcatctaaaattgaagatgactgaatctattttaagatctaaattagcatctcttcagacacacacttcctgattcagtgtttcccaatcatgattagaattagactgcaaagcacgtcatgggctgggattgagaactccatgttgctctgtatcttaggcttatatacgtagggatagagtaagcagtacaaagtgtatattttggaaaagacaggtaacaggtaacagcatcgctaatccaattactgtgccttctaaacggagacactcagacacttgaactcatctttttatgactaatagttttttgattaaaaatgtgaacaagaaaatactaaaataaaaatcctttcgatttagccaactctttttgctgtaggctaggaatacaccctttttaaattaacacactgtagatcctttttttctgttttaacattcctctaactcccccatttatcttttgtctattaatattcactagccaacatagtatttttgcagcctaagagttcattatttaaaaataaactaaagaaatatgtcacctttgttctgccttggtcttaagagagttgtttctagagaaacaagttttatggttctgttttcatttgtttcattttttgaaattcaggaatacacagagagaaggcctagaggttagagcactagaatgcaaaagaggatttattttcttaagtttaggtagataagtcagctcttttgaatgttttacttatttttgcctgagttcctagctttacgcattactaggaatattttcttttacaggagggagaagggttttgagggagggggtgggtaaggcagtagggatggggttaggtaggggagaacatttctgaaaaagaacttataatgaagctacaaatccatccttatttcttattcagtgctgaatactacctcatgcaaaatattggtgtggctgcaaatttccctctgaagctgacacaattaaggatgaattaccataacatcttcatttttcctcatttcattgcctctcatacagttttctccctctgatttatttcattttggtagtggattttgaattaagtatttatttctctttgcaagtgactatttgattaacacattaaaaattttttaaaaatttcccctttaagttatgatggctgcctatagaatttagactgtttctcaccctgatccatcctgatattatgttattagctacgatttcaaggtcactttgaagtcagacttcacagttttctacaggtgtatttcttgctatgctcagtgggaaccagggagcagaaaagattgtggaaagtgggaacattaattgtcacgtggctgttgagccagagaggccactggctgccatgcctcttaccagccaagttttaaatggttagagtggcattggcattgattttgcttttctcttgggttttcttcatttcttttcataattcatcttcaagctatagatccatccttcttccctatccaaatactttgttctcagtgggcagtcagatttttttggcttccaaacctcactgagcatgttcagagaattcctctcattaaggaaatatttttccccacaattgtctgatgtatgagtcctctcagaagcacaagtgcatactaggaaggctttgtaaactggttttgtaggcaggctgtacctgcaaataggcattctgagcaaggatcctaaatttccctttggctcatgtcccccccgccccaccccaccttctcctttttggcatgtctggtgaaaagctacaaggttcacagggccaaatattctcccttttgttctctaaacatgttgcacacataaactcaagggagtgatttcggttcctaagtcctagggagttctattccatttattctgatgtcccttttaaggaggagttggtgttgaagtgtgacatgctttaatgataactgctttggcaattccccagacaggtatacttcttcatccaaaattgcacctaaggtgttcatttagacaaaattgttcgcttagtgatccactgatctctaatcagaaatatttttaaaaaatacaatttagatctctgaaaattggaaccactcaagagtatcatcttgatagtgttacttcagcatatgactgactgattttatgaagggagtttagctgacttttccctgtagccctatcatattaaaaacaaaaagtggtccacttgaagcagcaaggacaaagggcagtttagggagaggcagggtgaaggggatagctcgattgggcatccagagtggaaaaggattattattgtacataatagcagttctggctggaattccaatccactttctggggatcattttgatgttgaatgttcccccaaagcattctgacaagtttggtccacttggctctttaccccgggtaataagacccttattgactttgaaaaactggcataaatgagcttaagaaatccattgtatacagtcctagtgtttgccttcttggtaaaattacatttaaggatgtcatttcatgagtcaaattgtatctgctgacactgaagtgtattgagatgttgttctttagtttaagtatgtaacaaagtaatattcaaaggggatgtttgggggtggggctgggaccgggtggctttatattgataatgaaatattccagagcaaaacacattgtcctaatgaagttgttgcagctctcttcgttttcttgtgccgctggaattggcttgtgggtcacttgttgtgcaaaagtgaattaatttcaaataggaatcatattgcttttgtgaaacaaagaaaatttaccaccttgtctgatacatagattggaaggcgctcttggtaaagaataacccacaaacacctgatcttgattggaaagcattgtaggtcattagggaaaactgatgatgctgactgttgctccagctgtgttggcaattcaagatgaccttgttactaactgaaagttgctgtcaaccttagcaaacaaaccagctaacaccattacagcactggttaagtagatttttactggcactggctggcgttcagctgaggaaggctaggatacagactttaatgaccaagagccagactagctcgagctagaaatcagcaacaaatacctccttgtgctatttgaatgctaaggtattagttgcaataggcttacgccttcgctcctctagtgaggggaatgagcctgatgacactattactgtttacctgtcaaaccagggtggaaatttagagggatgcaagtacagtatgtctcattaagcagtctctgttgctgattatatgaagataaaattgttgtatatgctgatctgtatgttatgtacattttcacagtgattgaatcattgtaaaaagaaaaaagacaaaaaagaatcaccactgtctattttatgaagatgataaagcagctttattaaattattacagttatgtttcaaatggtgttatctgccacattgtttccttttatctggtggttctctgtttccccctttaaatgtgttttctctgcttcaaaaatttaatgcattttagtattaaaggctattatggaaaaagta

SEQ ID NO: 30008 - protein, 1148 aa, Homo sapiens
MESLLLPVLLLLAILWTQAAALINLKYSVEEEQRAGTVIANVAKDAREAGFALDPRQASAFRVVSNSAPHLVDINPSSGLLVTKQKIDRDLLCRQSPKCIISLEVMSSSMEICVIKVEIKDLNDNAPSFPAAQIELEISEAASPGTRIPLDSAYDPDSGSFGVQTYELTPNELFGLEIKTRGDGSRFAELVVEKSLDRETQSHYSFRITALDGGDPPRLGTVGLSIKVTDSNDNNPVFSESTYAVSVPENSPPNTPVIRLNASDPDEGTNGQVVYSFYGYVNDRTRELFQIDPHSGLVTVTGALDYEEGHVYELDVQAKDLGPNSIPAHCKVTVSVLDTNDNPPVINLLSVNSELVEVSESAPPGYVIALVRVSDRDSGLNGRVQCRLLGNVPFRLQEYESFSTILVDGRLDREQHDQYNLTIQARDGGVPMLQSAKSFTVLITDENDNHPHFSKPYYQVIVQENNTPGAYLLSVSARDPDLGLNGSVSYQIVPSQVRDMPVFTYVSINPNSGDIYALRSFNHEQTKAFEFKVLAKDGGLPSLQSNATVRVIILDVNDNTPVITAPPLINGTAEVYIPRNSGIGYLVTVVKAEDYDEGENGRVTYDMTEGDRGFFEIDQVNGEVRTTRTFGESSKSSYELIVVAHDHGKTSLSASALVLIYLSPALDAQESMGSVNLSLIFIIALGSIAGILFVTMIFVAIKCKRDNKEIRTYNCSNCLTITCLLGCFIKGQNSKCLHCISVSPISEEQDKKTEEKVSLRGKRIAEYSYGHQKKSSKKKKISKNDIRLVPRDVEETDKMNVVSCSSLTSSLNYFDYHQQTLPLGCRRSESTFLNVENQNTRNTSANHIYHHSFNSQGPQQPDLIINGVPLPETENYSFDSNYVNSRAHLIKSSSTFKDLEGNSLKDSGHEESDQTDSEHDVQRSLYCDTAVNDVLNTSVTSMGSQMPDHDQNEGFHCREECRILGHSDRCWMPRNPMPIRSKSPEHVRNIIALSIEATAADVEAYDDCGPTKRTFATFGKDVSDHPAEERPTLKGKRTVDVTICSPKVNSVIREAGNGCEAISPVTSPLHLKSSLPTKPSVSYTIALAPPARDLEQYVNNVNNGPTRPSEAEPRGADSEKVMHEVSPILKEGRNKESPGVKRLKDIVL

SEQ ID NO: 30009 - DNA, 331 bp, Homo sapiens
cgtctgaaggatatcgttctctaaaccagtctccaggaagaagagaaagaaaccacactggctagtgaagaagcaggagcttcttgttttaattgctcaccaatgtgattgaatcattgtaaaaagaaaaaagacaaaaaagaatcaccactgtctattttatgaagatgataaagcagctttattaaattattacagttatgtttcaaatggtgttatctgccacattgtttccttttatctggtggttctctgtttccccctttaaatgtgttttctctgcttcaaaaatttaatgcattttagtattaaaggctattatggaaaaagt

SEQ ID NO: 30010 - protein, 31 aa, Homo sapiens
MFQMVLSATLFPFIWWFSVSPFKCVFSASKI

SEQ ID NO: 30011 - DNA, 1306 bp, Homo sapiens
tatctatgtaacaaatcgcagcacaggagtcccctgggctccctcaggctctggtatgacatatttgagccatataaattcagcttctcctctggcatctgttagccgactcacttgcaactccacctcagcagtggtctctcagtcctctcaaagcaaggaaagagtactgtgtgctgagagaccatggcaaagaatcctccagagaattgtgaagactgtcacattctaaatgcagaagcttttaaatccaagaaaatatgtaaatcacttaagatttgtggactggtgtttggtatcctggccctaactctaattgtcctgttttgggggagcaagcacttctggccggaggtacccaaaaaagcctatgacatggagcacactttctacagcaatggagagaagaagaagatttacatggaaattgatcctgtgaccagaactgaaatattcagaagcggaaatggcactgatgaaacattggaagtgcacgactttaaaaacggatacactggcatctacttcgtgggtcttcaaaaatgttttatcaaaactcagattaaagtgattcctgaattttctgaaccagaagaggaaatagatgagaatgaagaaattaccacaactttctttgaacagtcagtgatttgggtcccagcagaaaagcctattgaaaaccgagattttcttaaaaattccaaaattctggagatttgtgataacgtgaccatgtattggatcaatcccactctaatatcagtttctgagttacaagactttgaggaggagggagaagatcttcactttcctgccaacgaaaaaaaagggattgaacaaaatgaacagtgggtggtccctcaagtgaaagtagagaagacccgtcacgccagacaagcaagtgaggaagaacttccaataaatgactatactgaaaatggaatagaatttgatcccatgctggatgagagaggttattgttgtatttactgccgtcgaggcaaccgctattgccgccgcgtctgtgaacctttactaggctactacccatatccatactgctaccaaggaggacgagtcatctgtcgtgtcatcatgccttgtaactggtgggtggcccgcatgctggggagggtctaataggaggtttgagctcaaatgcttaaactgctggcaacatataataaatgcatgctattcaatgaatttctgcctatgaggcatctggcccctggtagccagctctccagaattacttgtaggtaattcctctcttcatgttctaataaacttctacattatcacc

SEQ ID NO: 30012 - protein, 317 aa, Homo sapiens
MAKNPPENCEDCHILNAEAFKSKKICKSLKICGLVFGILALTLIVLFWGSKHFWPEVPKKAYDMEHTFYSNGEKKKIYMEIDPVTRTEIFRSGNGTDETLEVHDFKNGYTGIYFVGLQKCFIKTQIKVIPEFSEPEEEIDENEEITTTFFEQSVIWVPAEKPIENRDFLKNSKILEICDNVTMYWINPTLISVSELQDFEEEGEDLHFPANEKKGIEQNEQWVVPQVKVEKTRHARQASEEELPINDYTENGIEFDPMLDERGYCCIYCRRGNRYCRRVCEPLLGYYPYPYCYQGGRVICRVIMPCNWWVARMLGRV

SEQ ID NO: 30013 - DNA, 2888 bp, Homo sapiens
agccgactcacttgcaactccacctcagcagtggtctctcagtcctctcaaagcaaggaaagagtactgtgtgctgagagaccatggcaaagaatcctccagagaattgtgaagactgtcacattctaaatgcagaagcttttaaatccaagaaaatatgtaaatcacttaagatttgtggactggtgtttggtatcctggccctaactctaattgtcctgttttgggggagcaagcacttctggccggaggtacccaaaaaagcctatgacatggagcacactttctacagcaatggagagaagaagaagatttacatggaaattgatcctgtgaccagaactgaaatattcagaagcggaaatggcactgatgaaacattggaagtgcacgactttaaaaacggatacactggcatctacttcgtgggtcttcaaaaatgttttatcaaaactcagattaaagtgattcctgaattttctgaaccagaagaggaaatagatgagaatgaagaaattaccacaactttctttgaacagtcagtgatttgggtcccagcagaaaagcctattgaaaaccgagattttcttaaaaattccaaaattctggagatttgtgataacgtgaccatgtattggatcaatcccactctaatatcaggtatgacattcttatcctcatcctcctcctattttctaagacagtaacaggttaatgttcccagcatttagaggctacatttctaggaaaacaaatgatcggtttatatcttcttggatgagtctatatatgctgactgccagtgaggagggaatttttcacagccaagttataaatcagataaattaatgttgacaggcttttaaatatcccagcaaaggtaacaccaccctaatgtgactagtgatagcaaaaaactaatctgtctctctttgcacatctatattcattgcagtcggtatgccagactattgctcaaaccactgtgggtccaacccaagaatagaggagagaagggcaaaaacaatgctctgctatcaagaaggattccctatgtcaaatggtggcattttccttagaagataggacaatcactgcaatacaaatttctttgttgctgttttaggaattactataaaaatagttgagggcttgatgtccagagtagaagagtccagccctcaacttccagtcagcccatagagaaggtaaaggcccctggatgtcttagtctgtttagctaacatggaatttggcctccctcattctgcacagcatagattactctattacccaagagaggttattctcaccaatgtaagcatctgtgggtactctttagagatattaaaaaggtgactaaatgcagtgtggtatcctggactggatgctggaacagaaaaaaacattagtagaaatactaatgaaatctgaataaagtctgtagtttagttaataacattgtaccaattctaacttctgatttttgatcattgtaccatggttatgtgaggtaacattaggggaaaccgggtgaagaatatgtgaactctgtactatttctgcaactcttccataaatctaagattatttctaaacagaaagtttaaaaaaaatttaagacaagaaacataagggaagtgggaggacagaggatgtcaaatcaattcaggcaaccaagaaatatttattgagcatctacatgggtaaaatcatcattgtaggagatacagaagtcccttgtcctcagtttttaatttagtgtgctattaagtcaaagcagtaaatgtttgatgccaaagaagcaaagaagtttgtgtatgtagaaatgatcaggcttgttttggaaactactctaaaatatcagctgaaggagcttggaaaagtggtccatgcctaaatgatgccagttagaagacacaatgaaaatctctatccccagctgctattctcccaagcacttctttcaggaacatttgcaaagcagttgcatcacaactttgcatttattatcttagtttctgagttacaagactttgaggaggagggagaagatcttcactttcctgccaacgaaaaaaaagggattgaacaaaatgaacagtgggtggtccctcaagtgaaagtagagaagacccgtcacgccagacaagcaagtgaggaagaacttccaataaatgactatgtgagttatgtttatgtaaactcttgatagaggaggaaaaaagagccctcacaaaacttactacccctcagatcacaatcattggaaggagaacgatcatggctttaacaaaaaaaaaaaaatgtttaagaaacttggaatctccaggaggctcattcaaaatcaatctcgatctctgtagatatatctccatgatcaggctaaggagcttaatttctcacaagcccccaactcatacagtcttctagttctcccctgcttggtgagaactcttgctagtgaaccttcctctcccacccccaacactggcttcttcttctttcagactgaaaatggaatagaatttgatcccatgctggatgagagaggttattgttgtatttactgccgtcgaggcaaccgctattgccgccgcgtctgtgaacctttactaggctactacccatatccatactgctaccaaggaggacgagtcatctgtcgtgtcatcatgccttgtaactggtgggtggcccgcatgctggggagggtctaataggaggtttgagctcaaatgcttaaactgctggcaacatataataaatgcatgctattcaatgaatttctgcctatgaggcatctggcccctggtagccagctctccagaattacttgtaggtaattcctctcttcatgttctaataaacttctacattatcaccaa

SEQ ID NO: 30014 - protein, 207 aa, Homo sapiens
MAKNPPENCEDCHILNAEAFKSKKICKSLKICGLVFGILALTLIVLFWGSKHFWPEVPKKAYDMEHTFYSNGEKKKIYMEIDPVTRTEIFRSGNGTDETLEVHDFKNGYTGIYFVGLQKCFIKTQIKVIPEFSEPEEEIDENEEITTTFFEQSVIWVPAEKPIENRDFLKNSKILEICDNVTMYWINPTLISGMTFLSSSSSYFLRQ

SEQ ID NO: 30015 - DNA, 1209 bp, Homo sapiens
ggtagcttaaagaagcagcataggttttaggtgatccctcagcttaacacaaggggaaaatactttataggctggtttgcaaactatcatttgctgtttagtcaaggctgccaagaaaactgttggaattcttagtaattagctcagcagcttggcttgaattcaaaataccagctctgaagggatccccatatcagctccagcgccaaaaagcacctcactttagggacacactgagtatcttagagattgttttcctctgttctcccaggcctatgacatggagcacactttctacagcaatggagagaagaagaagatttacatggaaattgatcctgtgaccagaactgaaatattcagaagcggaaatggcactgatgaaacattggaagtgcacgactttaaaaacggatacactggcatctacttcgtgggtcttcaaaaatgttttatcaaaactcagattaaagtgattcctgaattttctgaaccagaagaggaaatagatgagaatgaagaaattaccacaactttctttgaacagtcagtgatttgggtcccagcagaaaagcctattgaaaaccgagattttcttaaaaattccaaaattctggagatttgtgataacgtgaccatgtattggatcaatcccactctaatatcagtttctgagttacaagactttgaggaggagggagaagatcttcactttcctgccaacgaaaaaaaagggattgaacaaaatgaacagtgggtggtccctcaagtgaaagtagagaagacccgtcacgccagacaagcaagtgaggaagaacttccaataaatgactatactgaaaatggaatagaatttgatcccatgctggatgagagaggttattgttgtatttactgccgtcgaggcaaccgctattgccgccgcgtctgtgaacctttactaggctactacccatatccatactgctaccaaggaggacgagtcatctgtcgtgtcatcatgccttgtaactggtgggtggcccgcatgctggggagggtctaataggaggtttgagctcaaatgcttaaactgctggcaacatataataaatgcatgctattcaatgaatttctgcctatgaggcatctggcccctggtagccagctctccagaattacttgtaggtaattcctctcttcatgttctaataaacttctacattatca

SEQ ID NO: 30016 - protein, 254 aa, Homo sapiens
MEHTFYSNGEKKKIYMEIDPVTRTEIFRSGNGTDETLEVHDFKNGYTGIYFVGLQKCFIKTQIKVIPEFSEPEEEIDENEEITTTFFEQSVIWVPAEKPIENRDFLKNSKILEICDNVTMYWINPTLISVSELQDFEEEGEDLHFPANEKKGIEQNEQWVVPQVKVEKTRHARQASEEELPINDYTENGIEFDPMLDERGYCCIYCRRGNRYCRRVCEPLLGYYPYPYCYQGGRVICRVIMPCNWWVARMLGRV

SEQ ID NO: 30017 - DNA, 3785 bp, Homo sapiens
gtttccggcccttctcagttgtggacgctcgtaagttttcggcagtttccggggagactcggggactccgcgtctcgctctctgtgttccaatcgcccggtgcggtggtgcagggtctcgggctagtcatggcgtccccgtctcggagactgcagactaaaccagtcattacttgtttcaagagcgttctgctaatctacacttttattttctggatcactggcgttatccttcttgcagttggcatttggggcaaggtgagcctggagaattacttttctcttttaaatgagaaggccaccaatgtccccttcgtgctcattgctactggtaccgtcattattcttttgggcacctttggttgttttgctacctgccgagcttctgcatggatgctaaaactgtatgcaatgtttctgactctcgtttttttggtcgaactggtcgctgccatcgtaggatttgttttcagacatgagattaagaacagctttaagaataattatgagaaggctttgaagcagtataactctacaggagattatagaagccatgcagtagacaagatccaaaatacgttgcattgttgtggtgtcaccgattatagagattggacagatactaattattactcagaaaaaggatttcctaagagttgctgtaaacttgaagattgtactccacagagagatgcagacaaagtaaacaatgaaggttgttttataaaggtgatgaccattatagagtcagaaatgggagtcgttgcaggaatttcctttggagttgcttgcttccaactgattggaatctttctcgcctactgcctctctcgtgccataacaaataaccagtatgagatagtgtaacccaatgtatctgtgggcctattcctctctacctttaaggacatttagggtcccccctgtgaattagaaagttgcttggctggagaactgacaacactacttactgatagaccaaaaaactacaccagtaggttgattcaatcaagatgtatgtagacctaaaactacaccaataggctgattcaatcaagatccgtgctcgcagtgggctgattcaatcaagatgtatgtttgctatgttctaagtccaccttctatcccattcatgttagatcgttgaaaccctgtatccctctgaaacactggaagagctagtaaattgtaaatgaagtaatactgtgttcctcttgactgttatttttcttagtagggggcctttggaaggcactgtgaatttgctattttgatgtagtgttacaagatggaaaattgattcctctgactttgctattgatgtagtgtgatagaaaattcacccctctgaactggctccttcccagtcaaggttatctggtttgattgtataatttgcaccaagaagttaaaatgttttatgactctctgttctgctgacaggcagagagtcacattgtgtaatttaatttcagtcagtcaatagatggcatccctcatcagggttgccagatggtgataacagtgtaaggccttgggtctaaggcatccacgactggaagggactactgatgttctgtgatacatcaggtttcagcacacaacttacatttctttgcctccaaattgaggcatttattatgatgttcatactttccctcttgtttgaaagtttctaattattaaatggtgtcggaattgttgtattttccttaggaattcagtggaacttatcttcattaaatttagctggtaccaggttgatatgacttgtcaatattatggtcaactttaagtcttagttttcgtttgtgcctttgattaataagtataactcttatacaataaatactgctttcctctaaaaagatcgtgtttaaattaacttgtagaaaatctgctggaatggttgttgttttccactgagaaagctaagccctacatttctattcagagtactgtttttagatgtgaaatataagcctgcggccttaactctgtattaaaaaaaatgtttttgtttaaaaaaaactgttcccataggtgcagcaaaccaccatggcacatgtatacctatgtaacaaacctgcacattctgcacatgtatcccagaacttaatgtaaacaaaaaaatcttaaagtgcaaatattaaaaaaaactgttctctgtgaaaaaaattatattccatgttataaagtagcatatgactagtgttctcctagagatcagacttttttgattgtatagtttgcattaaaaagttgtacagggagggatgtaacctgtatcttcaggataatagggaaattaataaggaaaataataattactaaaatttgagttgaagtcagggaattatttctttggttttgagtctctttatacatccattagtagaacctgtctagtctgattgccacagtccttgaattgatggtaagggggagtcagttacagttagaaaaaaacctgggcaaaaactactagttaaatgatcatgaattttgagtatgtgttttaaaatgcttggagttattgcagaaaaatgatattctccattagaacatttgatgtgtgacttttgacataggataaggtgataagaaaattaagttgaaaaatagtgactcaagtacagcaaatcagatttttggctactgagattaaagaagcaaatatttaaaggattatcagcaattttcaaatacatatttttcactgcagtggttttgaagaatgttttaaggttatatttagagtttttaaaaaagttttccctcagccagccatggtggctcacatctgtaatcccagcactttgagaggctgaggcgggcggatcacctgaggtcaggagttctagaccagcctggccaacatggtaaaacaccgtctctaataaaaatgcaaaaattagctgggtgtggtggcaagcacctgtaatcccagctacttgggagactgaggcaggagaatcacttgaatccaggagtcagaggttgcagtgagccgagatcacaccactgcactccagcctgggcgataagagtgaacctgcatctcagaaaaaaaaaaaaagttttccctcattattaaaaaggaaaaattatagaaaattaaaatatagaatgtagaaagaggaaaaacaccacacatcactcgtcaggtggattggtttgtttatttttaagatgggtttattttggatagccagttagaaaacgcccttatagctgatgtgtgcttgtgcatactgaattgtatacttaattctgaaagtaatgaggaaacatttcacctaatgataactggtacaaaggaaagttcacgtgtctttaatagtttgctaattagactagctggttagaaagagggatcactagattggagagagagatccagtttccactggaggcagtaggtctgctcatttccatggtgacaatcctaatggcagagggagtgagtttcccttagtggcacaggctgggggttttgagcttttaagttttgttttatagaaatctggagaattttacattttacttcactatatatctatgtttaaaataattcatttttgatgtcccaaaattgatgtgggttgccttatttccaggcaccaggttgctcactgcaaggtgacattttgagaagcagaaatctctaggtatatcttaagtgtgaaaagcttgttagatttccatggcctattccaggtgggttgttgggtttatgttgtaagcatcaaacttttgtggaaataaatacctaatacaaggtat

SEQ ID NO: 30018 - protein, 245 aa, Homo sapiens; identical to SEQ ID NO: 4145

SEQ ID NO: 30019 - DNA, 1862 bp, Homo sapiens
gtttccggcccttctcagttgtggacgctcgtaagttttcggcagtttccggggagactcggggactccgcgtctcgctctctgtgttccaatcgcccggtgcggtggtgcagggtctcgggctagtcatggcgtccccgtctcggagactgcagactaaaccagtcattacttgtttcaagagcgttctgctaatctacacttttattttctggatcactggcgttatccttcttgcagttggcatttggggcaaggtgagcctggagaattacttttctcttttaaatgagaaggccaccaatgtccccttcgtgctcattgctactggtaccgtcattattcttttgggcacctttggttgttttgctacctgccgagcttctgcatggatgctaaaactgtatgcaatgtttctgactctcgtttttttggtcgaactggtcgctgccatcgtaggatttgttttcagacatgagattaagaacagctttaagaataattatgagaaggctttgaagcagtataactctacaggagattatagaagccatgcagtagacaagatccaaaatacgttgcattgttgtggtgtcaccgattatagagattggacagatactaattattactcagaaaaaggatttcctaagagttgctgtaaacttgaagattgtactccacagagagatgcagacaaagtaaacaatgaaggttgttttataaaggtgatgaccattatagagtcagaaatgggagtcgttgcaggaatttcctttggagttgcttgcttccaactgattggaatctttctcgcctactgcctctctcgtgccataacaaataaccagtatgagatagtgtaacccaatgtatctgtgggcctattcctctctacctttaaggacatttagggtcccccctgtgaattagaaagttgcttggctggagaactgacaacactacttactgatagaccaaaaaactacaccagtaggttgattcaatcaagatgtatgtagacctaaaactacaccaataggctgattcaatcaagatccgtgctcgcagtgggctgattcaatcaagatgtatgtttgctatgttctaagtccaccttctatcccattcatgttagatcgttgaaaccctgtatccctctgaaacactggaagagctagtaaattgtaaatgaagtaatactgtgttcctcttgactgttatttttcttagtagggggcctttggaaggcactgtgaatttgctattttgatgtagtgttacaagatggaaaattgattcctctgactttgctattgatgtagtgtgatagaaaattcacccctctgaactggctccttcccagtcaaggttatctggtttgattgtataatttgcaccaagaagttaaaatgttttatgactctctgttctgctgacaggcagagagtcacattgtgtaatttaatttcagtcagtcaatagatggcatccctcatcagggttgccagatggtgataacagtgtaaggccttgggtctaaggcatccacgactggaagggactactgatgttctgtgatacatcaggtttcagcacacaacttacatttctttgcctccaaattgaggcatttattatgatgttcatactttccctcttgtttgaaagtttctaattattaaatggtgtcggaattgttgtattttccttaggaattcagtggaacttatcttcattaaatttagctggtaccaggttgatatgacttgtcaatattatggtcaactttaagtcttagttttcgtttgtgcctttgattaataagtataactcttatacaataaatactgctttcctct

SEQ ID NO: 30020 - protein, 245 aa, Homo sapiens; identical to SEQ ID NO: 4145

SEQ ID NO: 30021 - DNA, 469 bp, Homo sapiens
tgatgaccattatagagtcagaaatgggagtcgttgcaggaatttcctttggagttgcttgcttccaactgattggaatctttctcgcctactgcctctctcgtgccataacaaataaccagtatgagatagtgtaacccaatgtatctgtgggcctattcctctctacctttaaggacatttagggtcccccctgtgaattagaaagttgcttggctggagaactgacaacactacttactgatagaccaaaaaactacaccagtaggttgattcaatcaagatgtatgtagacctaaaactacaccaataggctgattcaatcaagatccgtgctcgcagtgggctgattcaatcaagatgtatgtttgctatgttctaagtccaccttctatcccattcatgttagatcgttgaaaccctgtatccctctgaaacactggaagagctagtaaattgtaaatgaagt

SEQ ID NO: 30022 - protein, 44 aa, Homo sapiens
MTIIESEMGVVAGISFGVACFQLIGIFLAYCLSRAITNNQYEIV

SEQ ID NO: 30023 - DNA, 1198 bp, Homo sapiens
gtttccggcccttctcagttgtggacgctcgtaagttttcggcagtttccggggagactcggggactccgcgtctcgctctctgtgttccaatcgcccggtgcggtggtgcagggtctcgggctagtcatggcgtccccgtctcggagactgcagactaaaccagtcattacttgtttcaagagcgttctgctaatctacacttttattttctggatcactggcgttatccttcttgcagttggcatttggggcaaggtgagcctggagaattacttttctcttttaaatgagaaggccaccaatgtccccttcgtgctcattgctactggtaccgtcattattcttttgggcacctttggttgttttgctacctgccgagcttctgcatggatgctaaaactgtatgcaatgtttctgactctcgtttttttggtcgaactggtcgctgccatcgtaggatttgttttcagacatgagattaagaacagctttaagaataattatgagaaggctttgaagcagtataactctacaggagattatagaagccatgcagtagacaagatccaaaatacgttgcattgttgtggtgtcaccgattatagagattggacagatactaattattactcagaaaaaggatttcctaagagttgctgtaaacttgaagattgtactccacagagagatgcagacaaagtaaacaatgaaggttgttttataaaggtgatgaccattatagagtcagaaatgggagtcgttgcaggaatttcctttggagttgcttgcttccaactgattggaatctttctcgcctactgcctctctcgtgccataacaaataaccagtatgagatagtgtaacccaatgtatctgtgggcctattcctctctacctttaaggacatttagggtcccccctgtgaattagaaagttgcttggctggagaactgacaacactacttactgatagaccaaaaaactacaccagtaggttgattcaatcaagatgtatgtagacctaaaactacaccaataggctgattcaatcaagatccgtgctcgcagtgggctgattcaatcaagatgtatgtttgctatgttctaagtccaccttctatcccattcatgttagatcgttgaaaccctgtatccctctgaaacactggaagagctagtaaattgtaaatgaagt

SEQ ID NO: 30024 - protein, 245 aa, Homo sapiens; identical to SEQ ID NO: 4145

SEQ ID NO: 30025 - DNA, 2179 bp, Homo sapiens
acaggcttggagccagtgccattcacacttccccctcttctgcagcagacggactgagttcctctaatccctgtgttccttctcccccatctttctaaaacccttctctgagagaggaataactatagcttcagggataatatagctttaaggaaacttttggcagatgtggacgtcgtaacatctgggcagtgttaacagaatcccggaggccgggacagaccaggagccactcgttctaggaatgttaaagtagaaggttttttccaattgatgagaggagcagagaggaaggagaaagaggaggagagagaaaaagggcacaaaataccataaaacagatcccatatttctgcttcccctcacttttagaagttaattgatggctgacttctgaaagtcactttcctttgccctggtacttcaggccatatacatcttttcttgtctccataatcctccctttcaaggatggccagtcagctaactcaaagaggagctctctttctgctgttcttcctaactccggcagtgacaccaacatggtatgcaggttctggctactatccggatgaaagctacaatgaagtatatgcagaggaggtcccacaggctcctgccctggactaccgagtcccccgatggtgttatacattaaatatccaggatggagaagccacatgctactcaccgaagggaggaaattatcacagcagcctgggcacgcgttgtgagctctcctgtgaccggggctttcgattgattggaaggaggtcggtgcaatgcctgccaagccgtcgttggtctggaactgcctactgcaggcagatgagatgccacgcactaccattcatcactagtggcacttacacctgcacaaatggagtgcttcttgactctcgctgtgactacagctgttccagtggctaccacctggaaggtgatcgcagccgaatctgcatggaagatgggagatggagtggaggcgagcctgtatgtgtagacatagatccccccaagatccgctgtccccactcacgtgagaagatggcagagccagagaaattgactgctcgagtatactgggacccaccgttggtgaaagattctgctgatggtaccatcaccagggtgacacttcggggccctgagcctggctctcactttcccgaaggagagcatgtgattcgttacactgcctatgaccgagcctacaaccgggccagctgcaagttcattgtgaaagtacaagtgagacgctgcccaactctgaaacctccgcagcacggctacctcacctgcacctcagcgggggacaactatggtgccacctgtgaataccactgtgatggcggttatgatcgccaggggacaccctcccgggtctgtcagtccagccgccagtggtcaggttcaccaccaatctgtgctcctatgaagattaacgtcaacgtcaactcagctgctggtctcttggatcaattctatgagaaacagcgactcctcatcatctcagctcctgatccttccaaccgatattataaaatgcagatctctatgctacagcaatccacctgtggactggatttgcggcatgtgaccatcattgaactggtgggacagccacctcaggaggtggggcgcatccgggagcaacagctgtcagccaacatcatcgaggagctcaggcaatttcagcgcctcactcgctcctacttcaacatggtgttgattgacaagcagggtattgaccgagaccgctacatggaacctgtcacccccgaggaaatcttcacattcattgatgactacctactgagcaatcaggagttgacccagcgtcgggagcaaagggacatatgcgagtgaacttgagccagggcatggttaaagtcaagggaaaagctcctctagttagctgaaactgggacctaataaaaggaggaaatgttttcccacagttctagggacaggactctgaggtgggtgagtttgacaaatcctgcggtgtttccaggcatccttttaggactgtgtaatagtttccctagaagctaggtagggactgaggacaggccttgggcagtgggttgggggtagaagttcttcctttcctaacccgggcccctgcccagctctccaaagtctttcagaaaagtaaatcctaaattcagtgatg

SEQ ID NO: 30026 - protein, 465 aa, Homo sapiens; identical to SEQ ID NO: 4147

SEQ ID NO: 30027 - DNA, 2729 bp, Homo sapiens
acaggcttggagccagtgccattcacacttccccctcttctgcagcagacggactgagttcctctaatccctgtgttccttctcccccatctttctaaaacccttctctgagagaggaataactatagcttcagggataatatagctttaaggaaacttttggcagatgtggacgtcgtaacatctgggcagtgttaacagaatcccggaggccgggacagaccaggagccactcgttctaggaatgttaaagtagaaggttttttccaattgatgagaggagcagagaggaaggagaaagaggaggagagagaaaaagggcacaaaataccataaaacagatcccatatttctgcttcccctcacttttagaagttaattgatggctgacttctgaaagtcactttcctttgccctggtacttcaggccatatacatcttttcttgtctccataatcctccctttcaaggatggccagtcagctaactcaaagaggagctctctttctgctgttcttcctaactccggcagtgacaccaacatggtatgcaggttctggctactatccggatgaaagctacaatgaagtatatgcagaggaggtcccacaggctcctgccctggactaccgagtcccccgatggtgttatacattaaatatccaggatggagaagccacatgctactcaccgaagggaggaaattatcacagcagcctgggcacgcgttgtgagctctcctgtgaccggggctttcgattgattggaaggaggtcggtgcaatgcctgccaagccgtcgttggtctggaactgcctactgcaggcagatgagatgccacgcactaccattcatcactagtggcacttacacctgcacaaatggagtgcttcttgactctcgctgtgactacagctgttccagtggctaccacctggaaggtgatcgcagccgaatctgcatggaagatgggagatggagtggaggcgagcctgtatgtgtagacatagatccccccaagatccgctgtccccactcacgtgagaagatggcagagccagagaaattgactgctcgagtatactgggacccaccgttggtgaaagattctgctgatggtaccatcaccagggtgacacttcggggccctgagcctggctctcactttcccgaaggagagcatgtgattcgttacactgcctatgaccgagcctacaaccgggccagctgcaagttcattgtgaaagtacaagtgagacgctgcccaactctgaaacctccgcagcacggctacctcacctgcacctcagcgggggacaactatggtgccacctgtgaataccactgtgatggcggttatgatcgccaggggacaccctcccgggtctgtcagtccagccgccagtggtcaggttcaccaccaatctgtgctcctatgaagattaacgtcaacgtcaactcagctgctggtctcttggatcaattctatgagaaacagcgactcctcatcatctcagctcctgatccttccaaccgatattataaaatgcagatctctatgctacagcaatccacctgtggactggatttgcggcatgtgaccatcattgaactggtgggacagccacctcaggaggtggggcgcatccgggagcaacagctgtcagccaacatcatcgaggagctcaggcaatttcagcgcctcactcgctcctacttcaacatggtgttgattgacaagcagggtattgaccgagaccgctacatggaacctgtcacccccgaggaaatcttcacattcattgatgactacctactgagcaatcaggagttgacccagcgtcgggagcaaagggacatatgcgagtgaacttgagccagggcatggttaaagtcaagggaaaagctcctctagttagctgaaactgggacctaataaaaggaggaaatgttttcccacagttctagggacaggactctgaggtgggtgagtttgacaaatcctgcggtgtttccaggcatccttttaggactgtgtaatagtttccctagaagctaggtagggactgaggacaggccttgggcagtgggttgggggtagaagttcttcctttcctaacccgggcccctgcccagctctccaaagtctttcagaaaagtaaatcctaaattcagtgatgaactggctgttttaactggttcctctaccctgaggtgacagcagagggcagcacgagcacaacagaaaccagcttacactttaagcaagtgtagctggattttccttacaggatgaggggtgggtagcagggtacaaaacatccttttttttttttttttgagacggagtcttgccttgcgcccaggctggagtgcagtggcgcgatcttggctcaccgcaagctccgtctcctgggttcatgccattctcctgcctcagcctcccgagaagctgggactacaggcgcccaccaccacacccggctaacgttttgtatttttagtagagacgggttttgaccatgttagccaggatggtctctatctcctgacctcgcgatccacccgcctcggcctcccaaagtgctgggattacaggcgtgagccaccacgcccagcccaaaacattcttgaacttgtttgtcatttccccttctagggcactgggcagcaaatgttatctgaaccattgcttcactgttagaaaaaccctgcagtgggagagagctt

SEQ ID NO: 30028 - protein, 465 aa, Homo sapiens; identical to SEQ ID NO: 4147

SEQ ID NO: 30029 - DNA, 959 bp, Homo sapiens
acacttccccctcttctgcagcagacggactgagttcctctaatccctgtgttccttctcccccatctttctaaaacccttctctgagagaggaataactatagcttcagggataatatagctttaaggaaacttttggcagatgtggacgtcgtaacatctgggcagtgttaacagaatcccggaggccgggacagaccaggagccactcgttctaggaatgttaaagtagaaggttttttccaattgatgagaggagcagagaggaaggagaaagaggaggagagagaaaaagggcacaaaataccataaaacaggatggccagtcagctaactcaaagaggagctctctttctgctgttcttcctaactccggcagtgacaccaacatggtatgcaggttctggctactatccggatgaaagctacaatgaagtatatgcagaggaggtcccacaggctcctgccctggactaccgaggtaatctaccctgcttctcaagcccagaaaatctcttttctggcctcagacctaggcccttccctgaagcatccccatcaggcttggctcacatgtgtcaaaactgtagcacagggaatcaggggctgtgatttctcatcatgaacttggttactgacttactgtgtgacctcacctctccagcctgaaggttctccatgtattattaatcattaagtattgactagttactcaatgcctaatcctgtgcaaggtaagcctgtgggtaatacaaggtctcagatagggttttgtccccatcatgtagcttatattctgttgggggtgatgggggggtataaagttagcacatgtagggcaagtaagtgtgaagctatgtcatagcagtaaatgcaatagggtttaagaaaaagaagtcaggaaaagggtcatgaaagatgacatttaggctaagcttagaatgataggtgggattttg

SEQ ID NO: 30030 - protein, 97 aa, Homo sapiens [sequence omitted]

SEQ ID NO: 30031 - DNA, 598 bp, Homo sapiens
cataaataacaaacagagtcttgttattctataacatgaaagatccttatgagggagataatataaaaggcattcattaattataaaatctctcttcttcctcacagatcccatatttctgcttcccctcacttttagaagttaattgatggctgacttctgaaagtcactttcctttgccctggtacttcaggccatatacatcttttcttgtctccataatcctccctttcaaggatggccagtcagctaactcaaagaggagctctctttctgctgttcttcctaactccggcagtgacaccaacatggtatgcagtcctttgctccctgctgagcatgtcttcaaaagctggctctgtaaccggagcaggaagacctaatactttagggaatcacccacatctggcctcctgtttacaggacctataaagctttgaggctaatactgaactgaaacagctgacaaaaattccatgacccgccccccgactcccccgcacccaccaaagaaacctcccattatgggaaaaaagagagcaggggagatgaggtctgagaagaaatcaacggaagccagaagaagaactgaaatggg

SEQ ID NO: 30032 - protein, 64 aa, Homo sapiens
MASQLTQRGALFLLFFLTPAVTPTWYAVLCSLLSMSSKAGSVTGAGRPNTLGNHPHLASCLQDL

SEQ ID NO: 30033 - DNA, 471 bp, Homo sapiens
ggtcccttctccctcttccctccagggaaatatgggaactgtgagaggcagcaggcaagttatgggcagaggcagatacaatgagttcatgtgggaaatttctggtcagactagcttctctctctcacatacacacacactcactcacaagcagtacagtcactaagttggctaggtaatatccaaagcattctgattgtcctactttttgtaaattgaacttatttaagatattttagaagagatgagtcacgtcttcctttgacccttcacccataacacacataccattctcacaggaggccacatggtgcagtagagtcagactttgattcaaagcccaactctgtcacgtgacagtaggcttgagtttcctcatctgtaaaaagggaagatttcctacttcataaagtggttggagaaattaaagaaatagtatatgaagccttgcacataaaaagcatttgatat

SEQ ID NO: 30034 - protein, 44 aa, Homo sapiens [sequence omitted]

SEQ ID NO: 30035 - DNA, 2582 bp, Homo sapiens
ctcactaatactattatattcattttctctctaggttaaaggaattgaatcaggtgaatgatctagtagaggtagtgggaactctgcttcagcagattcaaggaggggcgtgtgtagtaggatctggatgtgggttcatcttcttgggctaggcctgtggtaggggaaaggggaatttagagagataactgtccgctttgagtaggctgttgattactccccgccctctgccagatacctccttcccatgaggaacaaggccagtaaacgtaaaactcctgtgatgaagaagaccctgaatcctcactacaaccatacatttgtctacaatggtgtgaggctggaagatctacagcatatgtgcctggaactgactgtgtgggaccgggagcccctggccagcaatgacttcctgggaggggtcaggctgggtgttggcactgggatcagtaatggggaagtggtggactggatggactcgactggggaagaagtgagcctgtggcagaagatgcgacagtacccagggtcttgggcagaagggactctgcagctccgttcctcaatggccaagcagaagctgggtttatgagtccctgtcctcttctgcaggtccagccctggcgagggcaggtcagaggaagtgaagaaatcaagagcaaagatttataatttaatgtgtatgtgtgtatgtgtgtatgtgtgtgtgtgtgtgtgtgtgtgtatgtgtacaaacatgtattttctgcaaatctcattatgctggctagagtgatgcagacttgttcttctttttaaagcagtctcaagaataagcatttctttaaaatgtttctgtgtataatctagtttattttcagagtccattttttcttatgtctttataaggttcacttaacttaaaaacagcttttaaaacaactttttatcttctgtcttgctatcattgttcctacttccctaggaagccctggctacctttcgcattaggaccagtctgggttttaaggctctgggaagcagggttggttagtaaagacaggaatgttggggagaggtgagtagttccttcctctttctcctctccaatttatgcttttaacttattttctacctggataaacttctggaacttggcttttaaatttaacttttctagtttttaagcagtttccaccttgctttggtctaatgcttttctttgaaatgctaacagaattcccaagctttttccagttctagatatctttactagacctttgggggactcttataatggagctgcttttgaaaagcactttaattagataatgtattttgactaaatcacgaggatgcccagtgagagcttctagctgatctcagaggaccagagtgactgagggtaaagtgtctcacagcccatgctgaattttctgcattttaaactgatactgcagtcattggagagagagctcctcatttctcgaatgaaagatgagatatattcatcctcatgtaccacatctgtcttagtgtttgcgtctggggtgtgttatcaaacagagcatggtctacatcccactgtgtcaaccagaagagccaagtgttatctcaattggcccagtgtttctccaggctggggactgttaagggctctaagggaatgtagacagagtctccctgttattctgacttcctgcttgatgagctttcagttcctgtttttgctattgtttcctaaatttgacctacatattacatgggtgtagtgtgttgaggcttttcaaagaagggtctagtgagctaagtttcatcttctggtactcattgatcaaactgacctttctattctcataagcgtttctacccaaagttgtgtgtggaaggagtgtatagcagagaggaaatccctttcaacagagtcagctgctaactgatttcctataagcacactggattaagggcagccacagtggtttctactgtatgtatgaaccgaatggaggaatgttttcaaagattgatttggtgtggattgcaattgtaatggaaggcataacttgggatcccgggctgtaacttgctcttttgtttcccacccccctgacatgtatgtgtgctttaataaagctttctcacttgtcaaacgtttgtgtttgttagttctataaatgcttttgtctctgatgtcctcactgttgcttttcccctggcttgaaggataagaaccaaagtgataaatgctcttccctaaccatcctatgctgattgaagaaaattcacctttccccgcattgctgcctgataccttaaatgcctgatactttcgctgagcttgatccctcgtcctttgtatttggtatctaaggagaacactgagaaatcatctttaaagtggcaccacttttctatcttgtaacaaaggaactcttcctttagctttgcagaccctcctatactggaggaaggagagagatgttcatacaggaggtgaggggagacattccctgctataagcacttctttctggatccttcaatttctctgggaggcggggactttttcttttactcctcctaccattatgtagttttgagaga

SEQ ID NO: 30036 - protein, 114 aa, Homo sapiens
MRNKASKRKTPVMKKTLNPHYNHTFVYNGVRLEDLQHMCLELTVWDREPLASNDFLGGVRLGVGTGISNGEVVDWMDSTGEEVSLWQKMRQYPGSWAEGTLQLRSSMAKQKLGL

SEQ ID NO: 30037 - DNA, 872 bp, Homo sapiens
gaatagcttgaagaagagataaggttaaagggagcttttcttttagaagtactttttcaaagagggtctagtgagctaagtttcatcttctggtactcattgatcaaactgacctttctattctcataagcgtttctacccaaagttgtgtgtggaaggagtgtatagcagagaggaaatccctttcaacagagtcagctgctaactgatttcctataagcacactggattaagggcagccacagtggtttctactgtatgtatgaaccgaatggaggaatgttttcaaagattgatttggtgtggattgcaattgtaatggaaggcataacttgggatcccgggctgtaacttgctcttttgtttcccacccccctgacatgtatgtgtgctttaataaagctttctcacttgtcaaacgtttgtgtttgttagttctataaatgcttttgtctctgatgtcctcactgttgcttttcccctggcttgaaggataagaaccaaagtgataaatgctcttccctaaccatcctatgctgattgaagaaaattcacctttccccgcattgctgcctgataccttaaatgcctgatactttcgctgagcttgatccctcgtcctttgtatttggtatctaaggagaacactgagaaatcatctttaaagtggcaccacttttctatcttgtaacaaaggaactcttcctttagctttgcagaccctcctatactggaggaaggagagagatgttcatacaggaggtgaggggagacattccctgctataagcacttctttctggatccttcaatttctctgggaggcggggactttttcttttactcctcctaccattatgtagttttgagaga

SEQ ID NO: 30038 - protein, 40 aa, Homo sapiens
MFIQEVRGDIPCYKHFFLDPSISLGGGDFFFYSSYHYVVL

SEQ ID NO: 30039 - DNA, 4281 bp, Homo sapiens
gagaagggccggctgccggagctgggttgcgatcttcccggagccggagaccctcccttgaaaccggcactgggacttctcgatctctggaggcacctgttgcaagtgacagagactgagtcgccctgtgttgcccaggctggtcttgaactcctaggctcaagagatcctcctgcctcagcctcccaaagtgctgggattacaggcaactctggtagctctccttgtctggttgttttgaagaaagaagagtagaagaaaaagttgagtaaatcatgtcggagttactggacctttcttttctgtctgaggaggaaaaggatttgattctcagtgttctacagcgagatgaagaggtccggaaagcagatgagaaaaggattaggcgactaaagaatgagttactggagataaaaaggaaaggggccaagaggggcagccaacactacagtgatcggacctgtgcccggtgccaggagagcctgggccgtttgagtcccaaaaccaatacttgtcggggttgtaatcacctggtgtgtcgggactgccgcatacaggaaagcaatggtacctggaggtgcaaggtgtgcgccaaggaaatagagttgaagaaagcaactggggactggttttatgaccagaaagtgaatcgctttgcttaccgcacaggtagtgagataatcaggatgtccctgcgccacaaacctgcagtgagtaaaagagagacagtgggacagtccctccttcatcagacacagatgggtgacatctggccaggaagaaagatcattcaggagcggcagaaggagcccagtgtgctatttgaagtgccaaagctgaaaagtggaaagagtgcattggaagctgagagtgagagtctggatagcttcacagctgactcggatagcacctccaggagagactctctggataaatctggcctctttccagaatggaagaagatgtctgctcccaaatctcaagtagaaaaggaaactcagcctggaggtcaaaatgtggtatttgtggatgagggtgagatgatatttaagaagaacaccagaaaaatcctcaggccttcagagtacactaaatctgtgatagatcttcgcccagaagatgtggtacatgaaagtggctccttgggagacagaagcaaatccgtcccaggcctcaatgtggatatggaagaggaagaagaagaagaagacattgaccacctagtgaagttacatcgccagaagctagccagaagcagcatgcaaagtggctcctccatgagtacgatcggcagcatgatgagcatctacagtgaagctggtgatttcgggaacatctttgtgactggcaggattgccttttccctgaagtatgagcagcaaacccagagtctggttgtccatgtgaaggagtgccatcagctggcctatgctgatgaagccaagaagcgctctaacccatatgtgaagacttaccttctgcctgacaagtcccgccaaggaaaaagaaaaaccagcatcaagcgggacactattaatccactatatgatgagacgctgaggtatgagatcccagaatctctcctggcccagaggaccctgcagttctcagtttggcatcatggtcgttttggcagaaacactttccttggagaggcagagatccagatggattcctggaagcttgataagaaactggatcattgcctccctttacatggaaagatcagtgctgagtccccgactggcttgccatcacacaaaggcgagttggtggtttcattgaaatacatcccagcctccaaaacccctgttggaggtgaccggaaaaagagtaaaggtggggaagggggagagctccaggtgtggatcaaagaagccaagaacttgacggctgccaaagcaggagggacttcagacagctttgtcaagggatacctccttcccatgaggaacaaggccagtaaacgtaaaactcctgtgatgaagaagaccctgaatcctcactacaaccatacatttgtctacaatggtgtgaggctggaagatctacagcatatgtgcctggaactgactgtgtgggaccgggagcccctggccagcaatgacttcctgggaggggtcaggctgggtgttggcactgggatcagtaatggggaagtggtggactggatggactcgactggggaagaagtgagcctgtggcagaagatgcgacagtacccagggtcttgggcagaagggactctgcagctccgttcctcaatggccaagcagaagctgggtttatgagtccctgtcctcttctgcaggtccagccctggcgagggcaggtcagaggaagtgaagaaatcaagagcaaagatttataatttaatgtgtatgtgtgtatgtgtgtatgtgtgtgtgtgtgtgtgtgtgtgtatgtgtacaaacatgtattttctgcaaatctcattatgctggctagagtgatgcagacttgttcttctttttaaagcagtctcaagaataagcatttctttaaaatgtttctgtgtataatctagtttattttcagagtccattttttcttatgtctttataaggttcacttaacttaaaaacagcttttaaaacaactttttatcttctgtcttgctatcattgttcctacttccctaggaagccctggctacctttcgcattaggaccagtctgggttttaaggctctgggaagcagggttggttagtaaagacaggaatgttggggagaggtgagtagttccttcctctttctcctctccaatttatgcttttaacttattttctacctggataaacttctggaacttggcttttaaatttaacttttctagtttttaagcagtttccaccttgctttggtctaatgcttttctttgaaatgctaacagaattcccaagctttttccagttctagatatctttactagacctttgggggactcttataatggagctgcttttgaaaagcactttaattagataatgtattttgactaaatcacgaggatgcccagtgagagcttctagctgatctcagaggaccagagtgactgagggtaaagtgtctcacagcccatgctgaattttctgcattttaaactgatactgcagtcattggagagagagctcctcatttctcgaatgaaagatgagatatattcatcctcatgtaccacatctgtcttagtgtttgcgtctggggtgtgttatcaaacagagcatggtctacatcccactgtgtcaaccagaagagccaagtgttatctcaattggcccagtgtttctccaggctggggactgttaagggctctaagggaatgtagacagagtctccctgttattctgacttcctgcttgatgagctttcagttcctgtttttgctattgtttcctaaatttgacctacatattacatgggtgtagtgtgttgaggcttttcaaagaagggtctagtgagctaagtttcatcttctggtactcattgatcaaactgacctttctattctcataagcgtttctacccaaagttgtgtgtggaaggagtgtatagcagagaggaaatccctttcaacagagtcagctgctaactgatttcctataagcacactggattaagggcagccacagtggtttctactgtatgtatgaaccgaatggaggaatgttttcaaagattgatttggtgtggattgcaattgtaatggaaggcataacttgggatcccgggctgtaacttgctcttttgtttcccacccccctgacatgtatgtgtgctttaataaagctttctcacttgtcaaacgtttgtgtttgttagttctataaatgcttttgtctctgatgtcctcactgttgcttttcccctggcttgaaggataagaaccaaagtgataaatgctcttccctaaccatcctatgctgattgaagaaaattcacctttccccgcattgctgcctgataccttaaatgcctgatactttcgctgagcttgatccctcgtcctttgtatttggtatctaaggagaacactgagaaatcatctttaaagtggcaccacttttctatcttgtaacaaaggaactcttcctttagctttgcagaccctcctatactggaggaaggagagagatgttcatacaggaggtgaggggagacattccctgctataagcacttctttctggatccttcaatttctctgggaggcggggactttttcttttactcctcctaccattatgtagttttgagaga

SEQ ID NO: 30040 - protein, 671 aa, Homo sapiens
MSELLDLSFLSEEEKDLILSVLQRDEEVRKADEKRIRRLKNELLEIKRKGAKRGSQHYSDRTCARCQESLGRLSPKTNTCRGCNHLVCRDCRIQESNGTWRCKVCAKEIELKKATGDWFYDQKVNRFAYRTGSEIIRMSLRHKPAVSKRETVGQSLLHQTQMGDIWPGRKIIQERQKEPSVLFEVPKLKSGKSALEAESESLDSFTADSDSTSRRDSLDKSGLFPEWKKMSAPKSQVEKETQPGGQNVVFVDEGEMIFKKNTRKILRPSEYTKSVIDLRPEDVVHESGSLGDRSKSVPGLNVDMEEEEEEEDIDHLVKLHRQKLARSSMQSGSSMSTIGSMMSIYSEAGDFGNIFVTGRIAFSLKYEQQTQSLVVHVKECHQLAYADEAKKRSNPYVKTYLLPDKSRQGKRKTSIKRDTINPLYDETLRYEIPESLLAQRTLQFSVWHHGRFGRNTFLGEAEIQMDSWKLDKKLDHCLPLHGKISAESPTGLPSHKGELVVSLKYIPASKTPVGGDRKKSKGGEGGELQVWIKEAKNLTAAKAGGTSDSFVKGYLLPMRNKASKRKTPVMKKTLNPHYNHTFVYNGVRLEDLQHMCLELTVWDREPLASNDFLGGVRLGVGTGISNGEVVDWMDSTGEEVSLWQKMRQYPGSWAEGTLQLRSSMAKQKLGL

SEQ ID NO: 30041 - DNA, 2126 bp, Homo sapiens
ctcactaatactattatattcattttctctctaggttaaaggaattgaatcaggtgaatgatctagtagaggtagtgggaactctgcttcagcagattcaaggaggggcgtgtgtagtaggatctggatgtgggttcatcttcttgggctaggcctgtggtaggggaaaggggaatttagagagataactgtccgctttgagtaggctgttgattactccccgccctctgccagatacctccttcccatgaggaacaaggccagtaaacgtaaaactcctgtgatgaagaagaccctgaatcctcactacaaccatacatttgtctacaatggtgtgaggctggaagatctacagcatatgtgcctggaactgactgtgtgggaccgggagcccctggccagcaatgacttcctgggaggggtcaggctgggtgttggcactgggatcagtaatggggaagtggtggactggatggactcgactggggaagaagtgagcctgtggcagaagatgcgacagtacccagggtcttgggcagaagggactctgcagctccgttcctcaatggccaagcagaagctgggtttatgagtccctgtcctcttctgcaggtccagccctggcgagggcaggtcagaggaagtgaagaaatcaagagcaaagatttataatttaatgtgtatgtgtgtatgtgtgtatgtgtgtgtgtgtgtgtgtgtgtgtatgtgtacaaacatgtattttctgcaaatctcattatgctggctagagtgatgcagacttgttcttctttttaaagcagtctcaagaataagcatttctttaaaatgtttctgtgtataatctagtttattttcagagtccattttttcttatgtctttataaggttcacttaacttaaaaacagcttttaaaacaactttttatcttctgtcttgctatcattgttcctacttccctaggaagccctggctacctttcgcattaggaccagtctgggttttaaggctctgggaagcagggttggttagtaaagacaggaatgttggggagaggtgagtagttccttcctctttctcctctccaatttatgcttttaacttattttctacctggataaacttctggaacttggcttttaaatttaacttttctagtttttaagcagtttccaccttgctttggtctaatgcttttctttgaaatgctaacagaattcccaagctttttccagttctagatatctttactagacctttgggggactcttataatggagctgcttttgaaaagcactttaattagataatgtattttgactaaatcacgaggatgcccagtgagagcttctagctgatctcagaggaccagagtgactgagggtaaagtgtctcacagcccatgctgaattttctgcattttaaactgatactgcagtcattggagagagagctcctcatttctcgaatgaaagatgagatatattcatcctcatgtaccacatctgtcttagtgtttgcgtctggggtgtgttatcaaacagagcatggtctacatcccactgtgtcaaccagaagagccaagtgttatctcaattggcccagtgtttctccaggctggggactgttaagggctctaagggaatgtagacagagtctccctgttattctgacttcctgcttgatgagctttcagttcctgtttttgctattgtttcctaaatttgacctacatattacatgggtgtagtgtgttgaggcttttcaaagaagggtctagtgagctaagtttcatcttctggtactcattgatcaaactgacctttctattctcataagcgtttctacccaaagttgtgtgtggaaggagtgtatagcagagaggaaatccctttcaacagagtcagctgctaactgatttcctataagcacactggattaagggcagccacagtggtttctactgtatgtatgaaccgaatggaggaatgttttcaaagattgatttggtgtggattgcaattgtaatggaaggcataacttgggatcccgggctgtaacttgctcttttgtttcccacccccctgacatgtatgtgtgctttaataaagctttctcacttgtc

SEQ ID NO: 30042 - protein, 114 aa, Homo sapiens; identical to SEQ ID NO: 30036

SEQ ID NO: 30043 - DNA, 416 bp, Homo sapiens
gaatagcttgaagaagagataaggttaaagggagcttttcttttagaagtactttttcaaagagggtctagtgagctaagtttcatcttctggtactcattgatcaaactgacctttctattctcataagcgtttctacccaaagttgtgtgtggaaggagtgtatagcagagaggaaatccctttcaacagagtcagctgctaactgatttcctataagcacactggattaagggcagccacagtggtttctactgtatgtatgaaccgaatggaggaatgttttcaaagattgatttggtgtggattgcaattgtaatggaaggcataacttgggatcccgggctgtaacttgctcttttgtttcccacccccctgacatgtatgtgtgctttaataaagctttctcacttgtc

SEQ ID NO: 30044 - protein, 30 aa, Homo sapiens
MYEPNGGMFSKIDLVWIAIVMEGITWDPGL

SEQ ID NO: 30045 - DNA, 3825 bp, Homo sapiens
gagaagggccggctgccggagctgggttgcgatcttcccggagccggagaccctcccttgaaaccggcactgggacttctcgatctctggaggcacctgttgcaagtgacagagactgagtcgccctgtgttgcccaggctggtcttgaactcctaggctcaagagatcctcctgcctcagcctcccaaagtgctgggattacaggcaactctggtagctctccttgtctggttgttttgaagaaagaagagtagaagaaaaagttgagtaaatcatgtcggagttactggacctttcttttctgtctgaggaggaaaaggatttgattctcagtgttctacagcgagatgaagaggtccggaaagcagatgagaaaaggattaggcgactaaagaatgagttactggagataaaaaggaaaggggccaagaggggcagccaacactacagtgatcggacctgtgcccggtgccaggagagcctgggccgtttgagtcccaaaaccaatacttgtcggggttgtaatcacctggtgtgtcgggactgccgcatacaggaaagcaatggtacctggaggtgcaaggtgtgcgccaaggaaatagagttgaagaaagcaactggggactggttttatgaccagaaagtgaatcgctttgcttaccgcacaggtagtgagataatcaggatgtccctgcgccacaaacctgcagtgagtaaaagagagacagtgggacagtccctccttcatcagacacagatgggtgacatctggccaggaagaaagatcattcaggagcggcagaaggagcccagtgtgctatttgaagtgccaaagctgaaaagtggaaagagtgcattggaagctgagagtgagagtctggatagcttcacagctgactcggatagcacctccaggagagactctctggataaatctggcctctttccagaatggaagaagatgtctgctcccaaatctcaagtagaaaaggaaactcagcctggaggtcaaaatgtggtatttgtggatgagggtgagatgatatttaagaagaacaccagaaaaatcctcaggccttcagagtacactaaatctgtgatagatcttcgcccagaagatgtggtacatgaaagtggctccttgggagacagaagcaaatccgtcccaggcctcaatgtggatatggaagaggaagaagaagaagaagacattgaccacctagtgaagttacatcgccagaagctagccagaagcagcatgcaaagtggctcctccatgagtacgatcggcagcatgatgagcatctacagtgaagctggtgatttcgggaacatctttgtgactggcaggattgccttttccctgaagtatgagcagcaaacccagagtctggttgtccatgtgaaggagtgccatcagctggcctatgctgatgaagccaagaagcgctctaacccatatgtgaagacttaccttctgcctgacaagtcccgccaaggaaaaagaaaaaccagcatcaagcgggacactattaatccactatatgatgagacgctgaggtatgagatcccagaatctctcctggcccagaggaccctgcagttctcagtttggcatcatggtcgttttggcagaaacactttccttggagaggcagagatccagatggattcctggaagcttgataagaaactggatcattgcctccctttacatggaaagatcagtgctgagtccccgactggcttgccatcacacaaaggcgagttggtggtttcattgaaatacatcccagcctccaaaacccctgttggaggtgaccggaaaaagagtaaaggtggggaagggggagagctccaggtgtggatcaaagaagccaagaacttgacggctgccaaagcaggagggacttcagacagctttgtcaagggatacctccttcccatgaggaacaaggccagtaaacgtaaaactcctgtgatgaagaagaccctgaatcctcactacaaccatacatttgtctacaatggtgtgaggctggaagatctacagcatatgtgcctggaactgactgtgtgggaccgggagcccctggccagcaatgacttcctgggaggggtcaggctgggtgttggcactgggatcagtaatggggaagtggtggactggatggactcgactggggaagaagtgagcctgtggcagaagatgcgacagtacccagggtcttgggcagaagggactctgcagctccgttcctcaatggccaagcagaagctgggtttatgagtccctgtcctcttctgcaggtccagccctggcgagggcaggtcagaggaagtgaagaaatcaagagcaaagatttataatttaatgtgtatgtgtgtatgtgtgtatgtgtgtgtgtgtgtgtgtgtgtgtatgtgtacaaacatgtattttctgcaaatctcattatgctggctagagtgatgcagacttgttcttctttttaaagcagtctcaagaataagcatttctttaaaatgtttctgtgtataatctagtttattttcagagtccattttttcttatgtctttataaggttcacttaacttaaaaacagcttttaaaacaactttttatcttctgtcttgctatcattgttcctacttccctaggaagccctggctacctttcgcattaggaccagtctgggttttaaggctctgggaagcagggttggttagtaaagacaggaatgttggggagaggtgagtagttccttcctctttctcctctccaatttatgcttttaacttattttctacctggataaacttctggaacttggcttttaaatttaacttttctagtttttaagcagtttccaccttgctttggtctaatgcttttctttgaaatgctaacagaattcccaagctttttccagttctagatatctttactagacctttgggggactcttataatggagctgcttttgaaaagcactttaattagataatgtattttgactaaatcacgaggatgcccagtgagagcttctagctgatctcagaggaccagagtgactgagggtaaagtgtctcacagcccatgctgaattttctgcattttaaactgatactgcagtcattggagagagagctcctcatttctcgaatgaaagatgagatatattcatcctcatgtaccacatctgtcttagtgtttgcgtctggggtgtgttatcaaacagagcatggtctacatcccactgtgtcaaccagaagagccaagtgttatctcaattggcccagtgtttctccaggctggggactgttaagggctctaagggaatgtagacagagtctccctgttattctgacttcctgcttgatgagctttcagttcctgtttttgctattgtttcctaaatttgacctacatattacatgggtgtagtgtgttgaggcttttcaaagaagggtctagtgagctaagtttcatcttctggtactcattgatcaaactgacctttctattctcataagcgtttctacccaaagttgtgtgtggaaggagtgtatagcagagaggaaatccctttcaacagagtcagctgctaactgatttcctataagcacactggattaagggcagccacagtggtttctactgtatgtatgaaccgaatggaggaatgttttcaaagattgatttggtgtggattgcaattgtaatggaaggcataacttgggatcccgggctgtaacttgctcttttgtttcccacccccctgacatgtatgtgtgctttaataaagctttctcacttgtc

SEQ ID NO: 30046 - protein, 671 aa, Homo sapiens; identical to SEQ ID NO: 30040

SEQ ID NO: 30047 - DNA, 3997 bp, Homo sapiens
gggagggtgagaagggccggctgccggagctgggttgcgatcttcccggagccggagaccctcccttgaaaccggcactgggacttctcgatctctggaggcacctgttgcaagtgacagcgctcggccgtcgagcggggtcgctaacccgcactctcttcggacctacgacatcgcggcttctctggcgttggccagtcagccacagggaactagtaaaaaaagaaaaagaaaaaataaagtgaaagaggcgtgttgtctagtttcaaaggagaggagagaagagactgagtcgccctgtgttgcccaggctggtcttgaactcctaggctcaagagatcctcctgcctcagcctcccaaagtgctgggattacaggcaactctggtagctctccttgtctggttgttttgaagaaagaagagtagaagaaaaagttgagtaaatcatgtcggagttactggacctttcttttctgtctgaggaggaaaaggatttgattctcagtgttctacagcgagatgaagaggtccggaaagcagatgagaaaaggattaggcgactaaagaatgagttactggagataaaaaggaaaggggccaagaggggcagccaacactacagtgatcggacctgtgcccggtgccaggagagcctgggccgtttgagtcccaaaaccaatacttgtcggggttgtaatcacctggtgtgtcgggactgccgcatacaggaaagcaatggtacctggaggtgcaaggtgtgcgccaaggaaatagagttgaagaaagcaactggggactggttttatgaccagaaagtgaatcgctttgcttaccgcacaggtagtgagataatcaggatgtccctgcgccacaaacctgcagtgagtaaaagagagacagtgggacagtccctccttcatcagacacagatgggtgacatctggccaggaagaaagatcattcaggagcggcagaaggagcccagtgtgctatttgaagtgccaaagctgaaaagtggaaagagtgcattggaagctgagagtgagagtctggatagcttcacagctgactcggatagcacctccaggagagactctctggataaatctggcctctttccagaatggaagaagatgtctgctcccaaatctcaagtagaaaaggaaactcagcctggaggtcaaaatgtggtatttgtggatgagggtgagatgatatttaagaagaacaccagaaaaatcctcaggccttcagagtacactaaatctgtgatagatcttcgcccagaagatgtggtacatgaaagtggctccttgggagacagaagcaaatccgtcccaggcctcaatgtggatatggaagaggaagaagaagaagaagacattgaccacctagtgaagttacatcgccagaagctagccagaagcagcatgcaaagtggctcctccatgagtacgatcggcagcatgatgagcatctacagtgaagctggtgatttcgggaacatctttgtgactggcaggattgccttttccctgaagtatgagcagcaaacccagagtctggttgtccatgtgaaggagtgccatcagctggcctatgctgatgaagccaagaagcgctctaacccatatgtgaagacttaccttctgcctgacaagtcccgccaaggaaaaagaaaaaccagcatcaagcgggacactattaatccactatatgatgagacgctgaggtatgagatcccagaatctctcctggcccagaggaccctgcagttctcagtttggcatcatggtcgttttggcagaaacactttccttggagaggcagagatccagatggattcctggaagcttgataagaaactggatcattgcctccctttacatggaaagatcagtgctgagtccccgactggcttgccatcacacaaaggcgagttggtggtttcattgaaatacatcccagcctccaaaacccctgttggaggtgaccggaaaaagagtaaaggtggggaagggggagagctccaggtgtggatcaaagaagccaagaacttgacggctgccaaagcaggagggacttcagacagctttgtcaagggatacctccttcccatgaggaacaaggccagtaaacgtaaaactcctgtgatgaagaagaccctgaatcctcactacaaccatacatttgtctacaatggtgtgaggctggaagatctacagcatatgtgcctggaactgactgtgtgggaccgggagcccctggccagcaatgacttcctgggaggggtcaggctgggtgttggcactgggatcagtaatggggaagtggtggactggatggactcgactggggaagaagtgagcctgtggcagaagatgcgacagtacccagggtcttgggcagaagggactctgcagctccgttcctcaatggccaagcagaagctgggtttatgagtccctgtcctcttctgcaggtccagccctggcgagggcaggtcagaggaagtgaagaaatcaagagcaaagatttataatttaatgtgtatgtgtgtatgtgtgtatgtgtgtgtgtgtgtgtgtgtgtgtatgtgtacaaacatgtattttctgcaaatctcattatgctggctagagtgatgcagacttgttcttctttttaaagcagtctcaagaataagcatttctttaaaatgtttctgtgtataatctagtttattttcagagtccattttttcttatgtctttataaggttcacttaacttaaaaacagcttttaaaacaactttttatcttctgtcttgctatcattgttcctacttccctaggaagccctggctacctttcgcattaggaccagtctgggttttaaggctctgggaagcagggttggttagtaaagacaggaatgttggggagaggtgagtagttccttcctctttctcctctccaatttatgcttttaacttattttctacctggataaacttctggaacttggcttttaaatttaacttttctagtttttaagcagtttccaccttgctttggtctaatgcttttctttgaaatgctaacagaattcccaagctttttccagttctagatatctttactagacctttgggggactcttataatggagctgcttttgaaaagcactttaattagataatgtattttgactaaatcacgaggatgcccagtgagagcttctagctgatctcagaggaccagagtgactgagggtaaagtgtctcacagcccatgctgaattttctgcattttaaactgatactgcagtcattggagagagagctcctcatttctcgaatgaaagatgagatatattcatcctcatgtaccacatctgtcttagtgtttgcgtctggggtgtgttatcaaacagagcatggtctacatcccactgtgtcaaccagaagagccaagtgttatctcaattggcccagtgtttctccaggctggggactgttaagggctctaagggaatgtagacagagtctccctgttattctgacttcctgcttgatgagctttcagttcctgtttttgctattgtttcctaaatttgacctacatattacatgggtgtagtgtgttgaggcttttcaaagaagggtctagtgagctaagtttcatcttctggtactcattgatcaaactgacctttctattctcataagcgtttctacccaaagttgtgtgtggaaggagtgtatagcagagaggaaatccctttcaacagagtcagctgctaactgatttcctataagcacactggattaagggcagccacagtggtttctactgtatgtatgaaccgaatggaggaatgttttcaaagattgatttggtgtggattgcaattgtaatggaaggcataacttgggatcccgggctgtaacttgctcttttgtttcccacccccctgacatgtatgtgtgctttaataaagctttctcacttgtc

SEQ ID NO: 30048 - protein, 671 aa, Homo sapiens; identical to SEQ ID NO: 30040

SEQ ID NO: 30049 - DNA, 4830 bp, Homo sapiens
ggagggtgagaagggccggctgccggagctgggttgcgatcttcccggagccggagaccctcccttgaaaccggcactgggacttctcgatctctggaggcacctgttgcaagtgacaggcaactctggtagctctccttgtctggttgttttgaagaaagaagagtagaagaaaaagttgagtaaatcatgtcggagttactggacctttcttttctgtctgaggaggaaaaggatttgattctcagtgttctacagcgagatgaagaggtccggaaagcagatgagaaaaggattaggcgactaaagaatgagttactggagataaaaaggaaaggggccaagaggggcagccaacactacagtgatcggacctgtgcccggtgccaggagagcctgggccgtttgagtcccaaaaccaatacttgtcggggttgtaatcacctggtgtgtcgggactgccgcatacaggaaagcaatggtacctggaggtgcaaggtgtgcgccaaggaaatagagttgaagaaagcaactggggactggttttatgaccagaaagtgaatcgctttgcttaccgcacaggtagtgagataatcaggatgtccctgcgccacaaacctgcagtgagtaaaagagagacagtgggacagtccctccttcatcagacacagatgggtgacatctggccaggaagaaagatcattcaggagcggcagaaggagcccagtgtgctatttgaagtgccaaagctgaaaagtggaaagagtgcattggaagctgagagtgagagtctggatagcttcacagctgactcggatagcacctccaggagagactctctggataaatctggcctctttccagaatggaagaagatgtctgctcccaaatctcaagtagaaaaggaaactcagcctggaggtcaaaatgtggtatttgtggatgagggtgagatgatatttaagaagaacaccagaaaaatcctcaggccttcagagtacactaaatctgtgatagatcttcgcccagaagatgtggtacatgaaagtggctccttgggagacagaagcaaatccgtcccaggcctcaatgtggatatggaagaggaagaagaagaagaagacattgaccacctagtgaagttacatcgccagaagctagccagaagcagcatgcaaagtggctcctccatggtaagttctattagatctgtggttacaggcatgttggggtactaggaagaaaagaagcacctccctagagcagattcgggacctggggaaaccatcctagtcactcttttcaggtaagtaagatcatttgtttgttcctatcctcaatttagactataggtgcttagtgtacatctaggtgacttcctgagcccccacctggagattattacattacagcttgggacatttttcatcacagctttgtgaacaataaccttaacttatcctctaaaggggtacccaggctatgaagtgagcaagatcagatttcttcatcatagcccattccaaattctcaacattaaaagaaagtgagtgtcatgagaggggctctggcagggttgatcgacatcagggtatggttaacaagcaataataccagtcaggataatgaatttaaagggaacatttaagaatcagggcctggttctgtcataagcatgaagattgatatttagggaaacaggaacaagggtgaacagaatttgttcacactcacacacaggaagagaatgtcagctcgcatgaccgattactaccagaaaggaaggtgccttttcacttctggtggggtttcctccctcccactcactcccagttctggccaaatctcttttctctgtaggccctgataagacataaggtggataagagaaacccacagataattaaggcaccttgttttagttagtaactaacccccttctagctggtgttttagtgtatataacacattccccagatggacttaactgcaccttgcctctgctccctgcccacctcctggggcaggtgaaaatgaacactaaaatttgtaaaaagagttgaggaagagaagctaagaggctaggtgagccatgagctgattcattcacctgaacaattttgagtgctggtagttctctcttaccctctgggtcaaggaatgtcagcagcactggcttattgcaggggcttctgaaacttctgttcagtgactgtggttttatcatgagggaagatgtgagcaatgcgggcgggggagtgtgccttccccagatgttcgtgggtgctttatcttcagagtacgatcggcagcatgatgagcatctacagtgaagctggtgatttcgggaacatctttgtgactggcaggattgccttttccctgaagtatgagcagcaaacccagagtctggttgtccatgtgaaggagtgccatcagctggcctatgctgatgaagccaagaagcgctctaacccgtgagtgcttctggaacctgactgatgctctgagaccagagaccagaccccggcatctgtccgggcactcttgaacagagcttatctgtttctgggggagcagggaggtgtaatgtaggaaaagaaccaggattgggaaaaagcaagaatggcatgtctaagagggcttgaggtgacatttttgacatcacatgtcaccatggcatatctatatggagaggaggaaagtgaaaagcaggcttgagaaaggccagcaaattactcagtgctgtctttggtttctagatatgtgaagacttaccttctgcctgacaagtcccgccaaggaaaaagaaaaaccagcatcaagcgggacactattaatccactatatgatgagacgctgagggtaagtatctagacctcaagggtaggagaacttgttctgtcttgtgccctaagctgtagctattcctctgcaacatgaccaggtgacacgggcttcagtgggccatgtctgtgtctgaggatacattgggtatctgttcacatcctgatctcccagtgaagagaacaaaggtgatctgcctttcctggattgatgtgaagtttgagattcacatggccacaaatctcatgtaaaaaagacatttgagataaggagtctccttggcagttctttttggacaatccagtgttatctcatccacttaagaaaaaatgaattttccaggtcctcctatggaatatggtaggtttttataaaatgagttaagttgaggctttgagtgaggaaactcaaagtgctcagggaacataaagtaatttggtattcaggactagtgacttcaggaatggttgctcaggttttggaataatcttgtctgaagaattacccttaactaatcatcttgggcttttactttcccttcacagtatgagatcccagaatctctcctggcccagaggaccctgcagttctcagtttggcatcatggtcgttttggcagaaacactttccttggagaggcagagatccagatggattcctggaagcttgataagaaactggatcattgcctccctttacatggaaaggtagtctgctttaacaactcctgcagtttggatctgaggtagaattgtctgcagtagcctctgctggtctatgttggtagcgtctttgaatgtagtcttctctggagttctagtgccccctgctggtgtttctgagtttgacagcaatttcagaggcatttgtctatcaagtgtgagttctgtgtaaaccaggcaaagtgtgaagccatggttttgctttgaaaaaattttcatatgtgtaccaaactttgtctcctaaccttccagaatctgggtgtatcctaacatcctaactcgcacctcttctccgagctaaccttctgtgtatatcctaatctgtacccttttgccaagccactgctttacttccaagtgggaagtaaagcaattcatggagctccaattgctatgctcttggttacagaggccagggaaatattactttggagatggcacctcgggccacagtgtagcagtatggcataatcatgcctgggatctgagtgcagacctgtgttggaatcctggttctgtcacttgccaactagatgagtcacttaactacaaaataatgtagggaaatcatctggctaagaagaaatagctaaaacagaggacttattcagcaacttcttgattatcagaactacacaatgacatgacaaagttcatcttatttttttttacactagcgttttaaatgtgggatggttttacatggtccatagactttgggaagttagatgagaaactagtcatggtggctgcctctaggaatggagactgaggtagaaggaatatttagttttctctatatcccctttttaagcatttgaactttttaccatattaagaaaattaagcaaaaatggacttatgtacacatgattcaaaattaaaacaacataaagtatattaaaaggaaagtaggttccattccttagaaataaccagtgttaacactacttgtgtatccttctagaaattttttatggctaggtatggtggctcacgcctgtaatcccagcacattgggaggcggaggcaggcagatcacctgaggtcaggagttcgagaccaccctgaccaacatggtgaaaccccgtctctactaaatacaaaaaaattagctgggcatggtggcgcaagcctgtaatcccagctacttgggaggctgaggcaggagaatcgcttgaacccatgaggcggaggttgcagtgagccgagattgcgcctttgcactccagcctgggcaaaagagtgaaactctgtctc

SEQ ID NO: 30050 - protein, 349 aa, Homo sapiens
MSELLDLSFLSEEEKDLILSVLQRDEEVRKADEKRIRRLKNELLEIKRKGAKRGSQHYSDRTCARCQESLGRLSPKTNTCRGCNHLVCRDCRIQESNGTWRCKVCAKEIELKKATGDWFYDQKVNRFAYRTGSEIIRMSLRHKPAVSKRETVGQSLLHQTQMGDIWPGRKIIQERQKEPSVLFEVPKLKSGKSALEAESESLDSFTADSDSTSRRDSLDKSGLFPEWKKMSAPKSQVEKETQPGGQNVVFVDEGEMIFKKNTRKILRPSEYTKSVIDLRPEDVVHESGSLGDRSKSVPGLNVDMEEEEEEEDIDHLVKLHRQKLARSSMQSGSSMVSSIRSVVTGMLGY

SEQ ID NO: 30051 - DNA, 743 bp, Homo sapiens
gacttttaaaatagagaccaacgtggccgggcaggaagagcagggtcccgccttcaggtgtttgggactcagctgagggtgtgggtgccccgcggtgggggctgaaccttcctggggtgtggagagacgaaaggagcccagatccaagttccctcgttcccgctttggcataagttgccctggcggtctcatgagagagagaaagagctgggaccctcctcgccccagtgagtgtgatgtcttgctccgggtgtcctggggcaactttctatacaggcgggacgtgggaggatcagacagtgtaacatcagacaagggtgttgactctgcagcacagaaccagtagtttgtggagaagaatggaggtgtggtgttgaatctgctagacaggctactgaagcaaaagtcaagagatccagattccatcatggggacactttagctgttgtaaaaaggattgagttcttgattgattcccagcttggtcattggtgtatagcagtgctactgatttgtttacattcattttgtaacctgagactttactgaattcgtgtatcagatctaggagccttttggttcttcatcgggtaattgagctgatatcaggtgtctgaaggaggcaagttttgaagatgtgggtcatgatggctgctgaagcttccactccatatttgaaggtcagcagttctcaggaaacctctagcacttccatccctggtgggatgtgatgcctgtctcag

SEQ ID NO: 30052 - protein, 51 aa, Homo sapiens
MRERKSWDPPRPSECDVLLRVSWGNFLYRRDVGGSDSVTSDKGVDSAAQNQ

SEQ ID NO: 30053 - DNA, 830 bp, Homo sapiens
gccgggcaggaagagcagggtcccgccttcaggtgtttgggactcagctgagggtgtgggtgccccgcggtgggggctgaaccttcctggggtgtggagagacgaaaggagcccagatccaagttccctcgttcccgctttggcataagttgccctggcggtctcatgagagagagaaagagctgggaccctcctcgccccagtgagtgtgatgtcttgctccgggtgtcctggggcaactttctatacaggcgggacgtgggaggatcagacagtgtaacatcagacaagggtgttgactctgcagcacagaaccagtagtttgtggagaagaatggaggtgtggtgttgaatctgctagacaggctactgaagcaaaagtcaagagatccagattccatcatggggacactttagttcttcatcgggtaattgagctgatatcaggtgtctgaaggaggcaagttttgaagatgtgggtcatgatggctgctgaagcttccactccatatttgaaggtcagcagttctcaggaaacctctagcacttccatccctggtgggatgtgatgcctgtctcagtgtaacatcagagaaggggtgtactctgtgccctagaactaggagctaacagagaaaaaccaaatgtgatgtggagtctgctagacaggctactggagcaagagtgaagcgatgaaagtctcatcattgggacatattagaaaaaatgatggatacagaaggatagctggatgtaagtgaaaagttccagaaaaccatgtctgatcccattaatcaagctcccaactttcatccctccctgcccgctgc

SEQ ID NO: 30054 - protein, 51 aa, Homo sapiens; identical to SEQ ID NO: 30052

SEQ ID NO: 30055 - DNA, 717 bp, Homo sapiens
ggtctcatgagagagagaaagagctgggaccctcctcgccccagtgagtgtgatgtcttgctccgggtgtcctggggcaactttctatacaggcgggacgtgggaggatcagacagtgtaacatcagacaagggtgttgactctgcagcacagaaccagtagtttgtggagaagaatggaggtgtggtgttgaatctgctagacaggctactgaagcaaaagtcaagagatccagattccatcatggggacactttagttcttcatcgggtaattgagctgatatcaggtgtctgaaggaggcaagttttgaagatgtgggtcatgatggctgctgaagcttccactccatatttgaaggtcagcagttctcaggaaacctctagcacttccatccctggtgggatgtgatgcctgtctcagtgtaacatcagagaaggggtgtactctgtgccctagaactaggagctaacagagaaaaaccaaatgtgatgtggagtctgctagacaggctactggagcaagagtgaagcgatgaaagtctcatcattgggacatattagggaggcagcaggtggctgaaatcctggtgtgatgtggctggatcatgcatgatctgaggactcctgcacagatgcagtggatccccaggttgcaagtcatataacctgagcatgcccagatgaaccaagtatgcctgattggtgaacctggaact

SEQ ID NO: 30056 - protein, 51 aa, Homo sapiens; identical to SEQ ID NO: 30052

SEQ ID NO: 30057 - DNA, 2162 bp, Homo sapiens
agatgggagcactcagcttcagtgttcagaagcagatttaggccaattgccataccttacgttctggagggatccaccctgacctgagcagaaggcatcacacacattcccaagcagcatggttcccgtgagaaactgaaaactaatttcttgaatctacaatgcgacttccatcttccaggtgtaaccagagtttttcctggagcgattccagcttgtttccttttggtgccttccttaagaaattttgcagctgtttctggtgcagtttttgggtgggctctggggtgggcagacgatctccactttgcagaggctgctcttgtgagtggagctggtggtgagggagtaggagaggcctcgcatcatcctggcattcaggcccttagccatggagaaggacttgaggtggcttcttaaggtactggggagcgggagcttgtccaccagatgcacaggtgtgcaggacacgatggtgcggcagcagaggtcttgcaagctcagtaccttgctcggcctcccgagccaattcatcctgtgccgcagcagcactatcctggccagctccgtgaaagactctatgatgttgaaattgcacagagggctgacctcaaagaaggtcacacccaggcgctcggcgtaggcctgggcctgctccctgggcacctgcctcttgaatgccagatgtaggcgattccccaccaggattttagggacaccaggggcatgttcctcaatcttcttaatccatcgatccataccctcgaaagaccagcggtttgcaatgtcgtagaccaggatcactccttgtgcaccacgagagtaggagcggaatatggtacaaaatcttccctgccccgacgtatcccagagcttcagcttcacccgctggccgtccagcaggatggtggtcgtcttgtagtcgatccccccgagatggctgtacggggactcagctgcaccatcctgcaggctctccaggatctcactcttgcctacgtccctgtcgcccaccagcaggaacttgagcaggaagtcataggcctggtcggggctgcccggggcgctcatggtgctggccccgcactcccgcctgagccaggcccgcggggttgtgcgcagaggtggtgccgggcctgttcttcttgagaaattagcatagaacataaaaaatgagatggggaagtctgtgaaataaagcgaaatgaggtggtggctttgatggatttcttttacaaaccctaggaaactgattcagcgattgttttcctttttcttacccagcacagagtagtgacacagcagttaattcatcatggaaacctatacatttcccttaaaactttcatgtgatcgttatggaaccatgccttttggattatgtcaaaggaatctcctttaaaggaaggacgggtatgggataggaaagggactaagatgtgttgagtactgtacgtaccctatgctgtgtatgacgcttaaaatattttgttcttttgctttcagaacagttgtctttggtagctataattgtttccattttacaaatgagaaaaggcaaactcagaaatgttatgtaattttttaaaacattgccattaatatagagatcacagaaatcacaatcctgagccagtgctctcctcatataacgcactacacaccctttctactctgtggccatgccgggtttaggagtaagtgtgaactgtctgtgcatgtgatccttgacaagccacgcatgtttacatgggcactaatacttttcttgctgcagggggacatctcccataaatataagagccaagatctcagaagagatatctaggacatggattttgctagagtgtctcataaataatattcacccaacaaagatgtgttgaaataatgcatgcatccatcagtgaagggttttaggtttaacacatgtacagctcctataacaaaataacaaaactgaaaaaatatgtatatggttcacaggtgaagaaacgcaaatggccagtaatcacaagaaaatgcattctagctcactaatacattaaagaatgctaatgaaaccatctaaatatccttttatcacctatcatctgacaaaatttaaatgtagaaaaaaaccgaaaaagaatttttttttaatttgcaaaagaaaaagatgc

SEQ ID NO: 30058 - protein, 140 aa, Homo sapiens [sequence omitted]

SEQ ID NO: 30059 - DNA, 421 bp, Homo sapiens
caagatatgaagctaagggaggaaaacaccaaagatatctctagttatgttgaacatagccaatatggtttcaatggatcaataagaaaaaaccatttcagtaaggaatgaaatacgtacttatttgagaaaatgtttcttaacagtaaaaaagtatatatttttctctttggtaaaacgaaaagagaggaaaaatatgtatagtgtaaccccgcaagatgaggctttgcagaaaaacaatgcaatagaacatggcggggcaggcccattataaggccttaggtgagtcatttcccctgtgttctgagaccttagatgggaaagaaggagaagtggtttccacgtagttactttccaatttacactgttgattattataataattgatattggatgaactgagtaaatataagtccttgta

SEQ ID NO: 30060 - protein, 31 aa, Homo sapiens
MAGQAHYKALGESFPLCSETLDGKEGEVVST

SEQ ID NO: 30061 - DNA, 1345 bp, Homo sapiens
ccaaacatggatcctcatgattttattttctagattggctgataggctgaataatctcctgtagggtaagaagtgtcaactgtatcaagcacatggaggtggactggctacaggagaaagtgtgacgtgggtgaaggagttcttattgagccatgggaggaagaaatagtacagaagagcaaagaataataatgagtcagctagacagaagacaggagtcatcagatttgtaccctagttactcgacccatcaactgactgtggtttttgggaacaggcccggcaccacctctgcgcacaaccccgcgggcctggctcaggcgggagtgcggggccagcaccatgagcgccccgggcagccccgaccaggcctatgacttcctgctcaagttcctgctggtgggcgacagggacgtaggcaagagtgagatcctggagagcctgcaggatggtgcagctgagtccccgtacagccatctcggggggatcgactacaagacgaccaccatcctgctggacggccagcgggtgaagctgaagctctgggatacgtcggggcagggaagattttgtaccatattccgctcctactctcgtggtgcacaaggagtgatcctggtctacgacattgcaaaccgctggtctttcgagggtatggatcgatggattaagaagattgaggaacatgcccctggtgtccctaaaatcctggtggggaatcgcctacatctggcattcaagaggcaggtgcccagggagcaggcccaggcctacgccgagcgcctgggtgtgaccttctttgaggtcagccctctgtgcaatttcaacatcatagagtctttcacggagctggccaggatagtgctgctgcggcacaggatgaattggctcgggaggccgagcaaggtactgagcttgcaagacctctgctgccgcaccatcgtgtcctgcacacctgtgcatctggtggacaagctcccgctccccagtaccttaagaagccacctcaagtccttctccatggctaagggcctgaatgccaggatgatgcgaggcctctcctactccctcaccaccagctccactcacaagagcagcctctgcaaagtggagatcgtctgcccaccccagagcccacccaaaaactgcaccagaaacagctgcaaaatttcttaaggaaggcaccaaaaggaaacaagctggaatcgctccaggaaaaactctggttacacctggaagatggaagtcgcattgtagattcaagaaattagttttcagtttctcacgggaaccatgctgcttgggaatgtgtgtgatgccttctgtcaataaaaacacattacac

SEQ ID NO: 30062 - protein, 74 aa, Homo sapiens
MGGRNSTEEQRIIMSQLDRRQESSDLYPSYSTHQLTVVFGNRPGTTSAHNPAGLAQAGVRGQHHERPGQPRPGL

SEQ ID NO: 30063 - DNA, 1459 bp, Homo sapiens
cagagtttttcctggagcgattccagcttgtttccttttggtgccttccttaagaaattttgcagctgtttctggtgcagtttttgggtgggctctggggtgggcagacgatctccactttgcagaggctgctcttgtgagtggagctggtggtgagggagtaggagaggcctcgcatcatcccgctggccgtccagcaggatggtggtcgtcttgtagtcgatccccccgagatggctgtacggggactcagctgcaccatcctgcaggctctccaggatctcactcttgcctacgtccctgtcgcccaccagcaggaacttgagcaggaagtcataggcctggtcggggctgcccggggcgctcatggtgctggccccgcactcccgcctgagccaggcccgcggggttgtgcgcagaggtggtgccgggcctgttcttcttgagaaattagcatagaacataaaaaatgagatggggaagtctgtgaaataaagcgaaatgaggtggtggctttgatggatttcttttacaaaccctaggaaactgattcagcgattgttttcctttttcttacccagcacagagtagtgacacagcagttaattcatcatggaaacctatacatttcccttaaaactttcatgtgatcgttatggaaccatgccttttggattatgtcaaaggaatctcctttaaaggaaggacgggtatgggataggaaagggactaagatgtgttgagtactgtacgtaccctatgctgtgtatgacgcttaaaatattttgttcttttgctttcagaacagttgtctttggtagctataattgtttccattttacaaatgagaaaaggcaaactcagaaatgttatgtaattttttaaaacattgccattaatatagagatcacagaaatcacaatcctgagccagtgctctcctcatataacgcactacacaccctttctactctgtggccatgccgggtttaggagtaagtgtgaactgtctgtgcatgtgatccttgacaagccacgcatgtttacatgggcactaatacttttcttgctgcagggggacatctcccataaatataagagccaagatctcagaagagatatctaggacatggattttgctagagtgtctcataaataatattcacccaacaaagatgtgttgaaataatgcatgcatccatcagtgaagggttttaggtttaacacatgtacagctcctataacaaaataacaaaactgaaaaaatatgtatatggttcacaggtgaagaaacgcaaatggccagtaatcacaagaaaatgcattctagctcactaatacattaaagaatgctaatgaaaccatctaaatatccttttatcacctatcatctgacaaaatttaaatgtagaaaaaaaccgaaaaagaatttttttttaatttgcaaaagaaaaagatgc

SEQ ID NO: 30064 - protein, 70 aa, Homo sapiens
MAVRGLSCTILQALQDLTLAYVPVAHQQELEQEVIGLVGAARGAHGAGPALPPEPGPRGCAQRWCRACSS

SEQ ID NO: 30065 - DNA, 472 bp, Homo sapiens
ggttttctcattaacccctcaggacagctctgtaaggatggtatggtcagtccaatttcacagataatcaggctcagactcacagagtctaaaccacctaaagtggcaggactggaatgaggttccatctctcaccctccctagaggaccctgagcagcctcccttttaaaagatgggcatccagggattgagaaacggtcagattccattgccctgctattatggcctcatgcatcctcactccacagcccctctgggtgaggaagaagacagagagatgatatcctgccccttgtgctgagagacctggttgttaggccgcatgaattggctgatccctgaagtgaaacagtgtctcactatgttgcccaggcttgtcttgaattcctgacctcaagtgatcctcccacatcagccttccaaagtgctgggattacaggtctctgaatgctctaatctccctcctggctg

SEQ ID NO: 30066 - protein, 42 aa, Homo sapiens
MGIQGLRNGQIPLPCYYGLMHPHSTAPLGEEEDREMISCPLC

SEQ ID NO: 30067 - DNA, 502 bp, Homo sapiens
tttcttgggcatcatgaatgattttcttatcgacatctttgagcacatcaccaccaaggctggctgccaggttgctacactgagtgctccactatcacctccagagagatccagaccacccgagcctgatgctgtctggggatatccacaaacacgctgtattgaaaaccaaagggctctgagacagtcctcctttcttgaggagacaaactccagcctgtgactgattgcagagtcttctggcaagcttcagagtaaaacaaaaactatttgtggatgacaaaggcttaaaatgggactgtggttaattttttgatggtaattttcggaagtgaaagaactgatgtgtctataacaggaataatgcaatcgacagaaaatttggttatttctgtgacacaaaggtaataaagttaatccacaaagttttaaacacaatgtatttaaagatagtcattatacagattttcagtgaagacagtgaatattacatctgatttac

SEQ ID NO: 30068 - protein, 69 aa, Homo sapiens
MNDFLIDIFEHITTKAGCQVATLSAPLSPPERSRPPEPDAVWGYPQTRCIENQRALRQSSFLEETNSSL

SEQ ID NO: 30069 - DNA, 1502 bp, Homo sapiens
ttggtctaagacatgggctgacaaactttttccataaagggccagaaagtaaatatttcaggctttgtgggatatctatttatgatttattttactcctagtattatttcatcttttatacaggttattaaggttagtattgctgcataacaaattactccaaaatttaatcatttatattcaagaagagttcagctgctaggttcttattttgggactctcatgatgctgaggtcaagatgccagctggaggccaggcgccgcagctcacgcctgtaatcccagcgttttgggaggccaggggcctcccaaattcaaaaggaagagacaaagtccacatctgtcaatgcgaagaatggaaaggtcacatatcatatgtggagcgggacataacaacttcggaaattaaatctcttccccaggtcagtgtgcgggccttccacgctgccagcggaacactggaatggcggaaggggaacgggtacggcagggggaaaggctgggggtggggtcgggtcgagtcgagggaagctggcccgagtgtggacagagatggcggtctgcgcgtctgttgttcccagcgctctgcgaagcctgaaaaggaggagcaacctgtccagaatccccgcaggacaggaaaaggaggggaaatctcgacatggaaaaactctacagtgaaaatgaaggaatggcttcaaaccaaggaaagatggaaaatgaagaacagccacaagacgagagaaagccagaagtaacttgtactctggaagacaagaagttagaaaacgagggaaagacagaaaacaagggcaaaacaggagatgaggaaatgttaaaggataaaggaaagccagagagtgagggagaggcaaaagaaggaaagtcagagagggagggagagtcagagatggagggaggatcagagagagagggaaaaccagagatagagggaaagccagagagtgaaggagagccagggagtgaaacaagggctgcaggaaagcgcccagctgaggatgatgtacccaggaaagccaaaagaaaaactaataaggggctggctcattacctcaaggagtataaagaggccatacatgatatgaatttcagcaatgaggacatgataagagaatttgacaatatggctaaggtgcaggatgagaagagaaaaagcaaacagaaattgggggcgtttttgtggatgcaaagaaatttacaggaccccttctaccctagaggtccaagggaattcaggggtggctgcagggccccacgaagggacattgaagacattccttatgtgtagtgtccctggcaggcatttaccaggccatgtgctttaacgttacggtaatactttactttaggcatccctcctgttgctagcagccttttgacctatctgcaatgcagtgttctcagtaggaaatgttcatctgttacatggaaaaaatgttgatggtgcattgtaaaattaaaaaacacaacttgcagaaccaaat

SEQ ID NO: 30070 - protein, 171 aa, Homo sapiens
MPAGGQAPQLTPVIPAFWEARGLPNSKGRDKVHICQCEEWKGHISYVERDITTSEIKSLPQVSVRAFHAASGTLEWRKGNGYGRGKGWGWGRVESREAGPSVDRDGGLRVCCSQRSAKPEKEEQPVQNPRRTGKGGEISTWKNSTVKMKEWLQTKERWKMKNSHKTRESQK

SEQ ID NO: 30071 - DNA, 1717 bp, Homo sapiens
ttggtctaagacatgggctgacaaactttttccataaagggccagaaagtaaatatttcaggctttgtgggatatctatttatgatttattttactcctagtattatttcatcttttatacaggttattaaggttagtattgctgcataacaaattactccaaaatttaatcatttatattcaagaagagttcagctgctaggttcttattttgggactctcatgatgctgaggtcaagatgccagctggaggccaggcgccgcagctcacgcctgtaatcccagcgttttgggaggccaggggcctcccaaattcaaaaggaagagacaaagtccacatctgtcaatgcgaagaatggaaaggtcacatatcatatgtggagcgggacataacaacttcggaaattaaatctcttccccaggtcagtgtgcgggccttccacgctgccagcggaacactggaatggcggaaggggaacgggtacggcagggggaaaggctgggggtggggtcgggtcgagtcgagggaagctggcccgagtgtggacagagatggcggtctgcgcgtctgttgttcccagcgctctgcgaagcctgaaaaggaggagcaacctgtccagaatccccgcaggacaggaaaaggaggggaaatctcgacatggaaaaactctacagtgaaaatgaaggaatggcttcaaaccaaggaaagatggaaaatgaagaacagccacaagacgagagaaagccagaagtaacttgtactctggaagacaagaagttagaaaacgagggaaagacagaaaacaagggcaaaacaggagatgaggaaatgttaaaggataaaggaaagccagagagtgagggagaggcaaaagaaggaaagtcagagagggagggagagtcagagatggagggaggatcagagagagagggaaaaccagagatagagggaaagccagagagtgaaggagagccagggagtgaaacaagggctgcaggaaagcgcccagctgaggatgatgtacccaggaaagccaaaagaaaaactaataaggggctggctcattacctcaaggagtataaagaggccatacatgatatgaatttcagcaatgaggacatgataagagaatttgacaatatggctaaggtgcaggatgagaagagaaaaagcaaacagaaattgggggcgtttttgtggatgcaaagaaatttacaggaccccttctaccctagaggtccaagggaattcaggggtggctgcagggccccacgaagggacattgaagacattccttatgtgtagtgtccctggcaggcatttaccaggccatgtgctttaacgttacggtaatactttactttaggcatccctcctgttgctagcagccttttgacctatctgcaatgcagtgttctcagtaggaaatgttcatctgttacatggaaaaaatgttgatggtgcattgtaaaattaaaaaacacaacttgcagaaccaaatatatggcatcagtacatttttgtaaaactacaaagatacttacctagtaatatagtatagaaaacaattctgaaagctgtgtccactaaaagattaacagtggttatctctgggtgattttttctgttcttttttgttcatctgtccatttttctcctaaaaacagatttctttagtcataaaaataataaaatataaagtattggaaaacagtg

SEQ ID NO: 30072 - protein, 171 aa, Homo sapiens; identical to SEQ ID NO: 30070

SEQ ID NO: 30073 - DNA, 1136 bp, Homo sapiens
gggctgcggcattcacgtgatctgcacgggcgcagatgtaggcaccggtccgagtgcctgccctctgtccccgcggctgggtctcgtctgctccggttcctgggctcctaattcttggtccagcttcttccaggtcagtgtgcgggccttccacgctgccagcggaacactggaatggcggaaggggaacgggtctgcgcgtctgttgttcccagcgctctgcgaagcctgaaaaggaggagcaacctgtccagaatccccgcaggacaggaaaaggaggggaaatctcgacatggaaaaactctacagtgaaaatgaaggaatggcttcaaaccaaggaaagatggaaaatgaagaacagccacaagacgagagaaagccagaagtaacttgtactctggaagacaagaagttagaaaacgagggaaagacagaaaacaagggcaaaacaggagatgaggaaatgttaaaggataaaggaaagccagagagtgagggagaggcaaaagaaggaaagtcagagagggagggagagtcagagatggagggaggatcagagagagagggaaaaccagagatagagggaaagccagagagtgaaggagagccagggagtgaaacaagggctgcaggaaagcgcccagctgaggatgatgtacccaggaaagccaaaagaaaaactaataaggggctggctcattacctcaaggagtataaagaggccatacatgatatgaatttcagcaatgaggacatgataagagaatttgacaatatggctaaggtgcaggatgagaagagaaaaagcaaacagaaattgggggcgtttttgtggatgcaaagaaatttacaggaccccttctaccctagaggtccaagggaattcaggggtggctgcagggccccacgaagggacattgaagacattccttatgtgtagtgtccctggcaggcatttaccaggccatgtgctttaacgttacggtaatactttactttaggcatccctcctgttgctagcagccttttgacctatctgcaatgcagtgttctcagtaggaaatgttcatctgttacatggaaaaaatgttgatggtgcattgtaaaattaaaaaacacaacttgcagaaccaaat

SEQ ID NO: 30074 - protein, 45 aa, Homo sapiens
MAEGERVCASVVPSALRSLKRRSNLSRIPAGQEKEGKSRHGKTLQ

SEQ ID NO: 30075 - DNA, 1077 bp, Homo sapiens
gggctgcggcattcacgtgatctgcacgggcgcagatgtaggcaccggtccgagtgcctgccctctgtccccgcggctgggtctcgtctgctccggttcctgggctcctaattcttggtccagcttcttccaggtctgcgcgtctgttgttcccagcgctctgcgaagcctgaaaaggaggagcaacctgtccagaatccccgcaggacaggaaaaggaggggaaatctcgacatggaaaaactctacagtgaaaatgaaggaatggcttcaaaccaaggaaagatggaaaatgaagaacagccacaagacgagagaaagccagaagtaacttgtactctggaagacaagaagttagaaaacgagggaaagacagaaaacaagggcaaaacaggagatgaggaaatgttaaaggataaaggaaagccagagagtgagggagaggcaaaagaaggaaagtcagagagggagggagagtcagagatggagggaggatcagagagagagggaaaaccagagatagagggaaagccagagagtgaaggagagccagggagtgaaacaagggctgcaggaaagcgcccagctgaggatgatgtacccaggaaagccaaaagaaaaactaataaggggctggctcattacctcaaggagtataaagaggccatacatgatatgaatttcagcaatgaggacatgataagagaatttgacaatatggctaaggtgcaggatgagaagagaaaaagcaaacagaaattgggggcgtttttgtggatgcaaagaaatttacaggaccccttctaccctagaggtccaagggaattcaggggtggctgcagggccccacgaagggacattgaagacattccttatgtgtagtgtccctggcaggcatttaccaggccatgtgctttaacgttacggtaatactttactttaggcatccctcctgttgctagcagccttttgacctatctgcaatgcagtgttctcagtaggaaatgttcatctgttacatggaaaaaatgttgatggtgcattgtaaaattaaaaaacacaacttgcagaaccaaat

SEQ ID NO: 30076 - protein, 215 aa, Homo sapiens; identical to SEQ ID NO: 4153

SEQ ID NO: 30077 - DNA, 969 bp, Homo sapiens
gctgcggcattcacgtgatctgcacgggcgcagatgtaggcaccggtccgagtgcctgccctctgtccccgcggctgggtctcgtctgctccggttcctgggctcctaattcttggtccagcttcttccaggtctgcgcgtctgttgttcccagcgctctgcgaagcctgaaaaggaggagcaacctgtccagaatccccgcaggacaggaaaaggaggggaaatctcgacatggaaaaactctacagtgaaaatgaaggaatggcttcaaaccaaggaaagatggaaaatgaagaacagccacaagacgagagaaagccagaagtaacttgtactctggaagacaagaagttagaaaacgagggaaagacagaaaacaagggcaaaacaggagatgaggaaatgttaaaggataaaggaaaccagagagtgaaggagagccagggagtgaaacaagggctgcaggaaagcgcccagctgaggatgatgtacccaggaaagccaaaagaaaaactaataaggggctggctcattacctcaaggagtataaagaggccatacatgatatgaatttcagcaatgaggacatgataagagaatttgacaatatggctaaggtgcaggatgagaagagaaaaagcaaacagaaattgggggcgtttttgtggatgcaaagaaatttacaggaccccttctaccctagaggtccaagggaattcaggggtggctgcagggccccacgaagggacattgaagacattccttatgtgtagtgtccctggcaggcatttaccaggccatgtgctttaacgttacggtaatactttactttaggcatccctcctgttgctagcagccttttgacctatctgcaatgcagtgttctcagtaggaaatgttcatctgttacatggaaaaaatgttgatggtgcattgtaaaattaaaaaacacaacttgcagaaccaaat

SEQ ID NO: 30078 - protein, 112 aa, Homo sapiens
MEKLYSENEGMASNQGKMENEEQPQDERKPEVTCTLEDKKLENEGKTENKGKTGDEEMLKDKGNQRVKESQGVKQGLQESAQLRMMYPGKPKEKLIRGWLITSRSIKRPYMI

SEQ ID NO: 30079 - DNA, 1184 bp, Homo sapiens
gctgcggcattcacgtgatctgcacgggcgcagatgtaggcaccggtccgagtgcctgccctctgtccccgcggctgggtctcgtctgctccggttcctgggctcctaattcttggtccagcttcttccaggtctgcgcgtctgttgttcccagcgctctgcgaagcctgaaaaggaggagcaacctgtccagaatccccgcaggacaggaaaaggaggggaaatctcgacatggaaaaactctacagtgaaaatgaaggaatggcttcaaaccaaggaaagatggaaaatgaagaacagccacaagacgagagaaagccagaagtaacttgtactctggaagacaagaagttagaaaacgagggaaagacagaaaacaagggcaaaacaggagatgaggaaatgttaaaggataaaggaaaccagagagtgaaggagagccagggagtgaaacaagggctgcaggaaagcgcccagctgaggatgatgtacccaggaaagccaaaagaaaaactaataaggggctggctcattacctcaaggagtataaagaggccatacatgatatgaatttcagcaatgaggacatgataagagaatttgacaatatggctaaggtgcaggatgagaagagaaaaagcaaacagaaattgggggcgtttttgtggatgcaaagaaatttacaggaccccttctaccctagaggtccaagggaattcaggggtggctgcagggccccacgaagggacattgaagacattccttatgtgtagtgtccctggcaggcatttaccaggccatgtgctttaacgttacggtaatactttactttaggcatccctcctgttgctagcagccttttgacctatctgcaatgcagtgttctcagtaggaaatgttcatctgttacatggaaaaaatgttgatggtgcattgtaaaattaaaaaacacaacttgcagaaccaaatatatggcatcagtacatttttgtaaaactacaaagatacttacctagtaatatagtatagaaaacaattctgaaagctgtgtccactaaaagattaacagtggttatctctgggtgattttttctgttcttttttgttcatctgtccatttttctcctaaaaacagatttctttagtcataaaaataataaaatataaagtattggaaaacagtg

SEQ ID NO: 30080 - protein, 112 aa, Homo sapiens; identical to SEQ ID NO: 30078

SEQ ID NO: 30081 - DNA, 1285 bp, Homo sapiens
ggcattcacgtgatctgcacgggcgcagatgtaggcaccggtccgagtgcctgccctctgtccccgcggctgggtctcgtctgctccggttcctgggctcctaattcttggtccagcttcttccaggtctgcgcgtctgttgttcccagcgctctgcgaagcctgaaaaggaggagcaacctgtccagaatccccgcaggacaggaaaaggaggggaaatctcgacatggaaaaactctacagtgaaaatgaaggaatggcttcaaaccaaggaaagatggaaaatgaagaacagccacaagacgagagaaagccagaagtaacttgtactctggaagacaagaagttagaaaacgagggaaagacagaaaacaagggcaaaacaggagatgaggaaatgttaaaggataaaggaaagccagagagtgagggagaggcaaaagaaggaaagtcagagagggagggagagtcagagatggagggaggatcagagagagagggaaaaccagagatagagggaaagccagagagtgaaggagagccagggagtgaaacaagggctgcaggaaagcgcccagctgaggatgatgtacccaggaaagccaaaagaaaaactaataaggggctggctcattacctcaaggagtataaagaggccatacatgatatgaatttcagcaatgaggacatgataagagaatttgacaatatggctaaggtgcaggatgagaagagaaaaagcaaacagaaattgggggcgtttttgtggatgcaaagaaatttacaggaccccttctaccctagaggtccaagggaattcaggggtggctgcagggccccacgaagggacattgaagacattccttatgtgtagtgtccctggcaggcatttaccaggccatgtgctttaacgttacggtaatactttactttaggcatccctcctgttgctagcagccttttgacctatctgcaatgcagtgttctcagtaggaaatgttcatctgttacatggaaaaaatgttgatggtgcattgtaaaattaaaaaacacaacttgcagaaccaaatatatggcatcagtacatttttgtaaaactacaaagatacttacctagtaatatagtatagaaaacaattctgaaagctgtgtccactaaaagattaacagtggttatctctgggtgattttttctgttcttttttgttcatctgtccatttttctcctaaaaacagatttctttagtcataaaaataataaaatataaagtattggaaaacagtg

SEQ ID NO: 30082 - protein, 215 aa, Homo sapiens; identical to SEQ ID NO: 4153

SEQ ID NO: 30083 - DNA, 384 bp, Homo sapiens
cacgtgatctgcacgggcgcagatgtaggcaccggtccgagtgcctgccctctgtccccgcggctgggtctcgtctgctccggttcctgggctcctaattcttggtccagcttcttccaggtctgcgcgtctgttgttcccagcgctctgcgaagcctgaaaaggaggagcaacctgtccagaatccccgcaggtccgtgaaagtacggggctgcatggacaggggcccacaagggttgagagtgtggagggcccggccagggccgaattggggcctttcccattcccccacccacatgaacacacaccttaccaggctgaaccagtgcagagaaagtggcagagcctgtcaggcaatggctggctcacgtgtgtgggaggagt

SEQ ID NO: 30084 - protein, 55 aa, Homo sapiens
MDRGPQGLRVWRARPGPNWGLSHSPTHMNTHLTRLNQCRESGRACQAMAGSRVWE

SEQ ID NO: 30085 - DNA, 896 bp, Homo sapiens
ctgcacgggcgcagatgtaggcaccggtccgagtgcctgccctctgtccccgcggctgggtctcgtctgctccggttcctgggctcctaattcttggtccagcttcttccaggtctgcgcgtctgttgttcccagcgctctgcgaagcctgaaaaggaggagcaacctgtccagaatccccgcaggacaggaaaaggaggggaaatctcgacatggaaaaactctacagtgaaaatgaaggaatggcttcaaaccaaggaaagatggaaaatgaagaacagccacaagacgagagaaagccagaagtaacttgtactctggaagacaagaagttagaaaacgaggaaagccagagagtgaaggagagccagggagtgaaacaagggctgcaggaaagcgcccagctgaggatgatgtacccaggaaagccaaaagaaaaactaataaggggctggctcattacctcaaggagtataaagaggccatacatgatatgaatttcagcaatgaggacatgataagagaatttgacaatatggctaaggtgcaggatgagaagagaaaaagcaaacagaaattgggggcgtttttgtggatgcaaagaaatttacaggaccccttctaccctagaggtccaagggaattcaggggtggctgcagggccccacgaagggacattgaagacattccttatgtgtagtgtccctggcaggcatttaccaggccatgtgctttaacgttacggtaatactttactttaggcatccctcctgttgctagcagccttttgacctatctgcaatgcagtgttctcagtaggaaatgttcatctgttacatggaaaaaatgttgatggtgcattgtaaaattaaaaaacacaacttgcagaaccaaat

SEQ ID NO: 30086 - protein, 94 aa, Homo sapiens
MEKLYSENEGMASNQGKMENEEQPQDERKPEVTCTLEDKKLENEESQRVKESQGVKQGLQESAQLRMMYPGKPKEKLIRGWLITSRSIKRPYMI

SEQ ID NO: 30087 - DNA, 1111 bp, Homo sapiens
ctgcacgggcgcagatgtaggcaccggtccgagtgcctgccctctgtccccgcggctgggtctcgtctgctccggttcctgggctcctaattcttggtccagcttcttccaggtctgcgcgtctgttgttcccagcgctctgcgaagcctgaaaaggaggagcaacctgtccagaatccccgcaggacaggaaaaggaggggaaatctcgacatggaaaaactctacagtgaaaatgaaggaatggcttcaaaccaaggaaagatggaaaatgaagaacagccacaagacgagagaaagccagaagtaacttgtactctggaagacaagaagttagaaaacgaggaaagccagagagtgaaggagagccagggagtgaaacaagggctgcaggaaagcgcccagctgaggatgatgtacccaggaaagccaaaagaaaaactaataaggggctggctcattacctcaaggagtataaagaggccatacatgatatgaatttcagcaatgaggacatgataagagaatttgacaatatggctaaggtgcaggatgagaagagaaaaagcaaacagaaattgggggcgtttttgtggatgcaaagaaatttacaggaccccttctaccctagaggtccaagggaattcaggggtggctgcagggccccacgaagggacattgaagacattccttatgtgtagtgtccctggcaggcatttaccaggccatgtgctttaacgttacggtaatactttactttaggcatccctcctgttgctagcagccttttgacctatctgcaatgcagtgttctcagtaggaaatgttcatctgttacatggaaaaaatgttgatggtgcattgtaaaattaaaaaacacaacttgcagaaccaaatatatggcatcagtacatttttgtaaaactacaaagatacttacctagtaatatagtatagaaaacaattctgaaagctgtgtccactaaaagattaacagtggttatctctgggtgattttttctgttcttttttgttcatctgtccatttttctcctaaaaacagatttctttagtcataaaaataataaaatataaagtattggaaaacagtg

SEQ ID NO: 30088 - protein, 94 aa, Homo sapiens; identical to SEQ ID NO: 30086

SEQ ID NO: 30089 - DNA, 976 bp, Homo sapiens
gcacgggcgcagatgtaggcaccggtccgagtgcctgccctctgtccccgcggctgggtctcgtctgctccggttcctgggctcctaattcttggtccagcttcttccaggaaaaggaggggaaatctcgacatggaaaaactctacagtgaaaatgaaggaatggcttcaaaccaaggaaagatggaaaatgaagaacagccacaagacgagagaaagccagaagtaacttgtactctggaagacaagaagttagaaaacgagggaaagacagaaaacaagggcaaaacaggagatgaggaaatgttaaaggataaaggaaagccagagagtgagggagaggcaaaagaaggaaagtcagagagggagggagagtcagagatggagggaggatcagagagagagggaaaaccagagatagagggaaagccagagagtgaaggagagccagggagtgaaacaagggctgcaggaaagcgcccagctgaggatgatgtacccaggaaagccaaaagaaaaactaataaggggctggctcattacctcaaggagtataaagaggccatacatgatatgaatttcagcaatgaggacatgataagagaatttgacaatatggctaaggtgcaggatgagaagagaaaaagcaaacagaaattgggggcgtttttgtggatgcaaagaaatttacaggaccccttctaccctagaggtccaagggaattcaggggtggctgcagggccccacgaagggacattgaagacattccttatgtgtagtgtccctggcaggcatttaccaggccatgtgctttaacgttacggtaatactttactttaggcatccctcctgttgctagcagccttttgacctatctgcaatgcagtgttctcagtaggaaatgttcatctgttacatggaaaaaatgttgatggtgcattgtaaaattaaaaaacacaacttgcagaaccaaat

SEQ ID NO: 30090 - protein, 215 aa, Homo sapiens; identical to SEQ ID NO: 4153

SEQ ID NO: 30091 - DNA, 1191 bp, Homo sapiens
gcacgggcgcagatgtaggcaccggtccgagtgcctgccctctgtccccgcggctgggtctcgtctgctccggttcctgggctcctaattcttggtccagcttcttccaggaaaaggaggggaaatctcgacatggaaaaactctacagtgaaaatgaaggaatggcttcaaaccaaggaaagatggaaaatgaagaacagccacaagacgagagaaagccagaagtaacttgtactctggaagacaagaagttagaaaacgagggaaagacagaaaacaagggcaaaacaggagatgaggaaatgttaaaggataaaggaaagccagagagtgagggagaggcaaaagaaggaaagtcagagagggagggagagtcagagatggagggaggatcagagagagagggaaaaccagagatagagggaaagccagagagtgaaggagagccagggagtgaaacaagggctgcaggaaagcgcccagctgaggatgatgtacccaggaaagccaaaagaaaaactaataaggggctggctcattacctcaaggagtataaagaggccatacatgatatgaatttcagcaatgaggacatgataagagaatttgacaatatggctaaggtgcaggatgagaagagaaaaagcaaacagaaattgggggcgtttttgtggatgcaaagaaatttacaggaccccttctaccctagaggtccaagggaattcaggggtggctgcagggccccacgaagggacattgaagacattccttatgtgtagtgtccctggcaggcatttaccaggccatgtgctttaacgttacggtaatactttactttaggcatccctcctgttgctagcagccttttgacctatctgcaatgcagtgttctcagtaggaaatgttcatctgttacatggaaaaaatgttgatggtgcattgtaaaattaaaaaacacaacttgcagaaccaaatatatggcatcagtacatttttgtaaaactacaaagatacttacctagtaatatagtatagaaaacaattctgaaagctgtgtccactaaaagattaacagtggttatctctgggtgattttttctgttcttttttgttcatctgtccatttttctcctaaaaacagatttctttagtcataaaaataataaaatataaagtattggaaaacagtg

SEQ ID NO: 30092 - protein, 215 aa, Homo sapiens; identical to SEQ ID NO: 4153

SEQ ID NO: 30093 - DNA, 1295 bp, Homo sapiens
gcagatgtaggcaccggtccgagtgcctgccctctgtccccgcggctgggtctcgtctgctccggttcctgggctcctaattcttggtccagcttcttccaggcacatcctcttctctgccctccgtccattttggagccggagatggtgggctggggccgccccagtagtgagacagtggaagtaaaccccatctgccgttcccgtgcgtagagaaaaacgttgaccgcgaggctggggaggagagttgcctctgaggaagaagggcacagagacccaaaattagtttggaaagcatcctgatttggtgcccgaggcctggaaagaaatggcggctggggtgcggcggaggtctgcgcgtctgttgttcccagcgctctgcgaagcctgaaaaggaggagcaacctgtccagaatccccgcaggacaggaaaaggaggggaaatctcgacatggaaaaactctacagtgaaaatgaaggaatggcttcaaaccaaggaaagatggaaaatgaagaacagccacaagacgagagaaagccagaagtaacttgtactctggaagacaagaagttagaaaacgagggaaagacagaaaacaagggcaaaacaggagatgaggaaatgttaaaggataaaggaaagccagagagtgagggagaggcaaaagaaggaaagtcagagagggagggagagtcagagatggagggaggatcagagagagagggaaaaccagagatagagggaaagccagagagtgaaggagagccagggagtgaaacaagggctgcaggaaagcgcccagctgaggatgatgtacccaggaaagccaaaagaaaaactaataaggggctggctcattacctcaaggagtataaagaggccatacatgatatgaatttcagcaatgaggacatgataagagaatttgacaatatggctaaggtgcaggatgagaagagaaaaagcaaacagaaattgggggcgtttttgtggatgcaaagaaatttacaggaccccttctaccctagaggtccaagggaattcaggggtggctgcagggccccacgaagggacattgaagacattccttatgtgtagtgtccctggcaggcatttaccaggccatgtgctttaacgttacggtaatactttactttaggcatccctcctgttgctagcagccttttgacctatctgcaatgcagtgttctcagtaggaaatgttcatctgttacatggaaaaaatgttgatggtgcattgtaaaattaaaaaacacaacttgcagaaccaaat

SEQ ID NO: 30094 - protein, 215 aa, Homo sapiens; identical to SEQ ID NO: 4153

SEQ ID NO: 30095 - DNA, 1510 bp, Homo sapiens
gcagatgtaggcaccggtccgagtgcctgccctctgtccccgcggctgggtctcgtctgctccggttcctgggctcctaattcttggtccagcttcttccaggcacatcctcttctctgccctccgtccattttggagccggagatggtgggctggggccgccccagtagtgagacagtggaagtaaaccccatctgccgttcccgtgcgtagagaaaaacgttgaccgcgaggctggggaggagagttgcctctgaggaagaagggcacagagacccaaaattagtttggaaagcatcctgatttggtgcccgaggcctggaaagaaatggcggctggggtgcggcggaggtctgcgcgtctgttgttcccagcgctctgcgaagcctgaaaaggaggagcaacctgtccagaatccccgcaggacaggaaaaggaggggaaatctcgacatggaaaaactctacagtgaaaatgaaggaatggcttcaaaccaaggaaagatggaaaatgaagaacagccacaagacgagagaaagccagaagtaacttgtactctggaagacaagaagttagaaaacgagggaaagacagaaaacaagggcaaaacaggagatgaggaaatgttaaaggataaaggaaagccagagagtgagggagaggcaaaagaaggaaagtcagagagggagggagagtcagagatggagggaggatcagagagagagggaaaaccagagatagagggaaagccagagagtgaaggagagccagggagtgaaacaagggctgcaggaaagcgcccagctgaggatgatgtacccaggaaagccaaaagaaaaactaataaggggctggctcattacctcaaggagtataaagaggccatacatgatatgaatttcagcaatgaggacatgataagagaatttgacaatatggctaaggtgcaggatgagaagagaaaaagcaaacagaaattgggggcgtttttgtggatgcaaagaaatttacaggaccccttctaccctagaggtccaagggaattcaggggtggctgcagggccccacgaagggacattgaagacattccttatgtgtagtgtccctggcaggcatttaccaggccatgtgctttaacgttacggtaatactttactttaggcatccctcctgttgctagcagccttttgacctatctgcaatgcagtgttctcagtaggaaatgttcatctgttacatggaaaaaatgttgatggtgcattgtaaaattaaaaaacacaacttgcagaaccaaatatatggcatcagtacatttttgtaaaactacaaagatacttacctagtaatatagtatagaaaacaattctgaaagctgtgtccactaaaagattaacagtggttatctctgggtgattttttctgttcttttttgttcatctgtccatttttctcctaaaaacagatttctttagtcataaaaataataaaatataaagtattggaaaacagtg

SEQ ID NO: 30096 - protein, 215 aa, Homo sapiens; identical to SEQ ID NO: 4153

SEQ ID NO: 30097 - DNA, 1349 bp, Homo sapiens
tgtaggcaccggtccgagtgcctgccctctgtccccgcggctgggtctcgtctgctccggttcctgggctcctaattcttggtccagcttcttccaggtcagtgtgcgggccttccacgctgccagcggaacactggaatggcggaaggggaacggagaaaaacgttgaccgcgaggctggggaggagagttgcctctgaggaagaagggcacagagacccaaaattagtttggaaagcatcctgatttggtgcccgaggcctggaaagaaatggcggctggggtgcggcggaggtaggggaggaaaacgttggatgagaagggcctggactcaggaaagggaaccgcgtccgtgtgagcccgctgagcgcgcagaccctgcccctgtctcctgtctgtctgcaggtctgcgcgtctgttgttcccagcgctctgcgaagcctgaaaaggaggagcaacctgtccagaatccccgcaggacaggaaaaggaggggaaatctcgacatggaaaaactctacagtgaaaatgaaggaatggcttcaaaccaaggaaagatggaaaatgaagaacagccacaagacgagagaaagccagaagtaacttgtactctggaagacaagaagttagaaaacgagggaaagacagaaaacaagggcaaaacaggagatgaggaaatgttaaaggataaaggaaagccagagagtgagggagaggcaaaagaaggaaagtcagagagggagggagagtcagagatggagggaggatcagagagagagggaaaaccagagatagagggaaagccagagagtgaaggagagccagggagtgaaacaagggctgcaggaaagcgcccagctgaggatgatgtacccaggaaagccaaaagaaaaactaataaggggctggctcattacctcaaggagtataaagaggccatacatgatatgaatttcagcaatgaggacatgataagagaatttgacaatatggctaaggtgcaggatgagaagagaaaaagcaaacagaaattgggggcgtttttgtggatgcaaagaaatttacaggaccccttctaccctagaggtccaagggaattcaggggtggctgcagggccccacgaagggacattgaagacattccttatgtgtagtgtccctggcaggcatttaccaggccatgtgctttaacgttacggtaatactttactttaggcatccctcctgttgctagcagccttttgacctatctgcaatgcagtgttctcagtaggaaatgttcatctgttacatggaaaaaatgttgatggtgcattgtaaaattaaaaaacacaacttgcagaaccaaat

SEQ ID NO: 30098 - protein, 95 aa, Homo sapiens
MRRAWTQEREPRPCEPAERADPAPVSCLSAGLRVCCSQRSAKPEKEEQPVQNPRRTGKGGEISTWKNSTVKMKEWLQTKERWKMKNSHKTRESQK

SEQ ID NO: 30099 - DNA, 1564 bp, Homo sapiens
tgtaggcaccggtccgagtgcctgccctctgtccccgcggctgggtctcgtctgctccggttcctgggctcctaattcttggtccagcttcttccaggtcagtgtgcgggccttccacgctgccagcggaacactggaatggcggaaggggaacggagaaaaacgttgaccgcgaggctggggaggagagttgcctctgaggaagaagggcacagagacccaaaattagtttggaaagcatcctgatttggtgcccgaggcctggaaagaaatggcggctggggtgcggcggaggtaggggaggaaaacgttggatgagaagggcctggactcaggaaagggaaccgcgtccgtgtgagcccgctgagcgcgcagaccctgcccctgtctcctgtctgtctgcaggtctgcgcgtctgttgttcccagcgctctgcgaagcctgaaaaggaggagcaacctgtccagaatccccgcaggacaggaaaaggaggggaaatctcgacatggaaaaactctacagtgaaaatgaaggaatggcttcaaaccaaggaaagatggaaaatgaagaacagccacaagacgagagaaagccagaagtaacttgtactctggaagacaagaagttagaaaacgagggaaagacagaaaacaagggcaaaacaggagatgaggaaatgttaaaggataaaggaaagccagagagtgagggagaggcaaaagaaggaaagtcagagagggagggagagtcagagatggagggaggatcagagagagagggaaaaccagagatagagggaaagccagagagtgaaggagagccagggagtgaaacaagggctgcaggaaagcgcccagctgaggatgatgtacccaggaaagccaaaagaaaaactaataaggggctggctcattacctcaaggagtataaagaggccatacatgatatgaatttcagcaatgaggacatgataagagaatttgacaatatggctaaggtgcaggatgagaagagaaaaagcaaacagaaattgggggcgtttttgtggatgcaaagaaatttacaggaccccttctaccctagaggtccaagggaattcaggggtggctgcagggccccacgaagggacattgaagacattccttatgtgtagtgtccctggcaggcatttaccaggccatgtgctttaacgttacggtaatactttactttaggcatccctcctgttgctagcagccttttgacctatctgcaatgcagtgttctcagtaggaaatgttcatctgttacatggaaaaaatgttgatggtgcattgtaaaattaaaaaacacaacttgcagaaccaaatatatggcatcagtacatttttgtaaaactacaaagatacttacctagtaatatagtatagaaaacaattctgaaagctgtgtccactaaaagattaacagtggttatctctgggtgattttttctgttcttttttgttcatctgtccatttttctcctaaaaacagatttctttagtcataaaaataataaaatataaagtattggaaaacagtg

SEQ ID NO: 30100 - protein, 95 aa, Homo sapiens; identical to SEQ ID NO: 30098

SEQ ID NO: 30101 - DNA, 1290 bp, Homo sapiens
cctctgtccccgcggctgggtctcgtctgctccggttcctgggctcctaattcttggtccagcttcttccaggtcagtgtgcgggccttccacgctgccagcggaacactggaatggcggaaggggaacgggtctgcgcgtctgttgttcccagcgctctgcgaagcctgaaaaggaggagcaacctgtccagaatccccgcaggacaggaaaaggaggggaaatctcgacatggaaaaactctacagtgaaaatgaaggaatggcttcaaaccaaggaaagatggaaaatgaagaacagccacaagacgagagaaagccagaagtaacttgtactctggaagacaagaagttagaaaacgagggaaagacagaaaacaagggcaaaacaggagatgaggaaatgttaaaggataaaggaaagccagagagtgagggagaggcaaaagaaggaaagtcagagagggagggagagtcagagatggagggaggatcagagagagagggaaaaccagagatagagggaaagccagagagtgaaggagagccagggagtgaaacaagggctgcaggaaagcgcccagctgaggatgatgtacccaggaaagccaaaagaaaaactaataaggggctggctcattacctcaaggagtataaagaggccatacatgatatgaatttcagcaatgaggacatgataagagaatttgacaatatggctaaggtgcaggatgagaagagaaaaagcaaacagaaattgggggcgtttttgtggatgcaaagaaatttacaggaccccttctaccctagaggtccaagggaattcaggggtggctgcagggccccacgaagggacattgaagacattccttatgtgtagtgtccctggcaggcatttaccaggccatgtgctttaacgttacggtaatactttactttaggcatccctcctgttgctagcagccttttgacctatctgcaatgcagtgttctcagtaggaaatgttcatctgttacatggaaaaaatgttgatggtgcattgtaaaattaaaaaacacaacttgcagaaccaaatatatggcatcagtacatttttgtaaaactacaaagatacttacctagtaatatagtatagaaaacaattctgaaagctgtgtccactaaaagattaacagtggttatctctgggtgattttttctgttcttttttgttcatctgtccatttttctcctaaaaacagatttctttagtcataaaaataataaaatataaagtattggaaaacagtg

SEQ ID NO: 30102 - protein, 45 aa, Homo sapiens; identical to SEQ ID NO: 30074

SEQ ID NO: 30103 - DNA, 1585 bp, Homo sapiens
tctgctccggttcctgggctcctaattcttggtccagcttcttccaggtcagtgtgcgggccttccacgctgccagcggaacactggaatggcggaaggggaacgggtacggcagggggaaaggctgggggtggggtcgggtcgagtcgagggaagctggcccgagtgtggacagagatggcggtgggaaaacggctaggggtggctgagggggagcacgtaggcagtgggcagagggtgaggaaggcgagcacccccaagtatccatgctcgctttccaggcacatcctcttctctgccctccgtccattttggagccggagatggtgggctggggccgccccagtagtgagacagtggaagtaaaccccatctgccgttcccgtgcgtagagaaaaacgttgaccgcgaggctggggaggagagttgcctctgaggaagaagggcacagagacccaaaattagtttggaaagcatcctgatttggtgcccgaggcctggaaagaaatggcggctggggtgcggcggaggtaggggaggaaaacgttggatgagaagggcctggactcaggaaagggaaccgcgtccgtgtgagcccgctgagcgcgcagaccctgcccctgtctcctgtctgtctgcaggtctgcgcgtctgttgttcccagcgctctgcgaagcctgaaaaggaggagcaacctgtccagaatccccgcaggacaggaaaaggaggggaaatctcgacatggaaaaactctacagtgaaaatgaaggaatggcttcaaaccaaggaaagatggaaaatgaagaacagccacaagacgagagaaagccagaagtaacttgtactctggaagacaagaagttagaaaacgagggaaagacagaaaacaagggcaaaacaggagatgaggaaatgttaaaggataaaggaaagccagagagtgagggagaggcaaaagaaggaaagtcagagagggagggagagtcagagatggagggaggatcagagagagagggaaaaccagagatagagggaaagccagagagtgaaggagagccagggagtgaaacaagggctgcaggaaagcgcccagctgaggatgatgtacccaggaaagccaaaagaaaaactaataaggggctggctcattacctcaaggagtataaagaggccatacatgatatgaatttcagcaatgaggacatgataagagaatttgacaatatggctaaggtgcaggatgagaagagaaaaagcaaacagaaattgggggcgtttttgtggatgcaaagaaatttacaggaccccttctaccctagaggtccaagggaattcaggggtggctgcagggccccacgaagggacattgaagacattccttatgtgtagtgtccctggcaggcatttaccaggccatgtgctttaacgttacggtaatactttactttaggcatccctcctgttgctagcagccttttgacctatctgcaatgcagtgttctcagtaggaaatgttcatctgttacatggaaaaaatgttgatggtgcattgtaaaattaaaaaacacaacttgcagaaccaaat

SEQ ID NO: 30104 - protein, 95 aa, Homo sapiens; identical to SEQ ID NO: 30098

SEQ ID NO: 30105 - DNA, 1800 bp, Homo sapiens
tctgctccggttcctgggctcctaattcttggtccagcttcttccaggtcagtgtgcgggccttccacgctgccagcggaacactggaatggcggaaggggaacgggtacggcagggggaaaggctgggggtggggtcgggtcgagtcgagggaagctggcccgagtgtggacagagatggcggtgggaaaacggctaggggtggctgagggggagcacgtaggcagtgggcagagggtgaggaaggcgagcacccccaagtatccatgctcgctttccaggcacatcctcttctctgccctccgtccattttggagccggagatggtgggctggggccgccccagtagtgagacagtggaagtaaaccccatctgccgttcccgtgcgtagagaaaaacgttgaccgcgaggctggggaggagagttgcctctgaggaagaagggcacagagacccaaaattagtttggaaagcatcctgatttggtgcccgaggcctggaaagaaatggcggctggggtgcggcggaggtaggggaggaaaacgttggatgagaagggcctggactcaggaaagggaaccgcgtccgtgtgagcccgctgagcgcgcagaccctgcccctgtctcctgtctgtctgcaggtctgcgcgtctgttgttcccagcgctctgcgaagcctgaaaaggaggagcaacctgtccagaatccccgcaggacaggaaaaggaggggaaatctcgacatggaaaaactctacagtgaaaatgaaggaatggcttcaaaccaaggaaagatggaaaatgaagaacagccacaagacgagagaaagccagaagtaacttgtactctggaagacaagaagttagaaaacgagggaaagacagaaaacaagggcaaaacaggagatgaggaaatgttaaaggataaaggaaagccagagagtgagggagaggcaaaagaaggaaagtcagagagggagggagagtcagagatggagggaggatcagagagagagggaaaaccagagatagagggaaagccagagagtgaaggagagccagggagtgaaacaagggctgcaggaaagcgcccagctgaggatgatgtacccaggaaagccaaaagaaaaactaataaggggctggctcattacctcaaggagtataaagaggccatacatgatatgaatttcagcaatgaggacatgataagagaatttgacaatatggctaaggtgcaggatgagaagagaaaaagcaaacagaaattgggggcgtttttgtggatgcaaagaaatttacaggaccccttctaccctagaggtccaagggaattcaggggtggctgcagggccccacgaagggacattgaagacattccttatgtgtagtgtccctggcaggcatttaccaggccatgtgctttaacgttacggtaatactttactttaggcatccctcctgttgctagcagccttttgacctatctgcaatgcagtgttctcagtaggaaatgttcatctgttacatggaaaaaatgttgatggtgcattgtaaaattaaaaaacacaacttgcagaaccaaatatatggcatcagtacatttttgtaaaactacaaagatacttacctagtaatatagtatagaaaacaattctgaaagctgtgtccactaaaagattaacagtggttatctctgggtgattttttctgttcttttttgttcatctgtccatttttctcctaaaaacagatttctttagtcataaaaataataaaatataaagtattggaaaacagtg

SEQ ID NO: 30106 - protein, 95 aa, Homo sapiens; identical to SEQ ID NO: 30098

SEQ ID NO: 30107 - DNA, 1119 bp, Homo sapiens
gcctacgtgggcaccagcccccgcgcccgcccgcccgccctgcggtccggtcctggcgcccgcgcagaaccagctgtctgagctgcccgggcagcgggggagcagcgagcgggcttccgcgagccggagaaggcacaggcctgtcccgggtcccggcaggtctgcgcgtctgttcccagcgctctgcgaggcctaaaaaggaggagcaacctgtccagaatccctgcaggacaggaaaaggaggggaaatctcgacatggaaaaaccctacaataaaaatgaaggaaacctggaaaacgagggaaagccagaagatgaagtagagcctgatgatgaaggaaagtcagacgaggaagaaaagccagacgtggaggggaagacagaatgcgagggaaagagagaggatgagggagagccaggtgatgagggacaactggaagatgagggaagccaggaaaagcagggcaggtccgaaggtgagggcaagccacaaggcgagggcaagccagcctcccaggcaaagccagagagccagccgcgggccgccgaaaagcgcccggctgaagattatgtgccccggaaagcaaaaagaaaaacggacagggggacggacgattcccccaaggactctcaggaggacttacaggaaaggcatctgagcagtgaggagatgatgagagaatgtggagatgtgtcaagggctcaagaggagctaaggaaaaaacagaaaatgggtggttttcattggatgcaaagagatgtacaggatccattcgccccaaggggacaacggggtgtcaggggagtgaggggtggaggtaggggccagaggggcttacacgatatcccatacctttaatgcctttggccttccattctgatttctctgatgagaatattgctggccctgctttccctggtaggtatttgccaggcccaatgctttaaccttaagctgatactttgctttagatgtcagtctcgttaccagcagccttttgacccaactacggcgctctatattttagtagaggattttcacccatgtgcatggaaaagatgttcatggtacattgtaaaaaaataaaattaaaattaaaaaaagtttgcagaaccgca

SEQ ID NO: 30108 - protein, 200 aa, Homo sapiens; identical to SEQ ID NO: 4161

SEQ ID NO: 30109 - DNA, 1241 bp, Homo sapiens
gtgaccaggagcctctatgtgcccaagtccctctcgtcccggtcttttttttgcctgtccaccatctccctattaccctttggtcgagagggaaagcagaagaagtctgctggtcacagcggggcacctcgaggagaggacgactaggagcacacggcccggaaaggtccagaataactgtgcttgaagaagaaaattcccaacatggacaaaccacgcaaagaaaatgaagaagagccgcagagcgcgcccaagaccgatgaggagaggcctccggtggagcactctcccgaaaagcagtcccccgaggagcagtcttcggaggagcagtcctcggaggaggagttctttcctgaggagctcttgcctgagctcctgcctgagatgctcctctcggaggagcgccctccgcaggagggtctttccaggaaggacctgtttgaggggcgccctcccatggagcagcctccttgtggagtaggaaaacataagcttgaagaaggaagctttaaagaaaggttggctcgttctcgcccgcaatttagaggggacatacatggcagaaatttaagcaatgaggagatgatacaggcagcagatgagctagaagagatgaaaagagtaagaaacaaactgatgataatgcactggaaggcaaaacggagccgtccttatcctatttaatgtgttcggcctttaattctgttttgcctgctaatagtattgccattgccacctggactttctgtttgcattttcttaatgccttttcccatattctgaattttaactttttgtgaggctttattttagatgtttagcatgtaactcgcttaaagttgaggtttccccctaaaatctacaagtttccctctttcagtcatgagccctacacatttgcatgaaagatgtacattatatattgtgaaacgaaaaaagcaattttcaaatggtatatattgtatcccatttttgtaaaaaaaatgtatatttatatattaatatgcaaagaaaaagctaaaagtatagacttcaaaggcataacagtggttgtgtggtaagataataggtgattttttaaatttttgttttatctgaatttctcattttttcaggacaaacgttttacttgtgttgcaaaaatatataatgaaaaaatcacacaattttgaagaaaactgtcaatcagcttataacgacaatgtggcacttaataaatacttgtcagaactttaaaaaaa

SEQ ID NO: 30110 - protein, 56 aa, Homo sapiens
MCPSPSRPGLFFACPPSPYYPLVERESRRSLLVTAGHLEERTTRSTRPGKVQNNCA

SEQ ID NO: 30111 - DNA, 1502 bp, Homo sapiens
catctccctattaccctttggtcgagagggaaagcagaagaagtctgctggtcacagcggggcacctcgaggagaggacgactaggagcacacggcccggaaaggtccaggtcagggaaggggtacgcagtgggccgggactggggcgcgagggtggacgccgaaaggcatggagtctgcaggccgcactgtcccgcccctgtcactgcgggcgaggcctgtagcaaagcctgctgggaaaatggtgggctttcgggaaggagggggcgaccgggaagcggcggagtcgggagagccggagagcctctgggaaagcgcaaggttgaggacctggcccccgaatcaggaaaaggcaggtattggaacccacggcctgggtgttagtccagccgcttagtattctgactctattctgcctttcttgtctcctaagaataactgtgcttgaagaagaaaattcccaacatggacaaaccacgcaaagaaaatgaagaagagccgcagagcgcgcccaagaccgatgaggagaggcctccggtggagcactctcccgaaaagcagtcccccgaggagcagtcttcggaggagcagtcctcggaggaggagttctttcctgaggagctcttgcctgagctcctgcctgagatgctcctctcggaggagcgccctccgcaggagggtctttccaggaaggacctgtttgaggggcgccctcccatggagcagcctccttgtggagtaggaaaacataagcttgaagaaggaagctttaaagaaaggttggctcgttctcgcccgcaatttagaggggacatacatggcagaaatttaagcaatgaggagatgatacaggcagcagatgagctagaagagatgaaaagagtaagaaacaaactgatgataatgcactggaaggcaaaacggagccgtccttatcctatttaatgtgttcggcctttaattctgttttgcctgctaatagtattgccattgccacctggactttctgtttgcattttcttaatgccttttcccatattctgaattttaactttttgtgaggctttattttagatgtttagcatgtaactcgcttaaagttgaggtttccccctaaaatctacaagtttccctctttcagtcatgagccctacacatttgcatgaaagatgtacattatatattgtgaaacgaaaaaagcaattttcaaatggtatatattgtatcccatttttgtaaaaaaaatgtatatttatatattaatatgcaaagaaaaagctaaaagtatagacttcaaaggcataacagtggttgtgtggtaagataataggtgattttttaaatttttgttttatctgaatttctcattttttcaggacaaacgttttacttgtgttgcaaaaatatataatgaaaaaatcacacaattttgaagaaaactgtcaatcagcttataacgacaatgtggcacttaataaatacttgtcagaactttaaaaaaa

SEQ ID NO: 30112 - protein, 159 aa, Homo sapiens; identical to SEQ ID NO: 4165

SEQ ID NO: 30113 - DNA, 1176 bp, Homo sapiens
cactccccgccccctaccctgtcttgcgtctgtgtgcaggtctgctggtcacagcggggcacctcgaggagaggacgactaggagcacacggcccggaaaggtccagaataactgtgcttgaagaagaaaattcccaacatggacaaaccacgcaaagaaaatgaagaagagccgcagagcgcgcccaagaccgatgaggagaggcctccggtggagcactctcccgaaaagcagtcccccgaggagcagtcttcggaggagcagtcctcggaggaggagttctttcctgaggagctcttgcctgagctcctgcctgagatgctcctctcggaggagcgccctccgcaggagggtctttccaggaaggacctgtttgaggggcgccctcccatggagcagcctccttgtggagtaggaaaacataagcttgaagaaggaagctttaaagaaaggttggctcgttctcgcccgcaatttagaggggacatacatggcagaaatttaagcaatgaggagatgatacaggcagcagatgagctagaagagatgaaaagagtaagaaacaaactgatgataatgcactggaaggcaaaacggagccgtccttatcctatttaatgtgttcggcctttaattctgttttgcctgctaatagtattgccattgccacctggactttctgtttgcattttcttaatgccttttcccatattctgaattttaactttttgtgaggctttattttagatgtttagcatgtaactcgcttaaagttgaggtttccccctaaaatctacaagtttccctctttcagtcatgagccctacacatttgcatgaaagatgtacattatatattgtgaaacgaaaaaagcaattttcaaatggtatatattgtatcccatttttgtaaaaaaaatgtatatttatatattaatatgcaaagaaaaagctaaaagtatagacttcaaaggcataacagtggttgtgtggtaagataataggtgattttttaaatttttgttttatctgaatttctcattttttcaggacaaacgttttacttgtgttgcaaaaatatataatgaaaaaatcacacaattttgaagaaaactgtcaatcagcttataacgacaatgtggcacttaataaatacttgtcagaactttaaaaaaa

SEQ ID NO: 30114 - protein, 159 aa, Homo sapiens; identical to SEQ ID NO: 4165

SEQ ID NO: 30115 - DNA, 1171 bp, Homo sapiens
tttcgggaaggagggggcgaccgggaagcggcggagtcgggagagccggagagcctctgggaaagcgcaaggttgaggacctggcccccgaatcaggaaaagaataactgtgcttgaagaagaaaattcccaacatggacaaaccacgcaaagaaaatgaagaagagccgcagagcgcgcccaagaccgatgaggagaggcctccggtggagcactctcccgaaaagcagtcccccgaggagcagtcttcggaggagcagtcctcggaggaggagttctttcctgaggagctcttgcctgagctcctgcctgagatgctcctctcggaggagcgccctccgcaggagggtctttccaggaaggacctgtttgaggggcgccctcccatggagcagcctccttgtggagtaggaaaacataagcttgaagaaggaagctttaaagaaaggttggctcgttctcgcccgcaatttagaggggacatacatggcagaaatttaagcaatgaggagatgatacaggcagcagatgagctagaagagatgaaaagagtaagaaacaaactgatgataatgcactggaaggcaaaacggagccgtccttatcctatttaatgtgttcggcctttaattctgttttgcctgctaatagtattgccattgccacctggactttctgtttgcattttcttaatgccttttcccatattctgaattttaactttttgtgaggctttattttagatgtttagcatgtaactcgcttaaagttgaggtttccccctaaaatctacaagtttccctctttcagtcatgagccctacacatttgcatgaaagatgtacattatatattgtgaaacgaaaaaagcaattttcaaatggtatatattgtatcccatttttgtaaaaaaaatgtatatttatatattaatatgcaaagaaaaagctaaaagtatagacttcaaaggcataacagtggttgtgtggtaagataataggtgattttttaaatttttgttttatctgaatttctcattttttcaggacaaacgttttacttgtgttgcaaaaatatataatgaaaaaatcacacaattttgaagaaaactgtcaatcagcttataacgacaatgtggcacttaataaatacttgtcagaactttaaaaaaa

SEQ ID NO: 30116 - protein, 159 aa, Homo sapiens; identical to SEQ ID NO: 4165

SEQ ID NO: 30117 - DNA, 1517 bp, Homo sapiens
gtggttggaataaaaacagggttgaatgagttccagaaagcagggttctcaacctcgtggacagcaatctgcagaagaagagaacttcaaaaaaccaactagaagcaacatgcagagaagtaaaatgagaggggcctcctcaggaaagaagacagctggtccacagcagaaaaatcttgaaccagctctcccaggaagatggggtggtcgctctgcagagaaccccccttcaggatccgtgaggaagaccagaaagaacaagcagaagactcctggaaacggagatggtggcagtaccagcgaagcacctcagccccctcggaagaaaagggcccgggcagaccccactgttgaaagtgaggaggcgtttaagaatagaatggaggttaaagtgaagattcctgaagaattaaaaccatggcttgttgaggactgggacttagttaccaggcagaagcagctgtttcaactccctgccaagaaaaatgtagatgcaattctggaggagtatgcaaattgcaagaaatcgcagggaaatgttgataataaggaatatgcggttaatgaagttgtggcaggaataaaagaatatttcaatgtgatgttgggcactcagctgctctacaaatttgagaggccccagtatgctgaaatcctcttggctcaccctgatgctccaatgtcccaggtttatggagcaccacacctactgagattatttaaaagccttgcattattgttgggctatttgcatgatttcctaaaatatctggcaaagaattctgcatctctctttactgccagtgattacaaagtggcttctgctgagtaccaccgcaaagccctgtgagcgtctacagacagctcaccatttttgtcctgtatctgtaaacactttttgttcttagtctttttcttgtaaaattgatgttctttaaaatcgttaatgtataacagggcttatgtttcagtttgttttccgttctgttttaaacagaaaataaaaggagtgtaagctccttttctcatttcaaagttgctaccagtgtatgcagtaattagaacaaagaagaaacattcagtagaacattttattgcctagttgacaacattgcttgaatgctggtggttcctatccctttgacactacacaattttctaatatgtgttaatgctatgtgacaaaacgccctgattcctagtgccaaaggttcaacttaatgtatatacctgaaaacccatgcatttgtgctctttttttttttttatggtgcttgaagtaaaacagcccatcctctgcaagtccatctatgttgttcttaggcattctatctttgctcaaattgttgaaggatggtgatttgtttcatggtttttgtatttgagtctaatgcacgttctaacatgatagaggcaatgcattattgtgtagccacggttttctggaaaagttgatattttaggaattgtatttcagatcttaaataaaatttgtttctaaatttcaaagcaagtaa

SEQ ID NO: 30118 - protein, 274 aa, Homo sapiens
MSSRKQGSQPRGQQSAEEENFKKPTRSNMQRSKMRGASSGKKTAGPQQKNLEPALPGRWGGRSAENPPSGSVRKTRKNKQKTPGNGDGGSTSEAPQPPRKKRARADPTVESEEAFKNRMEVKVKIPEELKPWLVEDWDLVTRQKQLFQLPAKKNVDAILEEYANCKKSQGNVDNKEYAVNEVVAGIKEYFNVMLGTQLLYKFERPQYAEILLAHPDAPMSQVYGAPHLLRLFKSLALLLGYLHDFLKYLAKNSASLFTASDYKVASAEYHRKAL

SEQ ID NO: 30119 - DNA, 2748 bp, Homo sapiens
ttcttggaacgctcatcatctttggcatccaaaataacattcttctaattctgttatggctactcttaacatttttgtttcatttgtggtctctgtgcatcccttaaatgcctttcgtccttaggttttccagaattccatacttgaagttcttcctctcttctccctgatttcattggccctcgtagtgtccactaccagctatgtgatgttactctcagatctccatttctggcttttacttctcacccgagctttatttttttttttttgttttgggttgtggggtgggtacccagttagctggacaaaactgagctttacaattttatgtttaactgtacatctcacacacaataggcccaacacaacttttcctccaatccattttctccacctgtaaatggaggagtattatcatttggtgataatactaataacctaatcacccatacctgggagtcatcactgactcctccctcaccaatcttttttttaccttcttaaacaatcactgacagtggtgtcatgtaccatttcttgtgtctgctcccaaactattttgtgcctataactgtcattatactaaccttatcgttttataattgtcactttagatatttggatctctagcaactaccatagtacttgtcccaaagcagatatgcagtaatgtataatgacaaactgaatagattaatgaatggatgaattacctatgttctgtcattttatttctgattccaaactaaaccctaaattcagtgctttcattaagttcattaattacccaggcttgaaattgcagattcctccctcctttggttactatattcttcatgatttctgtattcttcagtttctcttgactctgtcatcatcctaattcaggcctttctggactaatacaagaacctttactgttactcattttgcccttagtcaattaaatataaccttccctattccatattgtcatttctcctgttcaaaagtcttaaatttcaactccactgtcttttatagtttttcatttaattccttctttcttgaaaattgctttcctatcttgtgagtggcatcaacagagtaatttatgggtagttgtgatgagtatttgggtgagatgagagtagtggctggtagtgaggatcagagagagggaaaggaggtaaaaaaataaaaaatcacttataaagggtcctgaaataggatttgaaatccagattttaagggagttagaatgtgttattctctgatgggcctttatgaaacatagttaaaggttgccatagaaaacaaccaagtaaaatattttatatattacagtggttggaataaaaacagggttgaatgagttccagaaagcagggttctcaacctcgtggacagcaatctgcagaagaagagaacccccttcaggatccgtgaggaagaccagaaagaacaagcagaagactcctggaaacggagatggtggcagtaccagcgaagcacctcagccccctcggaagaaaagggcccgggcagaccccactgttgaaagtgaggaggcgtttaagaatagaatggaggttaaagtgaagattcctgaagaattaaaaccatggcttgttgaggactgggacttagttaccaggcagaagcagctgtttcaactccctgccaagaaaaatgtagatgcaattctggaggagtatgcaaattgcaagaaatcgcagggaaatgttgataataaggaatatgcggttaatgaagttgtggcaggaataaaagaatatttcaatgtgatgttgggcactcagctgctctacaaatttgagaggccccagtatgctgaaatcctcttggctcaccctgatgctccaatgtcccaggtttatggagcaccacacctactgagattatttgtaagaattggagcaatgttggcctatacgccccttgatgagaaaagccttgcattattgttgggctatttgcatgatttcctaaaatatctggcaaagaattctgcatctctctttactgccagtgattacaaagtggcttctgctgagtaccaccgcaaagccctgtgagcgtctacagacagctcaccatttttgtcctgtatctgtaaacactttttgttcttagtctttttcttgtaaaattgatgttctttaaaatcgttaatgtataacagggcttatgtttcagtttgttttccgttctgttttaaacagaaaataaaaggagtgtaagctccttttctcatttcaaagttgctaccagtgtatgcagtaattagaacaaagaagaaacattcagtagaacattttattgcctagttgacaacattgcttgaatgctggtggttcctatccctttgacactacacaattttctaatatgtgttaatgctatgtgacaaaacgccctgattcctagtgccaaaggttcaacttaatgtatatacctgaaaacccatgcatttgtgctctttttttttttttatggtgcttgaagtaaaacagcccatcctctgcaagtccatctatgttgttcttaggcattctatctttgctcaaattgttgaaggatggtgatttgtttcatggtttttgtatttgagtctaatgcacgttctaacatgatagaggcaatgcattattgtgtagccacggttttctggaaaagttgatattttaggaattgtatttcagatcttaaataaaatttgtttctaaatttcaaagcaagtaa

SEQ ID NO: 30120 - protein, 170 aa, Homo sapiens
MEVKVKIPEELKPWLVEDWDLVTRQKQLFQLPAKKNVDAILEEYANCKKSQGNVDNKEYAVNEVVAGIKEYFNVMLGTQLLYKFERPQYAEILLAHPDAPMSQVYGAPHLLRLFVRIGAMLAYTPLDEKSLALLLGYLHDFLKYLAKNSASLFTASDYKVASAEYHRKAL

SEQ ID NO: 30121 - DNA, 2104 bp, Homo sapiens
gaataggtaggtgttttccagttcttcagtattgcaaacaccactacattgaacatctttgtatccatgtgcaaatattcccgcaacatactgtgctagctgttcagccacatcacctttatgaaattctcacaggaacctgtgaaggctataggtaatttgccacattccacagatgagaaaaaggctaagagagcttacatgtcttgcctgaggtctcacaactcataaatgacggagcctaattgaagtaaagatctgtctgacagcagaactcaagtattttctctgataccacgatttacaattgtggtatatgattcatatatgtgtttaaatgtaaacatataaaccacatgtttataaattactcattttttttctttttcttagatgatttcacaaaagttcatcttcattgcagatacctgcctttctttctaggttgtatctcccacttcacccttctagaccatcccagaagatctataagatttcatctgggaaatcactaggagttcttggaagggaaagaaggaagattgttggttggaataaaaacagggttgaatgagttccagaaagcagggttctcaacctcgtggacagcaatctgcagaagaagagaacttcaaaaaaccaactagaagcaacatgcagagaagtaaaatgagaggggcctcctcaggaaagaagacagctggtccacagcagaaaaatcttgaaccagctctcccaggaagatggggtggtcgctctgcagagaaccccccttcaggatccgtgaggaagaccagaaagaacaagcagaagactcctggaaacggagatggtggcagtaccagcgaagcacctcagccccctcggaagaaaagggcccgggcagaccccactgttgaaagtgaggaggcgtttaagaatagaatggaggttaaagtgaagattcctgaagaattaaaaccatggcttgttgaggactgggacttagttaccaggcagaagcagctgtttcaactccctgccaagaaaaatgtagatgcaattctggaggagtatgcaaattgcaagaaatcgcagggaaatgttgataataaggaatatgcggttaatgaagttgtggcaggaataaaagaatatttcaatgtgatgttgggcactcagctgctctacaaatttgagaggccccagtatgctgaaatcctcttggctcaccctgatgctccaatgtcccaggtttatggagcaccacacctactgagattatttgtaagaattggagcaatgttggcctatacgccccttgatgagaaaagccttgcattattgttgggctatttgcatgatttcctaaaatatctggcaaagaattctgcatctctctttactgccagtgattacaaagtggcttctgctgagtaccaccgcaaagccctgtgagcgtctacagacagctcaccatttttgtcctgtatctgtaaacactttttgttcttagtctttttcttgtaaaattgatgttctttaaaatcgttaatgtataacagggcttatgtttcagtttgttttccgttctgttttaaacagaaaataaaaggagtgtaagctccttttctcatttcaaagttgctaccagtgtatgcagtaattagaacaaagaagaaacattcagtagaacattttattgcctagttgacaacattgcttgaatgctggtggttcctatccctttgacactacacaattttctaatatgtgttaatgctatgtgacaaaacgccctgattcctagtgccaaaggttcaacttaatgtatatacctgaaaacccatgcatttgtgctctttttttttttttatggtgcttgaagtaaaacagcccatcctctgcaagtccatctatgttgttcttaggcattctatctttgctcaaattgttgaaggatggtgatttgtttcatggtttttgtatttgagtctaatgcacgttctaacatgatagaggcaatgcattattgtgtagccacggttttctggaaaagttgatattttaggaattgtatttcagatcttaaataaaatttgtttctaaatttcaaagcaagtaa

SEQ ID NO: 30122 - protein, 288 aa, Homo sapiens; identical to SEQ ID NO: 4171

SEQ ID NO: 30123 - DNA, 1682 bp, Homo sapiens
atgttctttcttgtccttttgtttgaccttctaggtcaccatcagaaaagctaagtttgctgtatagtgaggatcaggagatctgatcctgattgcagaaccttccctgattacagaatcttggtggttggaataaaaacagggttgaatgagttccagaaagcagggttctcaacctcgtggacagcaatctgcagaagaagagaacttcaaaaaaccaactagaagcaacatgcagagaagtaaaatgagaggggcctcctcaggaaagaagacagctggtccacagcagaaaaatcttgaaccagctctcccaggaagatggggtggtcgctctgcagagaaccccccttcaggatccgtgaggaagaccagaaagaacaagcagaagactcctggaaacggagatggtggcagtaccagcgaagcacctcagccccctcggaagaaaagggcccgggcagaccccactgttgaaagtgaggaggcgtttaagaatagaatggaggttaaagtgaagattcctgaagaattaaaaccatggcttgttgaggactgggacttagttaccaggcagaagcagctgtttcaactccctgccaagaaaaatgtagatgcaattctggaggagtatgcaaattgcaagaaatcgcagggaaatgttgataataaggaatatgcggttaatgaagttgtggcaggaataaaagaatatttcaatgtgatgttgggcactcagctgctctacaaatttgagaggccccagtatgctgaaatcctcttggctcaccctgatgctccaatgtcccaggtttatggagcaccacacctactgagattatttgtaagaattggagcaatgttggcctatacgccccttgatgagaaaagccttgcattattgttgggctatttgcatgatttcctaaaatatctggcaaagaattctgcatctctctttactgccagtgattacaaagtggcttctgctgagtaccaccgcaaagccctgtgagcgtctacagacagctcaccatttttgtcctgtatctgtaaacactttttgttcttagtctttttcttgtaaaattgatgttctttaaaatcgttaatgtataacagggcttatgtttcagtttgttttccgttctgttttaaacagaaaataaaaggagtgtaagctccttttctcatttcaaagttgctaccagtgtatgcagtaattagaacaaagaagaaacattcagtagaacattttattgcctagttgacaacattgcttgaatgctggtggttcctatccctttgacactacacaattttctaatatgtgttaatgctatgtgacaaaacgccctgattcctagtgccaaaggttcaacttaatgtatatacctgaaaacccatgcatttgtgctctttttttttttttatggtgcttgaagtaaaacagcccatcctctgcaagtccatctatgttgttcttaggcattctatctttgctcaaattgttgaaggatggtgatttgtttcatggtttttgtatttgagtctaatgcacgttctaacatgatagaggcaatgcattattgtgtagccacggttttctggaaaagttgatattttaggaattgtatttcagatcttaaataaaatttgtttctaaatttcaaagcaagtaa

SEQ ID NO: 30124 - protein, 288 aa, Homo sapiens; identical to SEQ ID NO: 4171

SEQ ID NO: 30125 - DNA, 2029 bp, Homo sapiens
attcgtgtaggtttataatactatttcttttttatttcatccatttgaaattatatttaaggaaagttaaaaaacaaatttgtcagaaattatacaaatgtacaataaattaaatttgaaaatgtggccacaagaaaggaaaaagaaacacttgtacattatttatcagctttggtgtcctttgtgtgtgatgaaattgcattggctgatgtagaagaaagccatatctcatatctttttattttatgttctttcttgtccttttgtttgaccttctaggtcaccatcagaaaagctaagtttgctgtatagtgaggatcaggagatctgatcctgattgcagaaccttccctgattacagaatcttgggttgtatctcccacttcacccttctagaccatcccagaagatctataagatttcatctgggaaatcactaggagttcttggaagggaaagaaggaagattgttggttggaataaaaacagggttgaatgagttccagaaagcagggttctcaacctcgtggacagcaatctgcagaagaagagaacttcaaaaaaccaactagaagcaacatgcagagaagtaaaatgagaggggcctcctcaggaaagaagacagctggtccacagcagaaaaatcttgaaccagctctcccaggaagatggggtggtcgctctgcagagaaccccccttcaggatccgtgaggaagaccagaaagaacaagcagaagactcctggaaacggagatggtggcagtaccagcgaagcacctcagccccctcggaagaaaagggcccgggcagaccccactgttgaaagtgaggaggcgtttaagaatagaatggaggttaaagtgaagattcctgaagaattaaaaccatggcttgttgaggactgggacttagttaccaggcagaagcagctgtttcaactccctgccaagaaaaatgtagatgcaattctggaggagtatgcaaattgcaagaaatcgcagggaaatgttgataataaggaatatgcggttaatgaagttgtggcaggaataaaagaatatttcaatgtgatgttgggcactcagctgctctacaaatttgagaggccccagtatgctgaaatcctcttggctcaccctgatgctccaatgtcccaggtttatggagcaccacacctactgagattatttgtaagaattggagcaatgttggcctatacgccccttgatgagaaaagccttgcattattgttgggctatttgcatgatttcctaaaatatctggcaaagaattctgcatctctctttactgccagtgattacaaagtggcttctgctgagtaccaccgcaaagccctgtgagcgtctacagacagctcaccatttttgtcctgtatctgtaaacactttttgttcttagtctttttcttgtaaaattgatgttctttaaaatcgttaatgtataacagggcttatgtttcagtttgttttccgttctgttttaaacagaaaataaaaggagtgtaagctccttttctcatttcaaagttgctaccagtgtatgcagtaattagaacaaagaagaaacattcagtagaacattttattgcctagttgacaacattgcttgaatgctggtggttcctatccctttgacactacacaattttctaatatgtgttaatgctatgtgacaaaacgccctgattcctagtgccaaaggttcaacttaatgtatatacctgaaaacccatgcatttgtgctctttttttttttttatggtgcttgaagtaaaacagcccatcctctgcaagtccatctatgttgttcttaggcattctatctttgctcaaattgttgaaggatggtgatttgtttcatggtttttgtatttgagtctaatgcacgttctaacatgatagaggcaatgcattattgtgtagccacggttttctggaaaagttgatattttaggaattgtatttcagatcttaaataaaatttgtttctaaatttcaaagcaagtaa

SEQ ID NO: 30126 - protein, 288 aa, Homo sapiens; identical to SEQ ID NO: 4171

SEQ ID NO: 30127 - DNA, 1766 bp, Homo sapiens
actatggcggttggaggaacggcagtgatcacacgtcggctgctgggaagatctggattctcgtttcaggtcaccatcagaaaagctaagtttgctgtatagtgaggatcaggagatctgatcctgattgcagaaccttccctgattacagaatcttgggattgttgagaggattacatgtaaagtaccaggacagtgcatggcacattggttggaataaaaacagggttgaatgagttccagaaagcagggttctcaacctcgtggacagcaatctgcagaagaagagaacttcaaaaaaccaactagaagcaacatgcagagaagtaaaatgagaggggcctcctcaggaaagaagacagctggtccacagcagaaaaatcttgaaccagctctcccaggaagatggggtggtcgctctgcagagaaccccccttcaggatccgtgaggaagaccagaaagaacaagcagaagactcctggaaacggagatggtggcagtaccagcgaagcacctcagccccctcggaagaaaagggcccgggcagaccccactgttgaaagtgaggaggcgtttaagaatagaatggaggttaaagtgaagattcctgaagaattaaaaccatggcttgttgaggactgggacttagttaccaggcagaagcagctgtttcaactccctgccaagaaaaatgtagatgcaattctggaggagtatgcaaattgcaagaaatcgcagggaaatgttgataataaggaatatgcggttaatgaagttgtggcaggaataaaagaatatttcaatgtgatgttgggcactcagctgctctacaaatttgagaggccccagtatgctgaaatcctcttggctcaccctgatgctccaatgtcccaggtttatggagcaccacacctactgagattatttgtaagaattggagcaatgttggcctatacgccccttgatgagaaaagccttgcattattgttgggctatttgcatgatttcctaaaatatctggcaaagaattctgcatctctctttactgccagtgattacaaagtggcttctgctgagtaccaccgcaaagccctgtgagcgtctacagacagctcaccatttttgtcctgtatctgtaaacactttttgttcttagtctttttcttgtaaaattgatgttctttaaaatcgttaatgtataacagggcttatgtttcagtttgttttccgttctgttttaaacagaaaataaaaggagtgtaagctccttttctcatttcaaagttgctaccagtgtatgcagtaattagaacaaagaagaaacattcagtagaacattttattgcctagttgacaacattgcttgaatgctggtggttcctatccctttgacactacacaattttctaatatgtgttaatgctatgtgacaaaacgccctgattcctagtgccaaaggttcaacttaatgtatatacctgaaaacccatgcatttgtgctctttttttttttttatggtgcttgaagtaaaacagcccatcctctgcaagtccatctatgttgttcttaggcattctatctttgctcaaattgttgaaggatggtgatttgtttcatggtttttgtatttgagtctaatgcacgttctaacatgatagaggcaatgcattattgtgtagccacggttttctggaaaagttgatattttaggaattgtatttcagatcttaaataaaatttgtttctaaatttcaaagcaagtaa

SEQ ID NO: 30128 - protein, 32 aa, Homo sapiens
MAVGGTAVITRRLLGRSGFSFQVTIRKAKFAV

SEQ ID NO: 30129 - DNA, 3289 bp, Homo sapiens
actatggcggttggaggaacggcagtgatcacacgtcggctgctgggaagatctggattctcgtttcaggtttcggggtgggggtggggagaaagggtcgatgatttccttttttcgtcgggtatagacgggattacctagtgccttcacaatcggtcagagctggattcagattcctgctcgccaacgcccagcttgggcaaggctcctgttctttctgtgtctcggtttccatgtttgtaaaatggtgataataatagtatctacctcagagacgtgtactgtataatagtgcgtataaggcacgtaatgtgaagcctggcccctgaagatattagctattgttatggagataaataatacgcgtaatagaatgagaaaaattataaattatataaattcgctaattgtagtgccctttctgccatcaacttctttcctagaataaattaaagataaaatagatataccaatttttaccaatgaaataatttgttatttgggaattgcctcaaaatagcagagattgtaattttcctatattgaaaagttaaataaaaggtggggggggggggagtgcaagaaagaaagagatggagaacgagagcgagctggagatgaaccacatgcgatgagtaggccttgtttggatcctgaatcgaacacaccaactgtaaaaatatgtttaagacgcatcgggaaaattgggacacggattcgatatttgatgttttttagggaattgatgtcagtttttttaggcgtcacagtagtattgtgattatgttttcaaattgtccttttttgtagagacatacgaaaatatttacggattaaataatgtctgggattggcttctaaatacattaatgactaggatttgcttcaaaataatctcagcggtagggggaaatggggaggggtatagatgaaacaaaattggccctaaattaataatatttttttgctgagtgataggcagtgggttgcgtatattaatctgctttccttggtatacgtttaaatttttctataataaaatacagaagtcagatattccggtgagcttgaaaaagtcgggggtgggggggagcagtgggtggggttatagatgaaacaagatggccttcagttggtaattgttgaaagctggatgatggattcgtgtaggtttataatactatttcttttttatttcatccatttgaaattatatttaaggaaagttaaaaaacaaatttgtcagaaattatacaaatgtacaataaattaaatttgaaaatgtggccacaagaaaggaaaaagaaacacttgtacattatttatcagctttggtgtcctttgtgtgtgatgaaattgcattggctgatgtagaagaaagccatatctcatatctttttattttatgttctttcttgtccttttgtttgaccttctaggtcaccatcagaaaagctaagtttgctgtatagtgaggatcaggagatctgatcctgattgcagaaccttccctgattacagaatcttgggattgttgagaggattacatgtaaagtaccaggacagtgcatggcacatatgatttcacaaaagttcatcttcattgcagatacctgcctttctttctaggttgtatctcccacttcacccttctagaccatcccagaagatctataagatttcatctgggaaatcactaggagttcttggaagggaaagaaggaagattgttggttggaataaaaacagggttgaatgagttccagaaagcagggttctcaacctcgtggacagcaatctgcagaagaagagaacttcaaaaaaccaactagaagcaacatgcagagaagtaaaatgagaggggcctcctcaggaaagaagacagctggtccacagcagaaaaatcttgaaccagctctcccaggaagatggggtggtcgctctgcagagaaccccccttcaggatccgtgaggaagaccagaaagaacaagcagaagactcctggaaacggagatggtggcagtaccagcgaagcacctcagccccctcggaagaaaagggcccgggcagaccccactgttgaaagtgaggaggcgtttaagaatagaatggaggttaaagtgaagattcctgaagaattaaaaccatggcttgttgaggactgggacttagttaccaggcagaagcagctgtttcaactccctgccaagaaaaatgtagatgcaattctggaggagtatgcaaattgcaagaaatcgcagggaaatgttgataataaggaatatgcggttaatgaagttgtggcaggaataaaagaatatttcaatgtgatgttgggcactcagctgctctacaaatttgagaggccccagtatgctgaaatcctcttggctcaccctgatgctccaatgtcccaggtttatggagcaccacacctactgagattatttgtaagaattggagcaatgttggcctatacgccccttgatgagaaaagccttgcattattgttgggctatttgcatgatttcctaaaatatctggcaaagaattctgcatctctctttactgccagtgattacaaagtggcttctgctgagtaccaccgcaaagccctgtgagcgtctacagacagctcaccatttttgtcctgtatctgtaaacactttttgttcttagtctttttcttgtaaaattgatgttctttaaaatcgttaatgtataacagggcttatgtttcagtttgttttccgttctgttttaaacagaaaataaaaggagtgtaagctccttttctcatttcaaagttgctaccagtgtatgcagtaattagaacaaagaagaaacattcagtagaacattttattgcctagttgacaacattgcttgaatgctggtggttcctatccctttgacactacacaattttctaatatgtgttaatgctatgtgacaaaacgccctgattcctagtgccaaaggttcaacttaatgtatatacctgaaaacccatgcatttgtgctctttttttttttttatggtgcttgaagtaaaacagcccatcctctgcaagtccatctatgttgttcttaggcattctatctttgctcaaattgttgaaggatggtgatttgtttcatggtttttgtatttgagtctaatgcacgttctaacatgatagaggcaatgcattattgtgtagccacggttttctggaaaagttgatattttaggaattgtatttcagatcttaaataaaatttgtttctaaatttcaaagcaagtaa

SEQ ID NO: 30130 - protein, 288 aa, Homo sapiens; identical to SEQ ID NO: 4171

SEQ ID NO: 30131 - DNA, 1932 bp, Homo sapiens
gaaacctggctttactatggcggttggaggaacggcagtgatcacacgtcggctgctgggaagatctggattctcgtttcaggtcaccatcagaaaagctaagtttgctgtatagtgaggatcaggagatctgatcctgattgcagaaccttccctgattacagaatcttgggattgttgagaggattacatgtaaagtaccaggacagtgcatggcacatatgatttcacaaaagttcatcttcattgcagatacctgcctttctttctaggttgtatctcccacttcacccttctagaccatcccagaagatctataagatttcatctgggaaatcactaggagttcttggaagggaaagaaggaagattgttggttggaataaaaacagggttgaatgagttccagaaagcagggttctcaacctcgtggacagcaatctgcagaagaagagaacttcaaaaaaccaactagaagcaacatgcagagaagtaaaatgagaggggcctcctcaggaaagaagacagctggtccacagcagaaaaatcttgaaccagctctcccaggaagatggggtggtcgctctgcagagaaccccccttcaggatccgtgaggaagaccagaaagaacaagcagaagactcctggaaacggagatggtggcagtaccagcgaagcacctcagccccctcggaagaaaagggcccgggcagaccccactgttgaaagtgaggaggcgtttaagaatagaatggaggttaaagtgaagattcctgaagaattaaaaccatggcttgttgaggactgggacttagttaccaggcagaagcagctgtttcaactccctgccaagaaaaatgtagatgcaattctggaggagtatgcaaattgcaagaaatcgcagggaaatgttgataataaggaatatgcggttaatgaagttgtggcaggaataaaagaatatttcaatgtgatgttgggcactcagctgctctacaaatttgagaggccccagtatgctgaaatcctcttggctcaccctgatgctccaatgtcccaggtttatggagcaccacacctactgagattatttgtaagaattggagcaatgttggcctatacgccccttgatgagaaaagccttgcattattgttgggctatttgcatgatttcctaaaatatctggcaaagaattctgcatctctctttactgccagtgattacaaagtggcttctgctgagtaccaccgcaaagccctgtgagcgtctacagacagctcaccatttttgtcctgtatctgtaaacactttttgttcttagtctttttcttgtaaaattgatgttctttaaaatcgttaatgtataacagggcttatgtttcagtttgttttccgttctgttttaaacagaaaataaaaggagtgtaagctccttttctcatttcaaagttgctaccagtgtatgcagtaattagaacaaagaagaaacattcagtagaacattttattgcctagttgacaacattgcttgaatgctggtggttcctatccctttgacactacacaattttctaatatgtgttaatgctatgtgacaaaacgccctgattcctagtgccaaaggttcaacttaatgtatatacctgaaaacccatgcatttgtgctctttttttttttttatggtgcttgaagtaaaacagcccatcctctgcaagtccatctatgttgttcttaggcattctatctttgctcaaattgttgaaggatggtgatttgtttcatggtttttgtatttgagtctaatgcacgttctaacatgatagaggcaatgcattattgtgtagccacggttttctggaaaagttgatattttaggaattgtatttcagatcttaaataaaatttgtttctaaatttcaaagcaagtaa

SEQ ID NO: 30132 - protein, 32 aa, Homo sapiens; identical to SEQ ID NO: 30128

SEQ ID NO: 30133 - DNA, 1740 bp, Homo sapiens
agttgccagagaaacctggctttactatggcggttggaggaacggcagtgatcacacgtcggctgctgggaagatctggattctcgtttcaggtcaccatcagaaaagctaagtttgctgtatagtgaggatcaggagatctgatcctgattgcagaaccttccctgattacagaatcttggtggttggaataaaaacagggttgaatgagttccagaaagcagggttctcaacctcgtggacagcaatctgcagaagaagagaacttcaaaaaaccaactagaagcaacatgcagagaagtaaaatgagaggggcctcctcaggaaagaagacagctggtccacagcagaaaaatcttgaaccagctctcccaggaagatggggtggtcgctctgcagagaaccccccttcaggatccgtgaggaagaccagaaagaacaagcagaagactcctggaaacggagatggtggcagtaccagcgaagcacctcagccccctcggaagaaaagggcccgggcagaccccactgttgaaagtgaggaggcgtttaagaatagaatggaggttaaagtgaagattcctgaagaattaaaaccatggcttgttgaggactgggacttagttaccaggcagaagcagctgtttcaactccctgccaagaaaaatgtagatgcaattctggaggagtatgcaaattgcaagaaatcgcagggaaatgttgataataaggaatatgcggttaatgaagttgtggcaggaataaaagaatatttcaatgtgatgttgggcactcagctgctctacaaatttgagaggccccagtatgctgaaatcctcttggctcaccctgatgctccaatgtcccaggtttatggagcaccacacctactgagattatttgtaagaattggagcaatgttggcctatacgccccttgatgagaaaagccttgcattattgttgggctatttgcatgatttcctaaaatatctggcaaagaattctgcatctctctttactgccagtgattacaaagtggcttctgctgagtaccaccgcaaagccctgtgagcgtctacagacagctcaccatttttgtcctgtatctgtaaacactttttgttcttagtctttttcttgtaaaattgatgttctttaaaatcgttaatgtataacagggcttatgtttcagtttgttttccgttctgttttaaacagaaaataaaaggagtgtaagctccttttctcatttcaaagttgctaccagtgtatgcagtaattagaacaaagaagaaacattcagtagaacattttattgcctagttgacaacattgcttgaatgctggtggttcctatccctttgacactacacaattttctaatatgtgttaatgctatgtgacaaaacgccctgattcctagtgccaaaggttcaacttaatgtatatacctgaaaacccatgcatttgtgctctttttttttttttatggtgcttgaagtaaaacagcccatcctctgcaagtccatctatgttgttcttaggcattctatctttgctcaaattgttgaaggatggtgatttgtttcatggtttttgtatttgagtctaatgcacgttctaacatgatagaggcaatgcattattgtgtagccacggttttctggaaaagttgatattttaggaattgtatttcagatcttaaataaaatttgtttctaaatttcaaagcaagtaa

SEQ ID NO: 30134 - protein, 32 aa, Homo sapiens; identical to SEQ ID NO: 30128

SEQ ID NO: 30135 - DNA, 1195 bp, Homo sapiens
atcagttgccagagaaacctggctttactatggcggttggaggaacggcagtgatcacacgtcggctgctgggaagatctggattctcgtttcaggtcaccatcagaaaagctaagtttgctgtatagtgaggatcaggagatctgatcctgattgcagaaccttccctgattacagaatcttgggttgtatctcccacttcacccttctagaccatcccagaagatctataagatttcatctgggaaatcactaggagttcttggaagggaaagaaggaagattgttggttggaataaaaacagggttgaatgagttccagaaagcagggttctcaacctcgtggacagcaatctgcagaagaagagaacttcaaaaaaccaactagaagcaacatgcagagaagtaaaatgagaggggcctcctcaggaaagaagacagctggtccacagcagaaaaatcttgaaccagctctcccaggaagatggggtggtcgctctgcagagaaccccccttcaggatccgtgagcgtctacagacagctcaccatttttgtcctgtatctgtaaacactttttgttcttagtctttttcttgtaaaattgatgttctttaaaatcgttaatgtataacagggcttatgtttcagtttgttttccgttctgttttaaacagaaaataaaaggagtgtaagctccttttctcatttcaaagttgctaccagtgtatgcagtaattagaacaaagaagaaacattcagtagaacattttattgcctagttgacaacattgcttgaatgctggtggttcctatccctttgacactacacaattttctaatatgtgttaatgctatgtgacaaaacgccctgattcctagtgccaaaggttcaacttaatgtatatacctgaaaacccatgcatttgtgctctttttttttttttatggtgcttgaagtaaaacagcccatcctctgcaagtccatctatgttgttcttaggcattctatctttgctcaaattgttgaaggatggtgatttgtttcatggtttttgtatttgagtctaatgcacgttctaacatgatagaggcaatgcattattgtgtagccacggttttctggaaaagttgatattttaggaattgtatttcagatcttaaataaaatttgtttctaaatttcaaagcaagtaa

SEQ ID NO: 30136 - protein, 85 aa, Homo sapiens
MSSRKQGSQPRGQQSAEEENFKKPTRSNMQRSKMRGASSGKKTAGPQQKNLEPALPGRWGGRSAENPPSGSVSVYRQLTIFVLYL

SEQ ID NO: 30137 - DNA, 1936 bp, Homo sapiens
gattatggaacattctaaaacttagacaagacgattgtgattggctgaagggcatacgccctcctccagggtgacgtgtctgcctatggatatcagttgccagagaaacctggctttactatggcggttggaggaacggcagtgatcacacgtcggctgctgggaagatctggattctcgtttcaggtcaccatcagaaaagctaagtttgctgtatagtgaggatcaggagatctgatcctgattgcagaaccttccctgattacagaatcttgggttgtatctcccacttcacccttctagaccatcccagaagatctataagatttcatctgggaaatcactaggagttcttggaagggaaagaaggaagattgttggttggaataaaaacagggttgaatgagttccagaaagcagggttctcaacctcgtggacagcaatctgcagaagaagagaacttcaaaaaaccaactagaagcaacatgcagagaagtaaaatgagaggggcctcctcaggaaagaagacagctggtccacagcagaaaaatcttgaaccagctctcccaggaagatggggtggtcgctctgcagagaaccccccttcaggatccgtgaggaagaccagaaagaacaagcagaagactcctggaaacggagatggtggcagtaccagcgaagcacctcagccccctcggaagaaaagggcccgggcagaccccactgttgaaagtgaggaggcgtttaagaatagaatggaggttaaagtgaagattcctgaagaattaaaaccatggcttgttgaggactgggacttagttaccaggcagaagcagctgtttcaactccctgccaagaaaaatgtagatgcaattctggaggagtatgcaaattgcaagaaatcgcagggaaatgttgataataaggaatatgcggttaatgaagttgtggcaggaataaaagaatatttcaatgtgatgttgggcactcagctgctctacaaatttgagaggccccagtatgctgaaatcctcttggctcaccctgatgctccaatgtcccaggtttatggagcaccacacctactgagattatttgtaagaattggagcaatgttggcctatacgccccttgatgagaaaagccttgcattattgttgggctatttgcatgatttcctaaaatatctggcaaagaattctgcatctctctttactgccagtgattacaaagtggcttctgctgagtaccaccgcaaagccctgtgagcgtctacagacagctcaccatttttgtcctgtatctgtaaacactttttgttcttagtctttttcttgtaaaattgatgttctttaaaatcgttaatgtataacagggcttatgtttcagtttgttttccgttctgttttaaacagaaaataaaaggagtgtaagctccttttctcatttcaaagttgctaccagtgtatgcagtaattagaacaaagaagaaacattcagtagaacattttattgcctagttgacaacattgcttgaatgctggtggttcctatccctttgacactacacaattttctaatatgtgttaatgctatgtgacaaaacgccctgattcctagtgccaaaggttcaacttaatgtatatacctgaaaacccatgcatttgtgctctttttttttttttatggtgcttgaagtaaaacagcccatcctctgcaagtccatctatgttgttcttaggcattctatctttgctcaaattgttgaaggatggtgatttgtttcatggtttttgtatttgagtctaatgcacgttctaacatgatagaggcaatgcattattgtgtagccacggttttctggaaaagttgatattttaggaattgtatttcagatcttaaataaaatttgtttctaaatttcaaagcaagtaa

SEQ ID NO: 30138 - protein, 32 aa, Homo sapiens; identical to SEQ ID NO: 30128

SEQ ID NO: 30139 - DNA, 1859 bp, Homo sapiens
gagggcgggctaaaaaaaaaaacctaagagggcgaacgtcattggccggaactcgtactaacggaggaagaggattggtttgctgtagaccttaacagtgaagaagcaggtcaccatcagaaaagctaagtttgctgtatagtgaggatcaggagatctgatcctgattgcagaaccttccctgattacagaatcttgggttgtatctcccacttcacccttctagaccatcccagaagatctataagatttcatctgggaaatcactaggagttcttggaagggaaagaaggaagattgttggttggaataaaaacagggttgaatgagttccagaaagcagggttctcaacctcgtggacagcaatctgcagaagaagagaacttcaaaaaaccaactagaagcaacatgcagagaagtaaaatgagaggggcctcctcaggaaagaagacagctggtccacagcagaaaaatcttgaaccagctctcccaggaagatggggtggtcgctctgcagagaaccccccttcaggatccgtgaggaagaccagaaagaacaagcagaagactcctggaaacggagatggtggcagtaccagcgaagcacctcagccccctcggaagaaaagggcccgggcagaccccactgttgaaagtgaggaggcgtttaagaatagaatggaggttaaagtgaagattcctgaagaattaaaaccatggcttgttgaggactgggacttagttaccaggcagaagcagctgtttcaactccctgccaagaaaaatgtagatgcaattctggaggagtatgcaaattgcaagaaatcgcagggaaatgttgataataaggaatatgcggttaatgaagttgtggcaggaataaaagaatatttcaatgtgatgttgggcactcagctgctctacaaatttgagaggccccagtatgctgaaatcctcttggctcaccctgatgctccaatgtcccaggtttatggagcaccacacctactgagattatttgtaagaattggagcaatgttggcctatacgccccttgatgagaaaagccttgcattattgttgggctatttgcatgatttcctaaaatatctggcaaagaattctgcatctctctttactgccagtgattacaaagtggcttctgctgagtaccaccgcaaagccctgtgagcgtctacagacagctcaccatttttgtcctgtatctgtaaacactttttgttcttagtctttttcttgtaaaattgatgttctttaaaatcgttaatgtataacagggcttatgtttcagtttgttttccgttctgttttaaacagaaaataaaaggagtgtaagctccttttctcatttcaaagttgctaccagtgtatgcagtaattagaacaaagaagaaacattcagtagaacattttattgcctagttgacaacattgcttgaatgctggtggttcctatccctttgacactacacaattttctaatatgtgttaatgctatgtgacaaaacgccctgattcctagtgccaaaggttcaacttaatgtatatacctgaaaacccatgcatttgtgctctttttttttttttatggtgcttgaagtaaaacagcccatcctctgcaagtccatctatgttgttcttaggcattctatctttgctcaaattgttgaaggatggtgatttgtttcatggtttttgtatttgagtctaatgcacgttctaacatgatagaggcaatgcattattgtgtagccacggttttctggaaaagttgatattttaggaattgtatttcagatcttaaataaaatttgtttctaaatttcaaagcaagtaa

SEQ ID NO: 30140 - protein, 288 aa, Homo sapiens; identical to SEQ ID NO: 4171

SEQ ID NO: 30141 - DNA, 1929 bp, Homo sapiens
acagaactttctggaaaattaacagtgcgtatttgcctgaagaaggtcagtgtgcttgcttggagatcaggacgcaaaggtcaccatcagaaaagctaagtttgctgtatagtgaggatcaggagatctgatcctgattgcagaaccttccctgattacagaatcttgggattgttgagaggattacatgtaaagtaccaggacagtgcatggcacatatgatttcacaaaagttcatcttcattgcagatacctgcctttctttctaggttgtatctcccacttcacccttctagaccatcccagaagatctataagatttcatctgggaaatcactaggagttcttggaagggaaagaaggaagattgttggttggaataaaaacagggttgaatgagttccagaaagcagggttctcaacctcgtggacagcaatctgcagaagaagagaacttcaaaaaaccaactagaagcaacatgcagagaagtaaaatgagaggggcctcctcaggaaagaagacagctggtccacagcagaaaaatcttgaaccagctctcccaggaagatggggtggtcgctctgcagagaaccccccttcaggatccgtgaggaagaccagaaagaacaagcagaagactcctggaaacggagatggtggcagtaccagcgaagcacctcagccccctcggaagaaaagggcccgggcagaccccactgttgaaagtgaggaggcgtttaagaatagaatggaggttaaagtgaagattcctgaagaattaaaaccatggcttgttgaggactgggacttagttaccaggcagaagcagctgtttcaactccctgccaagaaaaatgtagatgcaattctggaggagtatgcaaattgcaagaaatcgcagggaaatgttgataataaggaatatgcggttaatgaagttgtggcaggaataaaagaatatttcaatgtgatgttgggcactcagctgctctacaaatttgagaggccccagtatgctgaaatcctcttggctcaccctgatgctccaatgtcccaggtttatggagcaccacacctactgagattatttgtaagaattggagcaatgttggcctatacgccccttgatgagaaaagccttgcattattgttgggctatttgcatgatttcctaaaatatctggcaaagaattctgcatctctctttactgccagtgattacaaagtggcttctgctgagtaccaccgcaaagccctgtgagcgtctacagacagctcaccatttttgtcctgtatctgtaaacactttttgttcttagtctttttcttgtaaaattgatgttctttaaaatcgttaatgtataacagggcttatgtttcagtttgttttccgttctgttttaaacagaaaataaaaggagtgtaagctccttttctcatttcaaagttgctaccagtgtatgcagtaattagaacaaagaagaaacattcagtagaacattttattgcctagttgacaacattgcttgaatgctggtggttcctatccctttgacactacacaattttctaatatgtgttaatgctatgtgacaaaacgccctgattcctagtgccaaaggttcaacttaatgtatatacctgaaaacccatgcatttgtgctctttttttttttttatggtgcttgaagtaaaacagcccatcctctgcaagtccatctatgttgttcttaggcattctatctttgctcaaattgttgaaggatggtgatttgtttcatggtttttgtatttgagtctaatgcacgttctaacatgatagaggcaatgcattattgtgtagccacggttttctggaaaagttgatattttaggaattgtatttcagatcttaaataaaatttgtttctaaatttcaaagcaagtaa

SEQ ID NO: 30142 - protein, 288 aa, Homo sapiens; identical to SEQ ID NO: 4171

SEQ ID NO: 30143 - DNA, 1939 bp, Homo sapiens
atcttgggtcacagtcccctgcctactagtgctatttacagaagttgattttattttttcctaggaatgaacgatatccatgatgcctatagatattaccgttcagcaaatcagaaaggggaggggggagggaaacaaaatcccagaatcccagggaccaaacagccaatcctttgctgggatttggcggcatctagtggcagactcgagaggtataaaccttactcacagaactttctggaaaattaacagtgcgtatttgcctgaagaaggtcagtgtgcttgcttggagatcaggacgcaaaggtcaccatcagaaaagctaagtttgctgtatagtgaggatcaggagatctgatcctgattgcagaaccttccctgattacagaatcttgggttgtatctcccacttcacccttctagaccatcccagaagatctataagatttcatctgggaaatcactaggagttcttggaagggaaagaaggaagattgttggttggaataaaaacagggttgaatgagttccagaaagcagggttctcaacctcgtggacagcaatctgcagaagaagagaacttcaaaaaaccaactagaagcaacatgcagagaagtaaaatgagaggggcctcctcaggaaagaagacagctggaaacggagatggtggcagtaccagcgaagcacctcagccccctcggaagaaaagggcccgggcagaccccactgttgaaagtgaggaggcgtttaagaatagaatggaggttaaagtgaagattcctgaagaattaaaaccatggcttgttgaggactgggacttagttaccaggcagaagcagctgtttcaactccctgccaagaaaaatgtagatgcaattctggaggagtatgcaaattgcaagaaatcgcagggaaatgttgataataaggaatatgcggttaatgaagttgtggcaggaataaaagaatatttcaatgtgatgttgggcactcagctgctctacaaatttgagaggccccagtatgctgaaatcctcttggctcaccctgatgctccaatgtcccaggtttatggagcaccacacctactgagattatttgtaagaattggagcaatgttggcctatacgccccttgatgagaaaagccttgcattattgttgggctatttgcatgatttcctaaaatatctggcaaagaattctgcatctctctttactgccagtgattacaaagtggcttctgctgagtaccaccgcaaagccctgtgagcgtctacagacagctcaccatttttgtcctgtatctgtaaacactttttgttcttagtctttttcttgtaaaattgatgttctttaaaatcgttaatgtataacagggcttatgtttcagtttgttttccgttctgttttaaacagaaaataaaaggagtgtaagctccttttctcatttcaaagttgctaccagtgtatgcagtaattagaacaaagaagaaacattcagtagaacattttattgcctagttgacaacattgcttgaatgctggtggttcctatccctttgacactacacaattttctaatatgtgttaatgctatgtgacaaaacgccctgattcctagtgccaaaggttcaacttaatgtatatacctgaaaacccatgcatttgtgctctttttttttttttatggtgcttgaagtaaaacagcccatcctctgcaagtccatctatgttgttcttaggcattctatctttgctcaaattgttgaaggatggtgatttgtttcatggtttttgtatttgagtctaatgcacgttctaacatgatagaggcaatgcattattgtgtagccacggttttctggaaaagttgatattttaggaattgtatttcagatcttaaataaaatttgtttctaaatttcaaagcaagtaa

SEQ ID NO: 30144 - protein, 249 aa, Homo sapiens
MSSRKQGSQPRGQQSAEEENFKKPTRSNMQRSKMRGASSGKKTAGNGDGGSTSEAPQPPRKKRARADPTVESEEAFKNRMEVKVKIPEELKPWLVEDWDLVTRQKQLFQLPAKKNVDAILEEYANCKKSQGNVDNKEYAVNEVVAGIKEYFNVMLGTQLLYKFERPQYAEILLAHPDAPMSQVYGAPHLLRLFVRIGAMLAYTPLDEKSLALLLGYLHDFLKYLAKNSASLFTASDYKVASAEYHRKAL

SEQ ID NO: 30145 - DNA, 1954 bp, Homo sapiens
atcttgggtcacagtcccctgcctactagtgctatttacagaagttgattttattttttcctaggaatgaacgatatccatgatgcctatagatattaccgttcagcaaatcagaaaggggaggggggagggaaacaaaatcccagaatcccagggaccaaacagccaatcctttgctgggatttggcggcatctagtggcagactcgagaggtataaaccttactcacagaactttctggaaaattaacagtgcgtatttgcctgaagaaggtcagtgtgcttgcttggagatcaggacgcaaaggtcaccatcagaaaagctaagtttgctgtatagtgaggatcaggagatctgatcctgattgcagaaccttccctgattacagaatcttggtggttggaataaaaacagggttgaatgagttccagaaagcagggttctcaacctcgtggacagcaatctgcagaagaagagaacttcaaaaaaccaactagaagcaacatgcagagaagtaaaatgagaggggcctcctcaggaaagaagacagctggtccacagcagaaaaatcttgaaccagctctcccaggaagatggggtggtcgctctgcagagaaccccccttcaggatccgtgaggaagaccagaaagaacaagcagaagactcctggaaacggagatggtggcagtaccagcgaagcacctcagccccctcggaagaaaagggcccgggcagaccccactgttgaaagtgaggaggcgtttaagaatagaatggaggttaaagtgaagattcctgaagaattaaaaccatggcttgttgaggactgggacttagttaccaggcagaagcagctgtttcaactccctgccaagaaaaatgtagatgcaattctggaggagtatgcaaattgcaagaaatcgcagggaaatgttgataataaggaatatgcggttaatgaagttgtggcaggaataaaagaatatttcaatgtgatgttgggcactcagctgctctacaaatttgagaggccccagtatgctgaaatcctcttggctcaccctgatgctccaatgtcccaggtttatggagcaccacacctactgagattatttgtaagaattggagcaatgttggcctatacgccccttgatgagaaaagccttgcattattgttgggctatttgcatgatttcctaaaatatctggcaaagaattctgcatctctctttactgccagtgattacaaagtggcttctgctgagtaccaccgcaaagccctgtgagcgtctacagacagctcaccatttttgtcctgtatctgtaaacactttttgttcttagtctttttcttgtaaaattgatgttctttaaaatcgttaatgtataacagggcttatgtttcagtttgttttccgttctgttttaaacagaaaataaaaggagtgtaagctccttttctcatttcaaagttgctaccagtgtatgcagtaattagaacaaagaagaaacattcagtagaacattttattgcctagttgacaacattgcttgaatgctggtggttcctatccctttgacactacacaattttctaatatgtgttaatgctatgtgacaaaacgccctgattcctagtgccaaaggttcaacttaatgtatatacctgaaaacccatgcatttgtgctctttttttttttttatggtgcttgaagtaaaacagcccatcctctgcaagtccatctatgttgttcttaggcattctatctttgctcaaattgttgaaggatggtgatttgtttcatggtttttgtatttgagtctaatgcacgttctaacatgatagaggcaatgcattattgtgtagccacggttttctggaaaagttgatattttaggaattgtatttcagatcttaaataaaatttgtttctaaatttcaaagcaagtaa

SEQ ID NO: 30146 - protein, 92 aa, Homo sapiens [sequence omitted]

SEQ ID NO: 30147 - DNA, 2056 bp, Homo sapiens
atcttgggtcacagtcccctgcctactagtgctatttacagaagttgattttattttttcctaggaatgaacgatatccatgatgcctatagatattaccgttcagcaaatcagaaaggggaggggggagggaaacaaaatcccagaatcccagggaccaaacagccaatcctttgctgggatttggcggcatctagtggcagactcgagaggtataaaccttactcacagaactttctggaaaattaacagtgcgtatttgcctgaagaaggtcagtgtgcttgcttggagatcaggacgcaaaggtcaccatcagaaaagctaagtttgctgtatagtgaggatcaggagatctgatcctgattgcagaaccttccctgattacagaatcttgggttgtatctcccacttcacccttctagaccatcccagaagatctataagatttcatctgggaaatcactaggagttcttggaagggaaagaaggaagattgttggttggaataaaaacagggttgaatgagttccagaaagcagggttctcaacctcgtggacagcaatctgcagaagaagagaacttcaaaaaaccaactagaagcaacatgcagagaagtaaaatgagaggggcctcctcaggaaagaagacagctggtccacagcagaaaaatcttgaaccagctctcccaggaagatggggtggtcgctctgcagagaaccccccttcaggatccgtgaggaagaccagaaagaacaagcagaagactcctggaaacggagatggtggcagtaccagcgaagcacctcagccccctcggaagaaaagggcccgggcagaccccactgttgaaagtgaggaggcgtttaagaatagaatggaggttaaagtgaagattcctgaagaattaaaaccatggcttgttgaggactgggacttagttaccaggcagaagcagctgtttcaactccctgccaagaaaaatgtagatgcaattctggaggagtatgcaaattgcaagaaatcgcagggaaatgttgataataaggaatatgcggttaatgaagttgtggcaggaataaaagaatatttcaatgtgatgttgggcactcagctgctctacaaatttgagaggccccagtatgctgaaatcctcttggctcaccctgatgctccaatgtcccaggtttatggagcaccacacctactgagattatttgtaagaattggagcaatgttggcctatacgccccttgatgagaaaagccttgcattattgttgggctatttgcatgatttcctaaaatatctggcaaagaattctgcatctctctttactgccagtgattacaaagtggcttctgctgagtaccaccgcaaagccctgtgagcgtctacagacagctcaccatttttgtcctgtatctgtaaacactttttgttcttagtctttttcttgtaaaattgatgttctttaaaatcgttaatgtataacagggcttatgtttcagtttgttttccgttctgttttaaacagaaaataaaaggagtgtaagctccttttctcatttcaaagttgctaccagtgtatgcagtaattagaacaaagaagaaacattcagtagaacattttattgcctagttgacaacattgcttgaatgctggtggttcctatccctttgacactacacaattttctaatatgtgttaatgctatgtgacaaaacgccctgattcctagtgccaaaggttcaacttaatgtatatacctgaaaacccatgcatttgtgctctttttttttttttatggtgcttgaagtaaaacagcccatcctctgcaagtccatctatgttgttcttaggcattctatctttgctcaaattgttgaaggatggtgatttgtttcatggtttttgtatttgagtctaatgcacgttctaacatgatagaggcaatgcattattgtgtagccacggttttctggaaaagttgatattttaggaattgtatttcagatcttaaataaaatttgtttctaaatttcaaagcaagtaa

SEQ ID NO: 30148 - protein, 92 aa, Homo sapiens [sequence omitted]

SEQ ID NO: 30149 - DNA, 1243 bp, Homo sapiens
gtggttggaataaaaacagggttgaatgagttccagaaagcagggttctcaacctcgtggacagcaatctgcagaagaagagaacttcaaaaaaccaactagaagcaacatgcagagaagtaaaatgagaggggcctcctcaggaaagaagacagctggtccacagcagaaaaatcttgaaccagctctcccaggaagatggggtggtcgctctgcagagaaccccccttcaggatccgtgaggaagaccagaaagaacaagcagaagactcctggaaacggagatggtggcagtaccagcgaagcacctcagccccctcggaagaaaagggcccgggcagaccccactgttgaaagtgaggaggcgtttaagaatagaatggaggttaaagtgaagattcctgaagaattaaaaccatggcttgttgaggactgggacttagttaccaggcagaagcagctgtttcaactccctgccaagaaaaatgtagatgcaattctggaggagtatgcaaattgcaagaaatcgcagggaaatgttgataataaggaatatgcggttaatgaagttgtggcaggaataaaagaatatttcaatgtgatgttgggcactcagctgctctacaaatttgagaggccccagtatgctgaaatcctcttggctcaccctgatgctccaatgtcccaggtttatggagcaccacacctactgagattatttgtaagaattggagcaatgttggcctatacgccccttgatgagaaaagccttgcattattgttgggctatttgcatgatttcctaaaatatctggcaaagaattctgcatctctctttactgccagtgattacaaagtggcttctgctgagtaccaccgcaaagccctgtgagcgtctacagacagctcaccatttttgtcctgtatctgtaaacactttttgttcttagtctttttcttgtaaaattgatgttctttaaaatcgttaatgtataacagggcttatgtttcagtttgttttccgttctgttttaaacagaaaataaaaggagtgtaagctccttttctcatttcaaagttgctaccagtgtatgcagtaattagaacaaagaagaaacattcagcacgttctaacatgatagaggcaatgcattattgtgtagccacggttttctggaaaagttgatattttaggaattgtatttcagatcttaaataaaatttgtttctaaatttcaaagca

SEQ ID NO: 30150 - protein, 288 aa, Homo sapiens; identical to SEQ ID NO: 4171

SEQ ID NO: 30151 - DNA, 1744 bp, Homo sapiens
agaaggtcagtgtgcttgcttggagatcaggacgcaaaggtcaccatcagaaaagctaagtttgctgtatagtgaggatcaggagatctgatcctgattgcagaaccttccctgattacagaatcttgggtaagtgcctcccttctgtcctcagttctcaaacaggataataccacataaccttcctaactgtccaggaatattttgaaaattaataagctcctatctgggaaagtagtctaaattctgagaagggaagggtggagctaagtccattgatagttccagtatagaaagtgcataagcaacagagggctttgtaatcttacatcccttgataaaagatactacagtcaatctcctgtagtagttccacagttccatagattacatttttccttggagcatcctatatgcagcatagtttagtggttaagagcaaatacttcctgaatttaaatcctggctctgccacttaactatgtgatcttgggcaagatatttactcactttatacctaagttcctcgtatatgaaacagaggtgataataatagttcctacttcataggattgttgagaggattacatgtaaagtaccaggacagtgcatggcacatgtaagtatttgctttaataataattatggttctgttagtcctgataatctcatgttttatctacacatttacacctacttctaaaagcagtggatatatttctttttggaattgtgtaaaaaaaaaataataattaataccgttggtttctctcctcattttccagaagcagcagttaccactagaactgaattccgaaattatgacttctggcttgtcttaacaatctagaaaggtttcaaatatattgatcatatttatttatgagggaatttccaggagctataattttagctagcagttcaaaccaaatttataaataagcaaatcttttcactgaatattcagtctgctaacagcttttgtatcattcctcctttgtctcagacttaaaaaaaaaaaatctattacatgtaatggaaatgtttcaagatccagaagagaaaattgatatgaatgtaactgatatggtatatgtgcatttaaaggtttattccaacaaaatgttactcacactcttttctgacacatgcatacacaaaagatgttagcatttgcagtctgattcccaaatggcccattgcttgtgtggagagatgaagtaggatttgaaggtttttcagccttttgacagctacatatggagtcactgtaatttccttttttttctctcttctgaaaagtaggtttcggaggagggcactgccctcctggaagagatgcattagatcggtaggcacagaatacctttacatgagaccatttagagaatgattaggggccaaaggtaaggggtggactgttaagccaacagggactcagagaaagcaagggtcagggtgaccagaaatagagaaaaaaaagcctcacagaggaagaggacctggacctgagccacagaggatgggtagaacttagaaggagggaatgagcccagtctgaatgatatgtctacaaagtatacaatatgcaatgatgattaactgaaaaattgggctggccatttgtgagatccatgaataaaagtagatcagaaagtcagtgtgagttttaaatatatatattttattataaaacgttaatcacataatatgtgaaatcactattgataaccttttctattgg

SEQ ID NO: 30152 - protein, 44 aa, Homo sapiens [sequence omitted]

SEQ ID NO: 30153 - DNA, 2079 bp, Homo sapiens
ccccgaacacggaaaaaaaaggcgcagtgggggttctgctgtgtttgcaagtgagggtcgtgagtgcaacgggcgcaaggcattaaggccagtgtgttagtgcgcgggcaggctcgcgtggtgctggggttgctgtgtgagcggccctcgtggctcgggaggtgctgtgtttgcgcaggcgtgcgcccctggcgtcgggactgggactccggatttctgtggcgactgaggcgctcttacctttgcgtcctgatctccaagcaagcacactgaccttcttcaggcaaatacgcactgttaattttccagaaagttctgtgagtaaggtttatacctctcgagtctgccactagatgccgccaaatcccagcaaaggattggctgtttggtccctgggattctgggattttgtttccctcccccctcccctttctgatttgctgaacggtaatatctataggcatcatggatatcgttcattcctaggaaaaaataaaatcaacttctgtaaatagcactagtaggcaggggactgtgacccaagatccaaataattttgctcatttctttccttttctccttgggttaaaaaaaaaaaaaggcccctctccatccctcttttcttttgtccttgccttgtttaatcaaagagttaatgaatgacgcaagcactgatgctgaagatcctaaccctttttcctcaccttttcaaatgctcgcaactcacccaaactgaaaatacagatagctgttccgtcagtaaagatagataagaactcatcagtaaaacctggaccctggtattgaaaactgattttccttttctcttgaaatttgtatcagatatgtgtttttgcaccctattttctgtagtggtattggtaaactttattgtgtctttggagtaagagaaagagacctaattgtaaacctcattccaccacttactagtctcagtaccctgggcaaatgatttatgttttgtgatcctcagtttttttgtatgctttctatattttagatgctgtgttatatcgttcacgttgatttttttattcatcaccaagtccttattagatgagcactactggatcaaagtcaaacaacaaaaatcatacccctttcaattatctatcttatatacttgtacaccacacaggagggatttttttagagcagtggttcccaaggtgtgtttcctggatgtaccagaaacatcagcgtcacctgaaaagttgtcagaaattcggattctcaggtcccacctcaaacttaatgaatcagaagttcgcagggtggggtttagtaatctgtgttattacaaactatcccagtgattccagcacacactgaagtttgagagccactgctttggagagtagaaatgcaatgcatatttttgtacacaccactagagggtgctacagaatgtaaagcaaaataataaatgatgcacagtatatgttttcagacaccctctatattatcagtcctattttacagattaaaaactaatgtgtagatatgtcaaattattttcttagtgtacgcaacaagtatgggaaccaggatttgaacttcacctgcctctagcccaagcccctaatagtactctgttgtttaaccatgatgacttgtctttccaagcctcaaaatacattagaaatatcttgttccctgctttggctaatgttgactggagtgtcaagaagagtgcaggaaagcaaaccaagctgttgcaacctcaccagaacagctgaagaatgaatttcagcctggactctaccttattagttgggcacccttggggagggtgcaacctgcccaacattttctgctggccctgtcttacctcatgactaagagagccttcctaggtctggaaggtagcagtcagtctgttctggagggtggagagagacaccagtgttttcccatggtttctgggtagtagataaaattggtctattctaaggttaatttgatattttaaaattttgattctgactagcttattggatttttttgaataatgtttgattaatgtaaaggttaaaaataaaacctaatatttcagct

SEQ ID NO: 30154 - protein, 46 aa, Homo sapiens
MMTCLSKPQNTLEISCSLLWLMLTGVSRRVQESKPSCCNLTRTAEE

SEQ ID NO: 30155 - DNA, 737 bp, Homo sapiens
aggcagttgcgggttgcaggagttcaggaaaggaggtgggactagagtcaacctggaatagctctacagtaacaatggcagcctttttgttgctgggacatccatacaggcaacttagctggtgaaaggactctggattggttggcagtctgcttttttttttccaaggtgatcactttactgtagaagaaatgaggttaacagaaaagagtgagggagaacaacaactcaagcccaacaactctaatgcacccaatgaagatcaagaagaagaaatccaacagtcagaacagcatactccagcaaggcagcgaacacaaagagcagacacacagccatccagatgtcgattgccttcacgtaggacacctacaacatccagcgacagaacgatcaaccttcttgaagtccttccgtggcctactgagtggattttcaacccctatcgattgcctgctctttttgagctttatcctgaatttcttctggtgtttaaagaagccttccatgacatatcccattgtctgaaagcccagatggaaaagatcggactgcccatcatactccacctcttcgcactctccaccctctacttctacaagtttttccttcctacaattctttccctttctttctttattcttcttgtacttctgcttctgctttttattattgtcttcattctgatcttcttctgattcttttgtttcaataaacagcaatgagcatgaacactg

SEQ ID NO: 30156 - protein, 168 aa, Homo sapiens; identical to SEQ ID NO: 4173

SEQ ID NO: 30157 - DNA, 3563 bp, Homo sapiens
cgtgcaccctagtctcttcctcttacttttattttattatttttttgagatagtgtctcattctgtcgcccaggctggagtgccgtggtgtgatcacagctcactgcagtctcaaccttcctggctcaagcgatcctcccacctcagcctcccgagtagctgagactacaggcacttgccaccacacccggctaattaaattttttgttttgttttcttttagggctggggtgtcactatgttgcccaggctgctctagaactcctgggctcaagtgatcctcctgcctctgccttccaaagtgttgggattacaggcatgaaccaccatggctagtttaaatggtttttcagggtcacatatctcggaagatatgtgggatgtaaacccagcagcctggccccagagcccatggtcttcatggcagcagcatgtgtgccgcctctcatgtgtacaagtgaatgaagaatgaaagagagttgcactctcaccaatgaccagctgccttctgggtgaagtgaaagcacccagtacaggcagcaggctgcaccaagaaggctggcagtgcctcttgaggaatcccttggcagtgcaggagcctagctggactcaagaatattttgccaagggcacccagcagaaccaatggaagcagaatcacagaaataggagaagaggacaaagatactcagagagaaaaagtaaaagaccgaagaaggaggctggagagaccaggatccttccagctgaacaaagtcagccacaaagcagactagccagccggctacaattggagtcagagtcccaaagacatgggcttgttagagtgctgtgcaagatgtctggtaggggccccctttgcttccctggtggccactggattgtgtttctttggggtggcactgttctgtggctgtggacatgaagccctcactggcacagaaaagctaattgagacctatttctccaaaaactaccaagactatgagtatctcatcaatgtgatccatgccttccagtatgtcatctatggaactgcctctttcttcttcctttatggggccctcctgctggctgagggcttctacaccaccggcgcagtcaggcagatctttggcgactacaagaccaccatctgcggcaagggcctgagcgcaacgtttgtgggcatcacctatgccctgaccgttgtgtggctcctggtgtttgcctgctctgctgtgcctgtgtacatttacttcaacacctggaccacctgccagtctattgccttccccagcaagacctctgccagtataggcagtctctgtgctgatgccagaatgtatggtgttctcccatggaatgctttccctggcaaggtttgtggctccaaccttctgtccatctgcaaaacagctgagttccaaatgaccttccacctgtttattgctgcatttgtgggggctgcagctacactggtttccctgctcaccttcatgattgctgccacttacaactttgccgtccttaaactcatgggccgaggcaccaagttctgatcccccgtagaaatccccctttctctaatagcgaggctctaaccacacagcctacaatgctgcgtctcccatcttaactctttgcctttgccaccaactggccctcttcttacttgatgagtgtaacaagaaaggagagtcttgcagtgattaaggtctctctttggactctcccctcttatgtacctcttttagtcattttgcttcatagctggttcctgctagaaatgggaaatgcctaagaagatgacttcccaactgcaagtcacaaaggaatggaggctctaattgaattttcaagcatctcctgaggatcagaaagtaatttcttctcaaagggtacttccactgatggaaacaaagtggaaggaaagatgctcaggtacagagaaggaatgtctttggtcctcttgccatctataggggccaaatatattctctttggtgtacaaaatggaattcattctggtctctctattaccactgaagatagaagaaaaaagaatgtcagaaaaacaataagagcgtttgcccaaatctgcctattgcagctgggagaagggggtcaaagcaaggatctttcacccacagaaagagagcactgaccccgatggcgatggactactgaagccctaactcagccaaccttacttacagcataagggagcgtagaatctgtgtagacgaagggggcatctggccttacacctcgttagggaagagaaacagggtgttgtcagcatcttctcactcccttctccttgataacagctaccatgacaaccctgtggtttccaaggagctgagaatagaaggaaactagcttacatgagaacagactggcctgaggagcagcagttgctggtggctaatggtgtaacctgagatggccctctggtagacacaggatagataactctttggatagcatgtctttttttctgttaattagttgtgtactctggcctctgtcatatcttcacaatggtgctcatttcatgggggtattatccattcagtcatcgtaggtgatttgaaggtcttgatttgttttagaatgatgcacatttcatgtattccagtttgtttattacttatttggggttgcatcagaaatgtctggagaataattctttgattatgactgttttttaaactaggaaaattggacattaagcatcacaaatgatattaaaaattggctagttgaatctattgggattttctacaagtattctgcctttgcagaaacagatttggtgaatttgaatctcaatttgagtaatctgatcgttctttctagctaatggaaaatgattttacttagcaatgttatcttggtgtgttaagagttaggtttaacataaaggttattttctcctgatatagatcacataacagaatgcaccagtcatcagctattcagttggtaagcttccaggaaaaaggacaggcagaaagagtttgagacctgaatagctcccagatttcagtcttttcctgtttttgttaactttgggttaaaaaaaaaaaaagtctgattggttttaattgaaggaaagatttgtactacagttcttttgttgtaaagagttgtgttgttcttttcccccaaagtggtttcagcaatatttaaggagatgtaagagctttacaaaaagacacttgatacttgttttcaaaccagtatacaagataagcttccaggctgcatagaaggaggagagggaaaatgttttgtaagaaaccaatcaagataaaggacagtgaagtaatccgtaccttgtgttttgttttgatttaataacataacaaataaccaacccttccctgaaaacctcacatgcatacatacacatatatacacacacaaagagagttaatcaactgaaagtgtttccttcatttctgatatagaattgcaattttaacacacataaaggataaacttttagaaacttatcttacaaagtgtattttataaaattaaagaaaataaaattaagaatgttctcaatcaaa

SEQ ID NO: 30158 - protein, 242 aa, Homo sapiens; identical to SEQ ID NO: 4177

SEQ ID NO: 30159 - DNA, 3668 bp, Homo sapiens
cgtgcaccctagtctcttcctcttacttttattttattatttttttgagatagtgtctcattctgtcgcccaggctggagtgccgtggtgtgatcacagctcactgcagtctcaaccttcctggctcaagcgatcctcccacctcagcctcccgagtagctgagactacaggcacttgccaccacacccggctaattaaattttttgttttgttttcttttagggctggggtgtcactatgttgcccaggctgctctagaactcctgggctcaagtgatcctcctgcctctgccttccaaagtgttgggattacaggcatgaaccaccatggctagtttaaatggtttttcagggtcacatatctcggaagatatgtgggatgtaaacccagcagcctggccccagagcccatggtcttcatggcagcagcatgtgtgccgcctctcatgtgtacaagtgaatgaagaatgaaagagagttgcactctcaccaatgaccagctgccttctgggtgaagtgaaagcacccagtacaggcagcaggctgcaccaagaaggctggcagtgcctcttgaggaatcccttggcagtgcaggagcctagctggactcaagaatattttgccaagggcacccagcagaaccaatggaagcagaatcacagaaataggagaagaggacaaagatactcagagagaaaaagtaaaagaccgaagaaggaggctggagagaccaggatccttccagctgaacaaagtcagccacaaagcagactagccagccggctacaattggagtcagagtcccaaagacatgggcttgttagagtgctgtgcaagatgtctggtaggggccccctttgcttccctggtggccactggattgtgtttctttggggtggcactgttctgtggctgtggacatgaagccctcactggcacagaaaagctaattgagacctatttctccaaaaactaccaagactatgagtatctcatcaatgtgatccatgccttccagtatgtcatctatggaactgcctctttcttcttcctttatggggccctcctgctggctgagggcttctacaccaccggcgcagtcaggcagatctttggcgactacaagaccaccatctgcggcaagggcctgagcgcaacggtaacagggggccagaaggggaggggttccagaggccaacatcaagctcattctttggagcgggtgtgtcattgtttgggaaaatggctaggacatcccgacaagtttgtgggcatcacctatgccctgaccgttgtgtggctcctggtgtttgcctgctctgctgtgcctgtgtacatttacttcaacacctggaccacctgccagtctattgccttccccagcaagacctctgccagtataggcagtctctgtgctgatgccagaatgtatggtgttctcccatggaatgctttccctggcaaggtttgtggctccaaccttctgtccatctgcaaaacagctgagttccaaatgaccttccacctgtttattgctgcatttgtgggggctgcagctacactggtttccctgctcaccttcatgattgctgccacttacaactttgccgtccttaaactcatgggccgaggcaccaagttctgatcccccgtagaaatccccctttctctaatagcgaggctctaaccacacagcctacaatgctgcgtctcccatcttaactctttgcctttgccaccaactggccctcttcttacttgatgagtgtaacaagaaaggagagtcttgcagtgattaaggtctctctttggactctcccctcttatgtacctcttttagtcattttgcttcatagctggttcctgctagaaatgggaaatgcctaagaagatgacttcccaactgcaagtcacaaaggaatggaggctctaattgaattttcaagcatctcctgaggatcagaaagtaatttcttctcaaagggtacttccactgatggaaacaaagtggaaggaaagatgctcaggtacagagaaggaatgtctttggtcctcttgccatctataggggccaaatatattctctttggtgtacaaaatggaattcattctggtctctctattaccactgaagatagaagaaaaaagaatgtcagaaaaacaataagagcgtttgcccaaatctgcctattgcagctgggagaagggggtcaaagcaaggatctttcacccacagaaagagagcactgaccccgatggcgatggactactgaagccctaactcagccaaccttacttacagcataagggagcgtagaatctgtgtagacgaagggggcatctggccttacacctcgttagggaagagaaacagggtgttgtcagcatcttctcactcccttctccttgataacagctaccatgacaaccctgtggtttccaaggagctgagaatagaaggaaactagcttacatgagaacagactggcctgaggagcagcagttgctggtggctaatggtgtaacctgagatggccctctggtagacacaggatagataactctttggatagcatgtctttttttctgttaattagttgtgtactctggcctctgtcatatcttcacaatggtgctcatttcatgggggtattatccattcagtcatcgtaggtgatttgaaggtcttgatttgttttagaatgatgcacatttcatgtattccagtttgtttattacttatttggggttgcatcagaaatgtctggagaataattctttgattatgactgttttttaaactaggaaaattggacattaagcatcacaaatgatattaaaaattggctagttgaatctattgggattttctacaagtattctgcctttgcagaaacagatttggtgaatttgaatctcaatttgagtaatctgatcgttctttctagctaatggaaaatgattttacttagcaatgttatcttggtgtgttaagagttaggtttaacataaaggttattttctcctgatatagatcacataacagaatgcaccagtcatcagctattcagttggtaagcttccaggaaaaaggacaggcagaaagagtttgagacctgaatagctcccagatttcagtcttttcctgtttttgttaactttgggttaaaaaaaaaaaaagtctgattggttttaattgaaggaaagatttgtactacagttcttttgttgtaaagagttgtgttgttcttttcccccaaagtggtttcagcaatatttaaggagatgtaagagctttacaaaaagacacttgatacttgttttcaaaccagtatacaagataagcttccaggctgcatagaaggaggagagggaaaatgttttgtaagaaaccaatcaagataaaggacagtgaagtaatccgtaccttgtgttttgttttgatttaataacataacaaataaccaacccttccctgaaaacctcacatgcatacatacacatatatacacacacaaagagagttaatcaactgaaagtgtttccttcatttctgatatagaattgcaattttaacacacataaaggataaacttttagaaacttatcttacaaagtgtattttataaaattaaagaaaataaaattaagaatgttctcaatcaaa

SEQ ID NO: 30160 - protein, 277 aa, Homo sapiens; identical to SEQ ID NO: 4175

SEQ ID NO: 30161 - DNA, 3169 bp, Homo sapiens
agtcttctatgccagggctaggaaagctgccttccaaaatttggtctgggaagacattatcctgggaatgagaagcaaagcctcagctctagaagcccaaataatagcagatgacccaggctttcactggcacccagtacaggcagcaggctgcaccaagaaggctggcagtgcctcttgaggaatcccttggcagtgcaggagcctagctggactcaagaatattttgccaagggcacccagcagaaccaatggaagcagaatcacagaaataggagaagaggacaaagatactcagagagaaaaagtaaaagaccgaagaaggaggctggagagaccaggatccttccagctgaacaaagtcagccacaaagcagactagccagccggctacaattggagtcagagtcccaaagacatgggcttgttagagtgctgtgcaagatgtctggtaggggccccctttgcttccctggtggccactggattgtgtttctttggggtggcactgttctgtggctgtggacatgaagccctcactggcacagaaaagctaattgagacctatttctccaaaaactaccaagactatgagtatctcatcaatgtgatccatgccttccagtatgtcatctatggaactgcctctttcttcttcctttatggggccctcctgctggctgagggcttctacaccaccggcgcagtcaggcagatctttggcgactacaagaccaccatctgcggcaagggcctgagcgcaacgtttgtgggcatcacctatgccctgaccgttgtgtggctcctggtgtttgcctgctctgctgtgcctgtgtacatttacttcaacacctggaccacctgccagtctattgccttccccagcaagacctctgccagtataggcagtctctgtgctgatgccagaatgtatggtgttctcccatggaatgctttccctggcaaggtttgtggctccaaccttctgtccatctgcaaaacagctgagttccaaatgaccttccacctgtttattgctgcatttgtgggggctgcagctacactggtttccctgctcaccttcatgattgctgccacttacaactttgccgtccttaaactcatgggccgaggcaccaagttctgatcccccgtagaaatccccctttctctaatagcgaggctctaaccacacagcctacaatgctgcgtctcccatcttaactctttgcctttgccaccaactggccctcttcttacttgatgagtgtaacaagaaaggagagtcttgcagtgattaaggtctctctttggactctcccctcttatgtacctcttttagtcattttgcttcatagctggttcctgctagaaatgggaaatgcctaagaagatgacttcccaactgcaagtcacaaaggaatggaggctctaattgaattttcaagcatctcctgaggatcagaaagtaatttcttctcaaagggtacttccactgatggaaacaaagtggaaggaaagatgctcaggtacagagaaggaatgtctttggtcctcttgccatctataggggccaaatatattctctttggtgtacaaaatggaattcattctggtctctctattaccactgaagatagaagaaaaaagaatgtcagaaaaacaataagagcgtttgcccaaatctgcctattgcagctgggagaagggggtcaaagcaaggatctttcacccacagaaagagagcactgaccccgatggcgatggactactgaagccctaactcagccaaccttacttacagcataagggagcgtagaatctgtgtagacgaagggggcatctggccttacacctcgttagggaagagaaacagggtgttgtcagcatcttctcactcccttctccttgataacagctaccatgacaaccctgtggtttccaaggagctgagaatagaaggaaactagcttacatgagaacagactggcctgaggagcagcagttgctggtggctaatggtgtaacctgagatggccctctggtagacacaggatagataactctttggatagcatgtctttttttctgttaattagttgtgtactctggcctctgtcatatcttcacaatggtgctcatttcatgggggtattatccattcagtcatcgtaggtgatttgaaggtcttgatttgttttagaatgatgcacatttcatgtattccagtttgtttattacttatttggggttgcatcagaaatgtctggagaataattctttgattatgactgttttttaaactaggaaaattggacattaagcatcacaaatgatattaaaaattggctagttgaatctattgggattttctacaagtattctgcctttgcagaaacagatttggtgaatttgaatctcaatttgagtaatctgatcgttctttctagctaatggaaaatgattttacttagcaatgttatcttggtgtgttaagagttaggtttaacataaaggttattttctcctgatatagatcacataacagaatgcaccagtcatcagctattcagttggtaagcttccaggaaaaaggacaggcagaaagagtttgagacctgaatagctcccagatttcagtcttttcctgtttttgttaactttgggttaaaaaaaaaaaaagtctgattggttttaattgaaggaaagatttgtactacagttcttttgttgtaaagagttgtgttgttcttttcccccaaagtggtttcagcaatatttaaggagatgtaagagctttacaaaaagacacttgatacttgttttcaaaccagtatacaagataagcttccaggctgcatagaaggaggagagggaaaatgttttgtaagaaaccaatcaagataaaggacagtgaagtaatccgtaccttgtgttttgttttgatttaataacataacaaataaccaacccttccctgaaaacctcacatgcatacatacacatatatacacacacaaagagagttaatcaactgaaagtgtttccttcatttctgatatagaattgcaattttaacacacataaaggataaacttttagaaacttatcttacaaagtgtattttataaaattaaagaaaataaaattaagaatgttctcaatcaaa

SEQ ID NO: 30162 - protein, 242 aa, Homo sapiens; identical to SEQ ID NO: 4177

SEQ ID NO: 30163 - DNA, 3069 bp, Homo sapiens
gggctctggaggacctggaagataccctatgaggtctgtagggagccctcaggaaaggtctgctgacgaggagaagaggacaaagatactcagagagaaaaagtaaaagaccgaagaaggaggctggagagaccaggatccttccagctgaacaaagtcagccacaaagcagactagccagccggctacaattggagtcagagtcccaaagacatgggcttgttagagtgctgtgcaagatgtctggtaggggccccctttgcttccctggtggccactggattgtgtttctttggggtggcactgttctgtggctgtggacatgaagccctcactggcacagaaaagctaattgagacctatttctccaaaaactaccaagactatgagtatctcatcaatgtgatccatgccttccagtatgtcatctatggaactgcctctttcttcttcctttatggggccctcctgctggctgagggcttctacaccaccggcgcagtcaggcagatctttggcgactacaagaccaccatctgcggcaagggcctgagcgcaacggtaacagggggccagaaggggaggggttccagaggccaacatcaagctcattctttggagcgggtgtgtcattgtttgggaaaatggctaggacatcccgacaagtttgtgggcatcacctatgccctgaccgttgtgtggctcctggtgtttgcctgctctgctgtgcctgtgtacatttacttcaacacctggaccacctgccagtctattgccttccccagcaagacctctgccagtataggcagtctctgtgctgatgccagaatgtatggtgttctcccatggaatgctttccctggcaaggtttgtggctccaaccttctgtccatctgcaaaacagctgagttccaaatgaccttccacctgtttattgctgcatttgtgggggctgcagctacactggtttccctgctcaccttcatgattgctgccacttacaactttgccgtccttaaactcatgggccgaggcaccaagttctgatcccccgtagaaatccccctttctctaatagcgaggctctaaccacacagcctacaatgctgcgtctcccatcttaactctttgcctttgccaccaactggccctcttcttacttgatgagtgtaacaagaaaggagagtcttgcagtgattaaggtctctctttggactctcccctcttatgtacctcttttagtcattttgcttcatagctggttcctgctagaaatgggaaatgcctaagaagatgacttcccaactgcaagtcacaaaggaatggaggctctaattgaattttcaagcatctcctgaggatcagaaagtaatttcttctcaaagggtacttccactgatggaaacaaagtggaaggaaagatgctcaggtacagagaaggaatgtctttggtcctcttgccatctataggggccaaatatattctctttggtgtacaaaatggaattcattctggtctctctattaccactgaagatagaagaaaaaagaatgtcagaaaaacaataagagcgtttgcccaaatctgcctattgcagctgggagaagggggtcaaagcaaggatctttcacccacagaaagagagcactgaccccgatggcgatggactactgaagccctaactcagccaaccttacttacagcataagggagcgtagaatctgtgtagacgaagggggcatctggccttacacctcgttagggaagagaaacagggtgttgtcagcatcttctcactcccttctccttgataacagctaccatgacaaccctgtggtttccaaggagctgagaatagaaggaaactagcttacatgagaacagactggcctgaggagcagcagttgctggtggctaatggtgtaacctgagatggccctctggtagacacaggatagataactctttggatagcatgtctttttttctgttaattagttgtgtactctggcctctgtcatatcttcacaatggtgctcatttcatgggggtattatccattcagtcatcgtaggtgatttgaaggtcttgatttgttttagaatgatgcacatttcatgtattccagtttgtttattacttatttggggttgcatcagaaatgtctggagaataattctttgattatgactgttttttaaactaggaaaattggacattaagcatcacaaatgatattaaaaattggctagttgaatctattgggattttctacaagtattctgcctttgcagaaacagatttggtgaatttgaatctcaatttgagtaatctgatcgttctttctagctaatggaaaatgattttacttagcaatgttatcttggtgtgttaagagttaggtttaacataaaggttattttctcctgatatagatcacataacagaatgcaccagtcatcagctattcagttggtaagcttccaggaaaaaggacaggcagaaagagtttgagacctgaatagctcccagatttcagtcttttcctgtttttgttaactttgggttaaaaaaaaaaaaagtctgattggttttaattgaaggaaagatttgtactacagttcttttgttgtaaagagttgtgttgttcttttcccccaaagtggtttcagcaatatttaaggagatgtaagagctttacaaaaagacacttgatacttgttttcaaaccagtatacaagataagcttccaggctgcatagaaggaggagagggaaaatgttttgtaagaaaccaatcaagataaaggacagtgaagtaatccgtaccttgtgttttgttttgatttaataacataacaaataaccaacccttccctgaaaacctcacatgcatacatacacatatatacacacacaaagagagttaatcaactgaaagtgtttccttcatttctgatatagaattgcaattttaacacacataaaggataaacttttagaaacttatcttacaaagtgtattttataaaattaaagaaaataaaattaagaatgttctcaatcaaa

SEQ ID NO: 30164 - protein, 277 aa, Homo sapiens; identical to SEQ ID NO: 4175

SEQ ID NO: 30165 - DNA, 1017 bp, Homo sapiens
gagacgctgcgcggcggcagcggcgggcgcgagcggcagctgtcaggccaccgaggtccaagccgcacttgctgccccattgaggacgaggaggcagcaggagcagtgacggtgactctaaggagccggattcccggcacgcagagctgacctgcctggcacccgcggccctctcctgtttccttcccattgtgttggcaccctaaaaagaaagaataaaacaacaacaggaaaaaaaggaaaatatttaaattgtgacaaaaacccactggataagccagctgcagaatatatcctgaggtacctgctttatggaattattcacactattcaccaacaggaagaataaagtcaatcaattcaaggagtctcagaacaggagcacatagacaccaaactttgtgggacaacaaatataatgaagagtatgtttgcgtctttcaaacaaagccacgtgaagtcaaggcccttaacacccacccctcccacatactgaggggagaattcagatgcccactggagtcagccgatcagactgccttttgcacactccttgcctccactccagtttaccgtggaagacctgtctgctatggctgaatctgagagagatccttgagtaacgaattaaggaatgaacaaatgttgctctggacaaagctgcagcttccacgtcctgcataactgcactcagtactgaccctgaagataggaaaagcaatacaactggtgctagaaatgttatgagaatgacttggatgagctgaaaaatgaatgatctccttgaacaagctccttggaaaccacagggttgtcatggtagctgttatcaaggagaagggagtgagaagatgctgacaacaccctgtttctcttccctaacgaggtgtaaggccagatgcccccttcgtctacacagattctacgctcccttatgctgcttgcctggaatttcgctttgctgcagagacatctggaaatgtggattgagggtggaaataaaatgaagatgtcctg

SEQ ID NO: 30166 - protein, 78 aa, Homo sapiens
MNDLLEQAPWKPQGCHGSCYQGEGSEKMLTTPCFSSLTRCKARCPLRLHRFYAPLCCLPGISLCCRDIWKCGLRVEIK

SEQ ID NO: 30167 - DNA, 2508 bp, Homo sapiens
gtaacagggggccagaaggggaggggttccagaggccaacatcaagctcattctttggagcgggtgtgtcattgtttgggaaaatggctaggacatcccgacaagtttgtgggcatcacctatgccctgaccgttgtgtggctcctggtgtttgcctgctctgctgtgcctgtgtacatttacttcaacacctggaccacctgccagtctattgccttccccagcaagacctctgccagtataggcagtctctgtgctgatgccagaatgtatggtgttctcccatggaatgctttccctggcaaggtttgtggctccaaccttctgtccatctgcaaaacagctgagttccaaatgaccttccacctgtttattgctgcatttgtgggggctgcagctacactggtttccctgctcaccttcatgattgctgccacttacaactttgccgtccttaaactcatgggccgaggcaccaagttctgatcccccgtagaaatccccctttctctaatagcgaggctctaaccacacagcctacaatgctgcgtctcccatcttaactctttgcctttgccaccaactggccctcttcttacttgatgagtgtaacaagaaaggagagtcttgcagtgattaaggtctctctttggactctcccctcttatgtacctcttttagtcattttgcttcatagctggttcctgctagaaatgggaaatgcctaagaagatgacttcccaactgcaagtcacaaaggaatggaggctctaattgaattttcaagcatctcctgaggatcagaaagtaatttcttctcaaagggtacttccactgatggaaacaaagtggaaggaaagatgctcaggtacagagaaggaatgtctttggtcctcttgccatctataggggccaaatatattctctttggtgtacaaaatggaattcattctggtctctctattaccactgaagatagaagaaaaaagaatgtcagaaaaacaataagagcgtttgcccaaatctgcctattgcagctgggagaagggggtcaaagcaaggatctttcacccacagaaagagagcactgaccccgatggcgatggactactgaagccctaactcagccaaccttacttacagcataagggagcgtagaatctgtgtagacgaagggggcatctggccttacacctcgttagggaagagaaacagggtgttgtcagcatcttctcactcccttctccttgataacagctaccatgacaaccctgtggtttccaaggagctgagaatagaaggaaactagcttacatgagaacagactggcctgaggagcagcagttgctggtggctaatggtgtaacctgagatggccctctggtagacacaggatagataactctttggatagcatgtctttttttctgttaattagttgtgtactctggcctctgtcatatcttcacaatggtgctcatttcatgggggtattatccattcagtcatcgtaggtgatttgaaggtcttgatttgttttagaatgatgcacatttcatgtattccagtttgtttattacttatttggggttgcatcagaaatgtctggagaataattctttgattatgactgttttttaaactaggaaaattggacattaagcatcacaaatgatattaaaaattggctagttgaatctattgggattttctacaagtattctgcctttgcagaaacagatttggtgaatttgaatctcaatttgagtaatctgatcgttctttctagctaatggaaaatgattttacttagcaatgttatcttggtgtgttaagagttaggtttaacataaaggttattttctcctgatatagatcacataacagaatgcaccagtcatcagctattcagttggtaagcttccaggaaaaaggacaggcagaaagagtttgagacctgaatagctcccagatttcagtcttttcctgtttttgttaactttgggttaaaaaaaaaaaaagtctgattggttttaattgaaggaaagatttgtactacagttcttttgttgtaaagagttgtgttgttcttttcccccaaagtggtttcagcaatatttaaggagatgtaagagctttacaaaaagacacttgatacttgttttcaaaccagtatacaagataagcttccaggctgcatagaaggaggagagggaaaatgttttgtaagaaaccaatcaagataaaggacagtgaagtaatccgtaccttgtgttttgttttgatttaataacataacaaataaccaacccttccctgaaaacctcacatgcatacatacacatatatacacacacaaagagagttaatcaactgaaagtgtttccttcatttctgatatagaattgcaattttaacacacataaaggataaacttttagaaacttatcttacaaagtgtattttataaaattaaagaaaataaaattaagaatgttctcaatcaaa

SEQ ID NO: 30168 - protein, 72 aa, Homo sapiens
MYGVLPWNAFPGKVCGSNLLSICKTAEFQMTFHLFIAAFVGAAATLVSLLTFMIAATYNFAVLKLMGRGTKF

SEQ ID NO: 30169 - DNA, 1335 bp, Homo sapiens
ggccaacatcaagctcattctttggagcgggtgtgtcattgtttgggaaaatggctaggacatcccgacaagtttgtgggcatcacctatgccctgaccgttgtgtggctcctggtgtttgcctgctctgctgtgcctgtgtacatttacttcaacacctggaccacctgccagtctattgccttccccagcaagacctctgccagtataggcagtctctgtgctgatgccagaatgtatggtgttctcccatggaatgctttccctggcaaggtttgtggctccaaccttctgtccatcttgctcatttcatgggggtattatccattcagtcatcgtaggtgatttgaaggtcttgatttgttttagaatgatgcacatttcatgtattccagtttgtttattacttatttggggttgcatcagaaatgtctggagaataattctttgattatgactgttttttaaactaggaaaattggacattaagcatcacaaatgatattaaaaattggctagttgaatctattgggattttctacaagtattctgcctttgcagaaacagatttggtgaatttgaatctcaatttgagtaatctgatcgttctttctagctaatggaaaatgattttacttagcaatgttatcttggtgtgttaagagttaggtttaacataaaggttattttctcctgatatagatcacataacagaatgcaccagtcatcagctattcagttggtaagcttccaggaaaaaggacaggcagaaagagtttgagacctgaatagctcccagatttcagtcttttcctgtttttgttaactttgggttaaaaaaaaaaaaagtctgattggttttaattgaaggaaagatttgtactacagttcttttgttgtaaagagttgtgttgttcttttcccccaaagtggtttcagcaatatttaaggagatgtaagagctttacaaaaagacacttgatacttgttttcaaaccagtatacaagataagcttccaggctgcatagaaggaggagagggaaaatgttttgtaagaaaccaatcaagataaaggacagtgaagtaatccgtaccttgtgttttgttttgatttaataacataacaaataaccaacccttccctgaaaacctcacatgcatacatacacatatatacacacacaaagagagttaatcaactgaaagtgtttccttcatttctgatatagaattgcaattttaacacacataaaggataaacttttagaaacttatcttacaaagtgtattttataaaattaaagaaaataaaattaagaatgttctcaatcaaa

SEQ ID NO: 30170 - protein, 74 aa, Homo sapiens [sequence omitted]

SEQ ID NO: 30171 - DNA, 1980 bp, Homo sapiens
tgttccctacagctcaccttcatgattgctgccacttacaactttgccgtccttaaactcatgggccgaggcaccaagttctgatcccccgtagaaatccccctttctctaatagcgaggctctaaccacacagcctacaatgctgcgtctcccatcttaactctttgcctttgccaccaactggccctcttcttacttgatgagtgtaacaagaaaggagagtcttgcagtgattaaggtctctctttggactctcccctcttatgtacctcttttagtcattttgcttcatagctggttcctgctagaaatgggaaatgcctaagaagatgacttcccaactgcaagtcacaaaggaatggaggctctaattgaattttcaagcatctcctgaggatcagaaagtaatttcttctcaaagggtacttccactgatggaaacaaagtggaaggaaagatgctcaggtacagagaaggaatgtctttggtcctcttgccatctataggggccaaatatattctctttggtgtacaaaatggaattcattctggtctctctattaccactgaagataggactactgaagccctaactcagccaaccttacttacagcataagggagcgtagaatctgtgtagacgaagggggcatctggccttacacctcgttagggaagagaaacagggtgttgtcagcatcttctcactcccttctccttgataacagctaccatgacaaccctgtggtttccaaggagctgagaatagaaggaaactagcttacatgagaacagactggcctgaggagcagcagttgctggtggctaatggtgtaacctgagatggccctctggtagacacaggatagataactctttggatagcatgtctttttttctgttaattagttgtgtactctggcctctgtcatatcttcacaatggtgctcatttcatgggggtattatccattcagtcatcgtaggtgatttgaaggtcttgatttgttttagaatgatgcacatttcatgtattccagtttgtttattacttatttggggttgcatcagaaatgtctggagaataattctttgattatgactgttttttaaactaggaaaattggacattaagcatcacaaatgatattaaaaattggctagttgaatctattgggattttctacaagtattctgcctttgcagaaacagatttggtgaatttgaatctcaatttgagtaatctgatcgttctttctagctaatggaaaatgattttacttagcaatgttatcttggtgtgttaagagttaggtttaacataaaggttattttctcctgatatagatcacataacagaatgcaccagtcatcagctattcagttggtaagcttccaggaaaaaggacaggcagaaagagtttgagacctgaatagctcccagatttcagtcttttcctgtttttgttaactttgggttaaaaaaaaaaaaagtctgattggttttaattgaaggaaagatttgtactacagttcttttgttgtaaagagttgtgttgttcttttcccccaaagtggtttcagcaatatttaaggagatgtaagagctttacaaaaagacacttgatacttgttttcaaaccagtatacaagataagcttccaggctgcatagaaggaggagagggaaaatgttttgtaagaaaccaatcaagataaaggacagtgaagtaatccgtaccttgtgttttgttttgatttaataacataacaaataaccaacccttccctgaaaacctcacatgcatacatacacatatatacacacacaaagagagttaatcaactgaaagtgtttccttcatttctgatatagaattgcaattttaacacacataaaggataaacttttagaaacttatcttacaaagtgtattttataaaattaaagaaaataaaattaagaatgttctcaatcaaa

SEQ ID NO: 30172 - protein, 53 aa, Homo sapiens
MLRYREGMSLVLLPSIGAKYILFGVQNGIHSGLSITTEDRTTEALTQPTLLTA

SEQ ID NO: 30173 - DNA, 1966 bp, Homo sapiens
ccctttctctaatagcgaggctctaaccacacagcctacaatgctgcgtctcccatcttaactctttgcctttgccaccaactggccctcttcttacttgatgagtgtaacaagaaaggagagtcttgcagtgattaaggtctctctttggactctcccctcttatgtacctcttttagtcattttgcttcatagctggttcctgctagaaatgggaaatgcctaagaagatgacttcccaactgcaagtcacaaaggaatggaggctctaattgaattttcaagcatctcctgaggatcagaaagtaatttcttctcaaagggtacttccactgatggaaacaaagtggaaggaaagatgctcaggtacagagaaggaatgtctttggtcctcttgccatctataggggccaaatatattctctttggtgtacaaaatggaattcattctggtctctctattaccactgaagatagaagaaaaaagaatgtcagaaaaacaataagagcgtttgcccaaatctgcctattgcagctgggagaagggggtcaaagcaaggatctttcacccacagaaagagagcactgaccccgatggcgatggactactgaagccctaactcagccaaccttacttacagcataagggagcgtagaatctgtgtagacgaagggggcatctggccttacacctcgttagggaagagaaacagggtgttgtcagcatcttctcactcccttctccttgataacagctaccatgacaaccctgtggtttccaaggagctgagaatagaaggaaactagcttacatgagaacagactggcctgaggagcagcagttgctggtggctaatggtgtaacctgagatggccctctggtagacacaggatagataactctttggatagcatgtctttttttctgttaattagttgtgtactctggcctctgtcatatcttcacaatggtgctcatttcatgggggtattatccattcagtcatcgtaggtgatttgaaggtcttgatttgttttagaatgatgcacatttcatgtattccagtttgtttattacttatttggggttgcatcagaaatgtctggagaataattctttgattatgactgttttttaaactaggaaaattggacattaagcatcacaaatgatattaaaaattggctagttgaatctattgggattttctacaagtattctgcctttgcagaaacagatttggtgaatttgaatctcaatttgagtaatctgatcgttctttctagctaatggaaaatgattttacttagcaatgttatcttggtgtgttaagagttaggtttaacataaaggttattttctcctgatatagatcacataacagaatgcaccagtcatcagctattcagttgacctgaatagctcccagatttcagtcttttcctgtttttgttaactttgggttaaaaaaaaaaaaagtctgattggttttaattgaaggaaagatttgtactacagttcttttgttgtaaagagttgtgttgttcttttcccccaaagtggtttcagcaatatttaaggagatgtaagagctttacaaaaagacacttgatacttgttttcaaaccagtatacaagataagcttccaggctgcatagaaggaggagagggaaaatgttttgtaagaaaccaatcaagataaaggacagtgaagtaatccgtaccttgtgttttgttttgatttaataacataacaaataaccaacccttccctgaaaacctcacatgcatacatacacatatatacacacacaaagagagttaatcaactgaaagtgtttccttcatttctgatatagaattgcaattttaacacacataaaggataaacttttagaaacttatcttacaaagtgtattttataaaattaaagaaaataaaattaagaatgttctcaatcaaa

SEQ ID NO: 30174 - protein, 76 aa, Homo sapiens [sequence omitted]

SEQ ID NO: 30175 - DNA, 3764 bp, Homo sapiens
gcggcggcagcggcgggcgcgagcggcagctgtcaggccaccgaggtccaagccgcacttgctgccccattgaggacgaggaggcagcaggagcagtgacggtgactctaaggagccggattcccggcacgcagagctgacctgcctggcacccgcggccctctcctgtttccttcccattgtgttggcaccctaaaaagaaagaataaaacaacaacaggaaaaaaaggaaaatatttaaattgtgacaaaaacccactgggttctcttggttacaaactccttcccttctggtgctgcaaaaatgagtgggaaatccctgctcttaaaggtcattctcttgggtgatggtggagttgggaaaagttcgcttatgaaccgttacgtaaccaacaaatttgactcccaggcttttcacaccataggggtagagttcttaaatcgagatctggaggtagatggacgctttgtaaccctccagatctgggacactgcagggcaggaacgtttcaagagccttaggacacccttctacaggggagcagactgctgcctcttgaccttcagcgtggatgatcggcagagcttcgagaatcttggtaactggcagaaagaatttatttactatgcggatgtgaaggaccctgagcatttcccctttgtagttctgggtaacaaggtagacaaagaggataggcaagtgactactgaggaggcacaaacctggtgcatggagaatggggattacccttatttagaaactagtgccaaagatgatactaatgtgacagtggcctttgaagaagctgtcaggcaggtgctggctgtagaggaacagctggagcattgcatgttgggtcacaccattgacttgaacagtggctccaaagcagggtcttcgtgctgttaaagatagggagccttttaaaaatgtgccccaaattgatcagtcagtagtgtaagaataactgtgcccctctaagagtgcacacacacgcacacaagagggtaagagacaaggttctgattgtgaaacagagcctttcaaattgaagtgtagattgatttaaaaaaattaaaaattaaaaaaaatgaagctctatcaagccaagtgtattttgcgtgatttctgctatttccccttcttgtgtgtctcaggacatatcagaaaattttagtcctgagacagttaaatattttttaaatcacagtttaaacctagaacccagctgcatgaaggagttaaagagctacaactatttcttaaagtgttccattaatcaactaacaaatgtcactatcagactcttgccaagcagtttctgacatttctgccaaaggggaaaaaaatcagactttgagctgtattacaataaaaataataatgcaaataaggattcctaggcttgaattaaagaagttgtaatgattaggagtgcaaaagtataatgatatacactgacttgtttaaatccttatgtatggttcgctcccatctgagcttttcaaaaaatcccatctcaataagagatactctaatgacactggcaattgattatacttcttgtgtttgaagtcataggatactagtgaatggattatgcttaaatatgccaaccacctttgcaaataaatggttggtctgcttttaattcctaagtctacttttgctgcatagagatgttgcttctctgacaacctcttaccaatttagcaatgctgcttagtatatgaatttggatgcagtgctctctgctcatcatttagatggtcctttgatccaacatgctgggctcatggagaaggcttcataaaagattgggggataatgaacttttctcacaaggctccttaactcaaatatttattgcagaagaaggaactggtttcttatatgttgcactgtatgttcaactagcctaattaggacattgaaagtgacagaagagcagatcttaacccagtgttagaatgaatttcccataaacagagttgtccaacagtggaatggactgccttaatagtgagctccctgcctctgaaaatattcactggatgaccatctgttagaataccataaaaagattttctgtgctggctacatgttcaatataaagtcctttctggctctaagttctatgaatatataaactacatcagtgccatgctgtggttagatttatctgatgataacagctaagactatggagagggactttaaaaattctcaaaccattctgtgatcaatctttaacagcaactacatagctcttccttttgcttttgcactgtggcaggaaaaattcttgagctctgagtaatctttatgtgactgataaaaaacatcttaaagctcccatgttaaaatataaaaatggtttgacaatttttgattaccatgactgtcagttatatactatattatgaatatgcagtgtggttcttgttggttgatctgtttaccctgcatagattttaatctgtactttaaaacatctatgataaaaatagtgacagacagaaattaccccaaaaagagacctaggccaggaagggggtgggagctttcataggaatacagcctagaactctccattgtagccacgtatggaatcagccttacttacatgtaggacctttgtgctttaagagctctgggacatattggccaaatagaaaagaagaggacagtatttcaactcagtcatactcaatatttccaattaagatataatcctgacaccattgttcaattaactttgacgccagaagtcaaagccagaactgggaccccacagctcttaagtactggtccctatcctgcctatgcctatagccagccacactggtttccaagttctgtgatcattttgctacaatcatgttagggtgaaaatctgtacgtcagaactgttaaatgctaattatttttaagtgcatgagacctggggccttctctttctacttgcactctgcttatactagtttctatttgtagatctcaggccttcatcataaagacctctatcaactcacaaaagtatttgtctctattagagtggcatgtggtcatttgagtaaaaaaaaaaaaattacatgggtatcggattcataggcatcctgtccatctaagacaagtgttaattttattggcccatcagctggagcccctttcctcttagccataccattgttttctaccaaattaccactcaatatcttaatgaaagcactcaacattaagtgacataaacagtggcatttgggtaagcaacactcagtggggtgctgacatacagtttgggtaagattaaaaaacaccaaaggctgaaatctgtgagtaccaagaactgtgcatataggtttagaaattgactgtgtaccctagaatgtgcagtgtaatattttcaataggtgtttttttaaagaacactagatttttggaataatatatttctaattaggactatactgtttttcaatggtctgttaaaacatcatacagaatatttatttagtttattgtcatgtattggctaactttcaggggcctcagattccatatgtcttcagtggattgatgaatatcaggttaatttgtgcctgccccagccatctctactttattctgaggtattccacaatcctcttgttgcaggtgctgctaaaaaaaactcaaaattgtgtatcaaatattttctttcaactgtaaaaaatcatctgtgttaaagtgaataaaaagtgcattttgaataaccagcaca

SEQ ID NO: 30176 - protein, 201 aa, Homo sapiens; identical to SEQ ID NO: 4179

SEQ ID NO: 30177 - DNA, 1251 bp, Homo sapiens
atgaagccaacggcagtggaagggcttcagactgttcacttgcttccaagcatcaggagtcaagaacaggccccacaggagcctcctagccacactatacataaaggaagtaatacctgctctctaagtcagggaaaaatggagcaggttttccagccactgccttcatggccattcactttggacagccctgcatgctgtttccatggagttgctccttctctggggccagtgatgccaaatccagcaaaggagaagtcccctgaagagctcacagaagggcaacctagcaacctgtccttgagccaggaaatgaaagagccatatcagcaacagagagctgtggtttggggggctgctgagaagaaaggagacaggcgcatccgcacacagaaagcactcagtaaatgctgtttccccccttccccctatacaaagagctatggggaccggaaggcgaaacagagctgtcgacgcgggagcatacgctgcccaccagtggagcgcaggtcatcaaagccgaatccgaatttgaattctgtgcggctgattgcagagctggtctcctactactaccaaatctgtatcagcaacagcagcagctccaaggacagtatgtgtggcaatgcaagtacctgctgtcatgacatcagaaaatttcaactatggcggttgaatgccaagcaacaggaccatccaaatcaccttgaacgctgcgctgtgtgtcacttcatccaatcagacctcaagttggcccacaatgtcagccatgtggtgactacaaaaggccctcccactggtgatcagcagcttatctgttcctcctatccactggcagctgcctccaagatggctgagccttcctctgagatgacctccaacaaaggcctgagcaccaaggagcccaaagcggccaatgccacgatggcccacaagcagaagaggcatgggcactctcaccccagccgctgcagggacagcttcaccacctattttccccgggtgctgaagcaggttcacgcgggcctcagcctttcccccgaggcagtggatgtcatagattccttcgttcacgacatcttggagcacatcgccaccaaggccggccacttggcccactataccaagtgcaccaccatcacctcctgcgagatgcagaccaccattcgcctgatgttcccggggcagatgggcaagcacgccatatccaggggctccaagactctgctccactacaccaggagcaagtga

SEQ ID NO: 30178 - protein, 416 aa, Homo sapiens [sequence omitted]

SEQ ID NO: 30179 - DNA, 1228 bp, Homo sapiens
ctttcctgttaagtgggcacactactacctccttcacagggctgctgagaagaaaggagacaggcgcatccgcacacagaaagcactcagtaaatgctgtttccccccttccccctatacaaagagactgaaagcaaccgcggctgcccggaggtccgaactggagggtggccgcagccgtgacttccttgggaaccgcgctgcctcgactcggctacctctctgcgaagcactcgctaagccgggcagccccggggtcgcttagcggcccaggaggcgccagcgatcctgttcccctgcagagctatggggaccggaaggcgaaacagagctgtcgacgcgggagcatacgctgcccaccagtggagcgcaggtcatcaaagccgaatccgaatttgaattctgtgcggctgattgcagagctgtcttgaggccctgaggactgggatctgcgacccccagtggacaaaagtcgactctaccccagaggctaattttctcaaggcaggcacctgttgagaggctgcaagtaaaatacaggggaacgctagtttccgagctcatgtaagaatctgagaaataacgggggtaaactttgacaaaggggtgtgtgattgagacctgaggtcatgagattaatgggttcttattacctcttgcggggggaggtagtaaaggggaggggcaggtggcctgtggcgtcctgaagatttttcatgcattctttttccgagaactaaacattgtcaactctaatatatctatagcgcaacttgcttcaaggacagtaataattttcatttaataattttccatttaatccctttactacatggtcatttctgtctcttatattcctaggtttccctttataaggattagtcagatcaacattatatctctaacaatgttccttagctttttcactctcattatacctagagaatttaatggaataaaccagattttatatatatatatatatatatatataaatgtgtgtgtgtgtgcgtgtgtgtgtgtataaaattactcaacattcaagtagtcttgaaaaaagatgggtaggagtcaccttctttcccttcatcagttaccagtgttctcttaacataatggaagaggcaggaggtattcccacctacaactcaggattcctatgtcctatgggttcagttgtgtccccccccccaaaaaaaaaacaccaaatacatctattggactcctg

SEQ ID NO: 30180 - protein, 30 aa, Homo sapiens
MGTGRRNRAVDAGAYAAHQWSAGHQSRIRI

SEQ ID NO: 30181 - DNA, 1876 bp, Homo sapiens
ctcctttctcagcgcaaccaggccatgggagtgctccatcccctgcctcgcagttactgattctccaagccgggcgccgcccagtcctggtggggcttcccccacccctctccgcgccgggaaatcgcgcgctctttctttacctgcgctccactggtgggcagcgtatgctcccgcgtcgacagctctgtttcgccttccggtccccatagctctgcaggggaacaggatcgctggcgcctcctgggccgctaagcgaccccggggctgcccggcttagcgagtgcttcgcagagaggtagccgagtcgaggcagcgcggttcccaaggaagtcacggctgcggccaccctccagttcggacctccgggcagccgcggttgctttcagtctctgcccattgagacaaaagagcgtgacaagccgcgcgacgcggccaatcagcggggcgaggaggcggcctccccaagcagcctctggccctgaagctactgctagcaagactcgggagctggctggcgggggctgaggccgacaggcacgggagccggcgcggcgtcaagtggagctcggacgcacggaccaggcccatttccctttcatctacagcaatgttcttactcctctcctgctgtaaagccactcatcttcgatttccctgaggacttctgctcctacagactctcgacggagtaaagcttccgatagaggggaaacagattcgctactagtgttgatagtcaagttactaaggttctttatcaacgtctcggagcagatttgagaggcccctgaatcgtcccgggaattttcttcggtgagcatttgtggagactctgggatgtaggttggattaaacttctgtgatgggtccatcggcgtcttgacacaacactaagcttctcctggatctttgaaacgtagcagaaactgatgacggagcctcaaattgctacaaggtagcccggaaagagcaagagtgagtgtacttcggatgaagggaatgtggaccctcaggactaaagcagtgggagaggcctgggaggtggggcctggggagggcgaggtctgctctgaagtcaccaagctcctgatcttagaagagatggtgggcgcaggctctggaggctcaagcggaggaggggaaggaggcgagtccggaaaccctcggccaatcagagagggctggggcggcgcctgctagaaggcttagcactgcagggctctgggcgggaaggctaacctggtgcggagccagcctgggtctcagccccgcgtacggcctttcacgagtcttcaagccttcaggctttcttctagtcaagatgagtgataaaccagacttgtcggaagtggagaagtttgacaggtcaaaactgaagaaaactaatactgaagaaaaaaatactcttccctcaaaggaaactatccagcaggagaaagagtgtgttcaaacatcataaaatggggatctcctccaaagagcagatttcagcattgcctgacagtcttggttttaggcttgtttttttgtaaacctgtgtgtttgtagagatttcagacatcttctgatttcttctcacctatattccctggttaagaggtcaggggtagtgaatgtttccttaagttcctttttaaacttcccattggtatgtaaattccaaatggcagatgctgtcaataaccttgccatggatgacctttgtgtaggtagtccttgcacctcatgcaggataagccaattttaactttctacaatgggtgcctcaatagtttcataatcttcatgaagttgcatcctttggcagcttcttacagtttattttcacttccaatgtagcaataaaataataaatataatcgttgttgtctga

SEQ ID NO: 30182 - protein, 45 aa, Homo sapiens
MSDKPDLSEVEKFDRSKLKKTNTEEKNTLPSKETIQQEKECVQTS

SEQ ID NO: 30183 - DNA, 197 bp, Homo sapiens
ccgcacacagaaagcactcagtaaatgctgtttccccccttccccctatacaaagagctatggggaccggaaggcgaaacagagctgtcgacgcgggagcatacgctgcccaccagtggagcgcaggtaaagaaagagcgcgcgatttcccggcgcggagaggggtgggggaagccccaccaggactgggcggcgcc

SEQ ID NO: 30184 - protein, 56 aa, Homo sapiens
MLFPPFPLYKELWGPEGETELSTREHTLPTSGAQVKKERAISRRGEGWGKPHQDWA

SEQ ID NO: 30185 - DNA, 2377 bp, Homo sapiens
atcgcgcgctctttctttacctgcgctccactggtgggcagcgtatgctcccgcgtcgacagctctgtttcgccttccggtccccatagctctgcaggggaacaggatcgctggcgcctcctgggccgctaagcgaccccggggctgcccggcttagcgagtgcttcgcagagaggtagccgagtcgaggcagcgcggttcccaaggaagtcacggctgcggccaccctccagttcggacctccgggcagccgcggttgctttcagtctctgcccattgagacaaaagagcgtgacaagccgcgcgacgcggccaatcagcggggcgaggaggcggcctccccaagcagcctctggccctgaagctactgctagcaagactcgggagctggctggcgggggctgaggccgacaggcacgggagccggcgcggcgtcaagtggagctcggacgcacggaccaggcccatttccctttcatctgttgtagttctagcagtgagaacttctcactgaatgccacagaaattaaagacacagttgttggaggtatgatgtcagacagcatttgtcaccaaggttggcagaaaatggctagtccaggagagttgaaaatgagcttccacatctgcaaatcgggatgtgttggaacagtactcaacttgtggattcaaggaagtatgaacacagagtctgcataaggaaaggaaaaagatgcatttatctcctaattacactggtgatttccacttatgtcactctgtacatccatgtccctttcttcattttaacttcttatttaaaaataatttcaaacatttaaaaatgttgcaagcataaataaagcttaaagaacacccatgtcccctttaccctaattcccctattattaatgtttctccccatttgctttattatttaagtgtgcactctgtctatacacacacaggatattttttccctgaactgtgaattgcatacatcaattttcagtattcctcgattcaatgtttgcaaatccaaattcttttaaaaaagactgtgttttatctctatgacaatggaaccgttattgcagaatattataaaatgaaaagtcacatggtatatgtgatactgtgaaatatatatttgctcttcgatcctgtttcctggcatgcaactcttaaaatccttagaatttccaaagtgatatctttttgtatgctaataattgactgatggctggcagcctctggttgcttcaggatgggaactagtcaccagagagaccaaggcgccattagagggttgggacttaacagcctcattcccgacctccagggaggggagaggggtggaaggttaagtcgatcaccagtggccaatgatttaatcaatcatacctatgtaatggagcttccataaaatccccaaggaactgggtttggttagcttccagatagctgaatatatggaggttcctggagggtggtgacccaaggagggcatggaagctctgagccccttccccagtacctcaccctatgcatctcttcatctctatcctttgcaatatcctttataataaactggtcaacgttaggtatttccctgagttctgtgagcctttctgacaaattaatcaaacccaaagagggggtcatgtgaaccgaaacttgaagcccatctgtcagaagttctggaggactggatttgcgactggtgtctgaagggcctgggaacagtcttgtgagacctagtcctcagcttgtgggatatgacgctatctccaggtagatttgtgtcagaattgaattggagtacacccagctggtgtttgctgcagaactgattgctcacttagtgtgtgggaaaaccccacacatttgaacatggaaatattctttgttgattgccgtgatgtgaaagcaaaggaaaaagtttgtgtgttttcccctcagagcatattttaaagctaagttgctaataattgcttaaatttactatatttgcctttataaaaactttatgtatgtttaaagcttgaagctattcaattataatataaacgtggatttacaactgaagcatgttataatttaaataattgagttttacaaattggttcatataaaatcctaggcaatactgtaaaattatacagacttgtcaactttttccacttaaatcttctgagcaaaatttaagggtgtagtagttttcaagtaatttcaaatgtcaatattaatatttagttttgtgatgtttatgtgggcatattttctgatataaaaaatgacttttaggagttgagatcaataaaataaggaggtaataaatacctacatctgtttaaagacataaaatatacaatttaacactaaagctacttggtat

SEQ ID NO: 30186 - protein, 60 aa, Homo sapiens
MCWNSTQLVDSRKYEHRVCIRKGKRCIYLLITLVISTYVTLYIHVPFFILTSYLKIISNI

SEQ ID NO: 30187 - DNA, 1060 bp, Homo sapiens
ctttccgggctaccttgtagcaatttgaggctccgtcatcagtttctgctacgtttcaaagatccaggagaagcttagtgttgtgtcaagacgccgatggacccatcacagaagtttaatccaacctacatcccagagtctccacaaatgctcaccgaagaaaattcccgggacgattcaggggcctctcaaatctgctccgagacgttgataaagaaccttagtaacttgactatcaacactagtagcgaatctgtttcccctctatcggaagctttactccgtcgagagtctgtaggagcagaagtcctcagggaaatcgaagatgagtggctttacagcaggagaggagtaagaacattgctgtctgtgcagagagaaaagatggcaagatcgagatacatgttactcggcagagttcgtatgcatgaaagaagaccaacaaacgaggagcctaagggagttaagaaggaatcaagaccattcaaatgtccctgcagtttctgcgtgtctaacggatgggatccttctgagaatgctagaatagagaatcaagacaccaagccacttcagccataaatcttattcttgcacctttttttcttgctggtaattttatatagcaggttgagaaagctaatctatgctagaacagactatacaccaataattttgataatgagttctaggatgtatttttcttcttgtatctttttcttcctactatgatactagtaattcataagggatctgtgtaatctgaatgtatttgaataactttagctctactgtttgatttgacccaaagaatccaagacgatataagtattcccatgtgtcttagaagcccaaagtcagtgagatgaaacccaacatcaagaaattgaagcaaagttacttgtggataaagaaagcattaggtagtttggctatagcataattagattttctggctttcaaaaatttgaactgcaatcacagcaaactttgttatttttacagttttcagtacaaaaaggtgtttatatagaaacaataaagttgacatttgagtaccttt

SEQ ID NO: 30188 - protein, 160 aa, Homo sapiens [sequence omitted]

SEQ ID NO: 30189 - DNA, 856 bp, Homo sapiens
tgcagggctctgggcgggaaggctaacctggtgcggagccagcctgggtctcagccccgcgtacggcctttcacgagtcttcaagccttcaggctttcttctagtcaagatgagtgataaaccagacttgtcggaagtggagaagtttgacaggtcaaaactgaagaaaactaatactgaagaaaaaaatactcttccctcaaaggaaaaacttcattatgtgcgatatggcaagagagaaagtgaatacgctgatataagaagcaagaaaccttccttccttccagttgtgtgtcagtagaattacagagtgtccacggaaacagctcatgccctagtgtacagtggtgcagccaatgagtgacctgaagtctatgagcaacactcattgtcccaatgtgggacgagtgaccgaagctgaacccacaacagccttcctgtgatattccacgtggtggttaaaggcatggcgatgtgattctttacctgatgtttttgtttgcagtgtttgtaatcatggtcttttagggatatgaatccaaagctaagattaatatacgttccttgaccctaacatcaagttatacagagcattgtcagccattagaagaagtcagataacgcttatttcctcaaaagattggcatattaatattcacgttaatattaatacaggctacctttcattgtgctctcttctgggtcccaagtcttggtatttttagaattttttttttttctataagtgtattgctgaatttcagagcaggtgctgacttacccattgctttccttttccattgatttccagtcgcccgagtatgtggacaagagaacatactctgggattgcaacc

SEQ ID NO: 30190 - protein, 63 aa, Homo sapiens
MSDKPDLSEVEKFDRSKLKKTNTEEKNTLPSKEKLHYVRYGKRESEYADIRSKKPSFLPVVCQ

SEQ ID NO: 30191 - DNA, 2195 bp, Homo sapiens
gccagcctgggtctcagccccgcgtacggcctttcacgagtcttcaagccttcaggtgagtacctgcggcctcgcaggagccagaggaccatggggacgggaaggcgtgggggtcgcgaggcgggggatgccgcgccttcgggagccagaggggctggggttggggctggtgcttggtgtctgcgccgccgccaggcccggcgagtccgagcctttgtctttctggggcgccgccttctgcgagcgatgccgagccctcccgggggccggtccctggaaagaaggccccggggagtcggggtgggaggcggtggttggaggggtaggggacccttaaagcggccagtccgcggtagctgcaggtcagaggcttcgaggatgaagagtttgggggccgcccggaatgggccttgtggggctgggccctggttcctttccctcccgtggccgttagactgggcgtctaacaacgctaatagttatttgaaaaagtatgcaaactgctcctgacagactggcctatgcgcccggccctgctattatttattggttagttccaatttcccagctccgagcttggcgtctgatcgcttggcagaggagggtcttagggtaacctcgacagaatggaggcatgttcgacacttctgactgcttgggggcctctgcattctacgccagggactagacgaagtgtcttactccaccagggtggggccgggcttgctcatgaaagctctacctggtatatcctattgtctcttctgaacaaactcgagactttcacagggcaccaggcatttcgtcaggtccacagctacgcacgtctgagcctcatctcctccctctctgcagtgaaaacgtgaaagaagacccacttctatttggtttattccgttctgctgaagtcctgggtctgatcctagttagctgtcccttcttacagcgtttacaaaccagtgccacaaggagctattatgagacgtgtattgtagtgccttaatgtactgtcgtctttggggatttaaaatagatagaaattaatacaacttatctcattctttttttgtgtgctgctccccatctcccaagaaaaatggcaaaaccaaaagtaaatagaaagtgaagatgctcaaatggtgctatgttctgtttcaaaataattacctggttaaaaccagtctttattttttcttctatccctgtctggtcttgtgcttctatcacctccattttatccttgctgtgattttaagagtcagacaaatggctctgtgtttctagagcatcttggtttctggtgcgttatgatccaatgacatttactgcctatcagaaacggcaaatgatgtggagttgaaattattctaacaaaaatataacttttctaatatctgttgctgtttttctgttgaaaatgagcaggtagaatatacattgataggaaatgtgaaaatttttgcttgtgatcccttagtccgaagatagttctgccaggtaagttttcttaaaaatgtttttttctgtcctggcgcggtggctcacgcctgcaatcccagcactttgggaggccgaggcgggcagatcacttgaggccaggagttccagaccagcctggccaacatggctttcttctagtcaagatgagtgataaaccagacttgtcggaagtggagaagtttgacaggtcaaaactgaagaaaactaatactgaagaaaaaaatactcttccctcaaaggaaactatccagcaggagaaagagtgtgttcaaacatcataaaatggggatctcctccaaagagcagatttcagcattgcctgacagtcttggttttaggcttgtttttttgtaaacctgtgtgtttgtagagatttcagacatcttctgatttcttctcacctatattccctggttaagaggtcaggggtagtgaatgtttccttaagttcctttttaaacttcccattggtatgtaaattccaaatggcagatgctgtcaataaccttgccatggatgacctttgtgtaggtagtccttgcacctcatgcaggataagccaattttaactttctacaatgggtgcctcaatagtttcataatcttcatgaagttgcatcctttggcagcttcttacagtttattttcacttccaatgtagcaataaaataataaatataatcgttgttgtctga

SEQ ID NO: 30192 - protein, 45 aa, Homo sapiens
MFFSVLARWLTPAIPALWEAEAGRSLEARSSRPAWPTWLSSSQDE

SEQ ID NO: 30193 - DNA, 882 bp, Homo sapiens
gccggggtggcttagcccttgataacagtagattctgagatgggtgagaagtggtccacacgtggccactgtcattcctctggcataatggacttgggctcaggaggtcaagccctcttcaaggagcatgagctgaaattgctaaactttgggagttttccgtgacacccttcaaagtgctcacggtgtggcatggatcagctggggagggttgatgtggttttgccctgtggggtatctatctgtgtacttttgtctgagggaggcaactggggccacttaggccggcaggtgcccactgtgattggttgacatgataccaagcaacaggatcatccagtcaccttcaatgcagggaggatggctgacaggctccctgggtgacacttcatgcaatcagatgtcgagttggactgtgacatagagccatgtggccacactaaattcccccccacccttcccctgtccacaaccgtcattgtctgttcttgccatccagtggccactgcctccaccatggctgaggctttctctaagacaacctctgaggaagaccagagcatccaggagcccaaagaggccaactccatgacggcccagaagcagaagaactttgccgcctatttcccccgggtgctgaagcaggttcaccaggccctcagcctttcccaggaggccgtgagtgtcatggattctatggttcgtgacatactggaccgcatcgccaccgaggctggtcacctggcccactactccaagtgcgtgaccatcacctcccgggacattcggatggccgtgtgcctgctgctgccggggaagatgggcaagctcgctgagtctcagggcacgaatgccaccctcaggtacaccaaaagcaagtga

SEQ ID NO: 30194 - protein, 163 aa, Homo sapiens
MQSDVELDCDIEPCGHTKFPPTLPLSTTVIVCSCHPVATASTMAEAFSKTTSEEDQSIQEPKEANSMTAQKQKNFAAYFPRVLKQVHQALSLSQEAVSVMDSMVRDILDRIATEAGHLAHYSKCVTITSRDIRMAVCLLLPGKMGKLAESQGTNATLRYTKSK

SEQ ID NO: 30195 - DNA, 981 bp, Homo sapiens
ggaagaccagagcatccaggagcccaaagaggccaactccatgacggcccagaagcagaagaagtgagggcttcgaggctcccgtaggcgccatgccaacagcggcggagatatcttcggggacagctttgccgcctatttcccccgggtgctgaagcaggttcaccaggccctcagcctttcccaggaggccgtgagtgtcatggattctatggttcgtgacatactggaccgcatcgccaccgaggctggtcacctggcccactactccaagtgcgtgaccatcacctcccgggacattcggatggccgtgtgcctgctgctgccggggaagatgggcaagctcgctgagtctcagggcacgaatgccaccctcagaacttcattatgtgcgatatggcaagagagaaagtgaatacgctgatataagaagcaagaaaccttccttccttccagttgtgtgtcagtagaattacagagtgtccacggaaacagctcatgccctagtgtacagtggtgcagccaatgagtgacctgaagtctatgagcaacactcattgtcccaatgtgggacgagtgaccgaagctgaacccacaacagccttcctgtgatattccacgtggtggttaaagaatattagaaaaatattatgaaaatagttgaagagaaatgttatgaaaatagttgaagctgtacttactgcacaaggagaccaagaaaaactcccacaaaatcagctgcaagtaaatccctctggatggtgccgccacatgttcctacaagtccagaacaacccttgccaaaccaaagacacttggcagaaccctgttcctttctagagacagagctgtatacctgttccaaaacaccacatctcactcagtgacttatttctcattatgctaattgttttgctgtaaagtgccaatgtttctgtgaattaagacatacgaataaatttctgaagttacccttgcata

SEQ ID NO: 30196 - protein, 70 aa, Homo sapiens
MDSMVRDILDRIATEAGHLAHYSKCVTITSRDIRMAVCLLLPGKMGKLAESQGTNATLRTSLCAIWQERK

SEQ ID NO: 30197 - DNA, 711 bp, Homo sapiens
ggtggtactacgaatcctctctaaatcatactcctcatctgtttattccttatttcttcctccaggagcccactttctcttgagaaagctgcagatcctcgttcagcatggtgcaccagggttcccaaagacctgatgtgtgaggcttctttgccttttcataggtcttggctcaaatcctgactcccctgtgaagatgtcctgaccctcccagcctagagccactactccctccttgaatctcaggatctccaactgtgacatggccatactatttgccacatccccacagacggattgtgatgaggaaggaaagagagagtccatgtagcatgctagatgcggtgtctggtgcaggcctgtgggctcccctaaaatgtggcactccaatgacaatccatccctctctatggagcctacgacagcacacacctcagcgttctagagaggacaggtttcaggccaccggaggaatttagggagtgactacaggagcgaccttatcccacactgtttgaacaagcactgtgggccaatggccatggactgagccagtggaaagtggggcttggacccctctgattggacgtttccatcatcccaacgatgcgttagttccaagtcatgaaggtgggtatttccagaaataaaacaatataacctggaaaagaacagacagaatcagatacattagaagtagttggagtaata

SEQ ID NO: 30198 - protein, 58 aa, Homo sapiens
MRKERESPCSMLDAVSGAGLWAPLKCGTPMTIHPSLWSLRQHTPQRSREDRFQATGGI

SEQ ID NO: 30199 - DNA, 890 bp, Homo sapiens
gaagctggcccgagacgtggagccatgctgcgtaccgaagtgccccggcttccccggtccacaaccgccattgtctggtcgtgccatctaatggccactgcctccgccatggctggaccttcctctgagacgacctctgaggaacagctgatcacccaggagcccaaagaggccaactccactacgtcccagaagcagagcaagcagaggaagcgagggcgccatgggccccgcaggtgccactccaactgccgcggggacagcttcgccacctatttccgccgggtgctgaagcaggttcaccagggcctcagcctttcccgggaggccgtgagtgtcatggattctttggttcatgacatattggaccgcatcgccaccgaggctggtcgcctggcccgctccaccaagcgccagaccatcactgcctgggagacccggatggctgtgcgcctgctgctgccggggcagatgggcaagctcgccgagtccgaaggcacgaaggctgtcctcagaacttcactgtatgccatacagcaacagagaaagtgaatacgctgatacaagaagcaagaatattagaaaaatgtcatgaaaatagttgaagagaaatgctcactgcacaaggagaccaagaaaaaccccccacgaaatcagccacaactaaatcgctctggacggtgccgccaggtgaccctacatgtccggagcaacactttgaaaaccaaagacgcttggcagaaccctgttcctttccagagacagagctgtgtaccttgtctaaaacaccgcatctcactcagtgacttatttctcattatgctaattgttttcgctttaaagcgccagtctttctgtcaaatgggacatacaaataaatttctaaaatt

SEQ ID NO: 30200 - protein, 175 aa, Homo sapiens
MLRTEVPRLPRSTTAIVWSCHLMATASAMAGPSSETTSEEQLITQEPKEANSTTSQKQSKQRKRGRHGPRRCHSNCRGDSFATYFRRVLKQVHQGLSLSREAVSVMDSLVHDILDRIATEAGRLARSTKRQTITAWETRMAVRLLLPGQMGKLAESEGTKAVLRTSLYAIQQQRK

SEQ ID NO: 30201 - DNA, 1964 bp, Homo sapiens
atgaaattggccatcacagagctaaatgttgatcatcggagccatgcgaccataccaaagtgccccccacttccctggtccccaaccgtcactctctgttcttgctatctaatggccgctgcttccgccatggctgaggcttcctctgagacaacctcggaggaaggccagagcatccaggagcccaaagaggccaactccacgaaggcccagaagcagaagaggcgagggtgccgaggctcccgcaggcgccacgccaaccgccgtggggacagcttcggggacagcttcaccccctatttcccccgggtgctgaagcaggttcaccagggcctcagcctttcccaggaggccgtgagtgtcatggattctatgatccatgacatattggaccgcatcgccaccgaggctggtcagctggcccattacaccaagcgcgtgaccatcacctcccgggacatccagatggccgtgcgactgctgctgccggggaagatgggcaagctcgccgaggcccagggcacgaatgccgccctcagaacttcattatgtgcgatatggcaacagagaaagtgaatatgctgatacaagaagcaagaaaccttccttacttccaggtgtgtgtcagtaggattacggagtgtccacggaaacagctcatgccctagtgtacagtggtacagccaatgagtgacctgcagtctatgagcaacagtcattgacccaatgtggggggagtgacccaagctgaacccacagcagccttcctgttatattcaacctggtgtttaaaggaacggcagtgtgattctttacctgatgtttttgtttgcattgcttgtaatcatgatcttttagggatatgaatccaaagctaagattagaatatgtaccttgtccctaacatcaagttatacagaacattggcaaccattagtagaagtcagataaggcttatttcctcaaaagattagcatatttatattcatgttaatattaatataggctacctttcattgtgctctcttctgggtcccaagtcttggcattttaagcatttttttctataagtgtattgctgaatttcagagcaggtgctcactttcccattgctttccttttccattgatttccagtcgcccgagtatgtggacaagagaacatactctgggactgcaacccacaggaatttattatgttgtgccttgaagctcaacatgtggccatttttgttaaatgtttcccgtaaattttgaaacatctcataaacaacccttctccttcatatgtagaaaccagtaaaggatggcactctcagtcaaaccatgaaacaaaagctggataaatgacaaaaatcaaaattttcttgagcccatcagaagtgggaaagaaccaccccagagggcccaacacatagccacatagattattccaccatttaaagaggaccccttggtcaagagggaaacagggtcagggcaagatggtagccagagcttccctgagtagtgcagatgggaagaggggaaggtcacctccagagctccacttgggatccatagagaaatgatatagaaccaagaagtccactcattgggatctgttactttctgtttttccagattattagaaaaatattacagaaatagctgaagagaaatgttatgaaaatagttgaagttgtgcttattgcacgaggagaccaagaaaaaccccacaaaatcagctgcaagtaaatccttctggatggtgccaccaaatgttcctacaagtccggaacaacccttgccaaaccaaagacccttgccagaaccctgcttcttcccagagacagagctgtgtacctgacaaaacaccacatctcactcagtgacttatttctcattatgctaattgttttgctgtaaaatgccaatgtttctgtgaattaagacatacgaataaatttctgaagttacccttgc

SEQ ID NO: 30202 - protein, 191 aa, Homo sapiens
MKLAITELNVDHRSHATIPKCPPLPWSPTVTLCSCYLMAAASAMAEASSETTSEEGQSIQEPKEANSTKAQKQKRRGCRGSRRRHANRRGDSFGDSFTPYFPRVLKQVHQGLSLSQEAVSVMDSMIHDILDRIATEAGQLAHYTKRVTITSRDIQMAVRLLLPGKMGKLAEAQGTNAALRTSLCAIWQQRK

SEQ ID NO: 30203 - DNA, 523 bp, Homo sapiens
ctggcccattacaccaagcgcgtgaccatcacctcccgggacatccagatggccgtgcgactgctgctgccggggaagatgggcaagctcgccgaggcccagggcacgaatgccgccctcagaacttcattatgtgcgatatggcaacagagaaagtgaatatgctgatacaagaagcaagattattagaaaaatattacagaaatagctgaagagaaatgttatgaaaatagttgaagttgtgcttattgcacgaggagaccaagaaaaaccccacaaaatcagctgcaagtaaatccttctggatggtgccaccaaatgttcctacaagtccggaacaacccttgccaaaccaaagacccttgccagaaccctgcttcttcccagagacagagctgtgtacctgacaaaacaccacatctcactcagtgacttatttctcattatgctaattgttttgctgtaaaatgccaatgtttctgtgaattaagacatacgaataaatttctgaagttacccttgc

SEQ ID NO: 30204 - protein, 36 aa, Homo sapiens
MAVRLLLPGKMGKLAEAQGTNAALRTSLCAIWQQRK

SEQ ID NO: 30205 - DNA, 479 bp, Homo sapiens
cctagtgtacagtggtgcagccaatgagtgacctgaagtctatgagcaacactcattgtcccaatgtgggacgagtgaccgaagctgaacccacaacagccttcctgtgatattccacgtggtggttaaagaatattagaaaaatattatgaaaatagttgaagagaaatgttatgaaaatagttgaagctgtacttactgcacaaggagaccaagaaaaactcccacaaaatcagctgcaagtaaatccctctggatggtgccgccacatgttcctacaagtccagaacaacccttgccaaaccaaagacacttggcagaaccctgttcctttctagagacagagctgtatacctgttccaaaacaccacatctcactcagtgacttatttctcattatgctaattgttttgctgtaaagtgccaatgtttctgtgaattaagacatacgaataaatttctgaagttacccttgcata

SEQ ID NO: 30206 - protein, 54 aa, Homo sapiens [sequence omitted]

SEQ ID NO: 30207 - DNA, 1435 bp, Homo sapiens
aacttcattatgtgcgatatggcaagagagaaagtgaatacgctgatataagaagcaagaaaccttccttccttccagatgtgtgtcagtagaattacagagtgtccacggaaacagctcatgccctagtgtacagtggtgcagccaatgagtgacctgaagtctatgagcaacactcattgtcccaatgtgggacgagtgaccgaagctgaacccacaacagccttcctgtgatattccacgtggtggttaaaggcatggcgatgtgattctttacctgatgtttttgtttgcagtgtttgtaatcatggtcttttagggatatgaatccaaagctaagattaatatacgttccttgaccctaacatcaagttatacagagcattgtcagccattagaagaagtcagataacgcttatttcctcaaaagattggcatattaatattcacgttaatattaatacaggctacctttcattgtgctctcttctgggtcccaagtcttggtatttttagaattttttttttctataagtgtattgctgaatttcagagcaggtgctgacttacccattgctttccttttccattgatttccagtcgcccgagtatgtggacaagagaacatactctgggattgcaacccacaggaatttattatgttgtgccttgaagctcaatatgtggccatttttgttaaatgtttcccgtaaattttgaaacatctcataaacaacccttctccttcatatgtagaaaccagtaaaggatggcactctcagtcaaaccacgaagcaaaagctggataaatgacaaaaatcaaaattttcttgagcccgtcagaagtgggaaagaaccaccccagagggacccaacacatagccacatagattatttcaccatttaaagaggaccccttggtcaagagggaaaagggttcggggcaggatagtagccagagcttccctgagtagtgcagatgggaagaggggaaggtcacctccagagctccacttgggatccatagagaaatgatatagaaccaagaagtccactcactgggatttgttactttctgtttttccagaatattagaaaaatattatgaaaatagttgaagagaaatgttatgaaaatagttgaagctgtacttactgcacaaggagaccaagaaaaactcccacaaaatcagctgcaagtaaatccctctggatggtgccgccacatgttcctacaagtccagaacaacccttgccaaaccaaagacacttggcagaaccctgttcctttctagagacagagctgtatacctgttccaaaacaccacatctcactcagtgacttatttctcattatgctaattgttttgctgtaaagtgccaatgtttctgtgaattaagacatacgaataaatttctgaagttacccttgcata

SEQ ID NO: 30208 - protein, 54 aa, Homo sapiens [sequence omitted]

SEQ ID NO: 30209 - DNA, 882 bp, Homo sapiens; identical to SEQ ID NO: 30193

SEQ ID NO: 30210 - protein, 163 aa, Homo sapiens; identical to SEQ ID NO: 30194

SEQ ID NO: 30211 - DNA, 6224 bp, Homo sapiens
ggaagcaaagaggattgtgggagctccgttgtgcgtcgcttaagtgagggcggcggatgggcgaaggtccggtgactgcgactgtcgctgctttctgaggccacaggaaaggggccgtcggtcgccgccatgacagcgagcgaggcggagtttcttccatctgcacccagttgtcttcagcatgggggagcagaaccactctcccgggaaggagcttcagcacaggacgcgagcagaggctccaggaaagaaaagctggcattcccaggcctatgcccttggggccgtttccaactttatgtctacttttctgacctttcctatctataaggttgtgttccggcaacagatccatgccatggcagtgtcagaggctgtgagacagctttggcatgaaggtcctcaatacttctaccggggaatctaccctcctcttctctccaagacgttgcaagggactcttctgtttgggacttatgatagcctgctgtgctttctctctcctgttgggccacacaccctgggacaccgctgggctgccgggctcatgtctggcgtggtggaggccgtggcactcagcccctttgaaagggtgcaaaatgtgctccaggatggtcgcaagcaagctcgcttccccagcaccttcagcattctcaaggaattcaattcttatgggctttgggggcggctgtcactgggctactatcgtggtttctggcctgtcctggccaggaacagcctggggagtgctctatatttttctttcaaggaccccatccaggatggcctggcagagcaaggcctgccccactgggttcctgccttggtgtctggtagtgtcaatggaacaatcacctgcctagttctgtatcctctgattgtgctggttgctaatatgcagtcccatattggatggcagaacatgccaagcctgtgggcctctgcccaggatgtatggaacactcggggccgaaagctgctcctgatctaccgtggaggctccctagtcatcctaaggtccagtgtgacatggggcctcactacggcaatccatgacttcctgcagaggaagtcgcactccaggaaagagctgaagactgactagctgcagaaagtgtggcatggcagctttgttattctaaatcttccctggttggttctatatagcttacttctttggctaggttgcctaatacagccatcctttagcatctataaactcattgcatgggagaagttcccaactaccaacctgttgagcaaggacaaagcccaaaagtattccttagtcaaaaagaaacgttcaccccagtctctccacagtttcagtagcctcagagccaggaggcctttaaataacatgtaacccagattaagtgtcattcctttaaggaattccttggcaataaacagaaacttaaaaagatgaccttacttaggcactctgagctctgggacccctctaggtgtcctccagaccaaactgagtggaactccaatttcaaagaactatgcttgactcttaggatgggaattccataaaacttctcagatggctacattttcatgatattgttcactgcctctaccaccacctctcacttctcaaggctgtgggtcctactttcagggtagcagctgtggctggaaatcctaaattaggcttgcatgaactcgtcaggtgccacaagaactagtggggctggagatgggagtgagaagagcgtggcccatggatggaaagaataaaaactttgaaagaaaagatttaattacatgcaaaatagaaacatttgctatagtctgcttggtgttatctgctaggacatttctgagagcaaggtgataacattgcctagaaaccgtttgagtttccctaagaaacctggaagtgaagtgaccatatctcttcacagaaaattgcatattttgttgatgtggttaaatgtagttactatgacataaagatcagaaatcttagcctgtcattcagagccattcaaaatatggtcatcatataactttcaacatattgtcactccacttacataaaccccaaacactagccataatgaactattgttctctccccagacattccatgaactttcccatggccatactctggcccacactattctttccacctgcagtgctccttcttcacatgccagtctaccaaaatccttccagttccttgaagcccagctcagaggtcaccttctctatggagttcttgattttccccaactgaatgtgacattagtctctgtgatgcccctttcttttttttttttttgagacggagtttcgctcttgttgcccaggctggagtgccaatggtgtgatctcagctcactgcaacctccacctcccggattcaagtgattctcctgcctcagcctcccgagtagctggaattacaggcgcccaccaccatgcctggctaattttgtatttttagtagagatggggtctctccatgttggtcaggctggtctcgaactcccaacctcatcaggtgatccacccacctcggtctcccaaagtgctgggattacaggcgtgagccaccgcgcccagcctctgtgatgcccctttctaacagcacttcatacagggtactgattccattatgtcactaatctcatgtgaccctttgttcttgtattcttcaatacctcctactagactgtaaaactcattgaaagcagggatttttgtatgcattttaaaatcttccattgtgcctaggtgctcaataacgttggtcaaattactgagttgattatcaagctgtgatatggtatatcctcagggtgctgtcccttgtacatgacgataaagttattgactcactgtcagcaagacacgtgcctttgggctgtgtttttgctttcttttaataattgatttagttttgtgctaatgataatgatgctgctactgataataataataacaataataaaaattactttcaactggcacatttgatgagtttatattactgatggcatgtttgctattagcaccagttcaggaactgaaatttcacaaacagaatcacactgtacaactgtaccatttgtttcaactctggaattttgaggatttccaagatgacatgtgttatagtttccccctacagatatcttagtaatgccctcctcttgcatctccttactgaaccaaatttgtcctgtatttgtcttacttggttgtagatttagcagtgagaacttctcactgaatgccacagaaattaaagacatggttgttggaggtatgatgtcagagagcatttgccaccaaggttggcagaaaatggctggtccaggagagctgaagatgagcttccacatctgcagatcgggatgtgttgggacagtactcaacttgtggattcaaggaagtatgaacacagagtctgcataaggaaaggaaaaagatgcattcatctcccaagtacactggtgatttccacttatgtcattctgtccatccatgtccctttcttcattttaacttcttatttaaaaataatttcaaacatttaaaaatgttgcaagcataaataaagcttaaagaacacccatgtcccctttaccctaattcccctattattaatgtttctccccatttgctttattatttaagtgtgcactctgtctatacacacacaggatattttttccctgaactatctgagagttgcatacatcagttttcaatattcctagattcaatgtttgtagatccaaattattttttaagagaccgtgttttatctctgacaatgggacagttattacagaatataataaaatgaaaactcacacaatatatgtgatattgtgaaatatatacttggtctttgatcctgtttcttggcatacaactcctaaaatccttagaatttccaaagtgatatctttttgtatgctaataattgactgatggctggcagcctctggttgcttcaggatgggaactagtcaccaggaagaccaaggcaccattagagggttgggacttaacagcctcattcccgacctccagggaggggagagggatggaaggttaagttgatcaccagtggccaatgatttaatcaatcatgcctacgcaatgaagcttccataaaaaccccaaagcactgggtttggagagcttccagatagctgaacatgtggaggttcctggagggtggtgacccagggagggcacagaagctctgagccccttccgcagtacctcaccctatgcatctcttcatctctatcctttgatatatcctttataataaagtggtaaacgttaagtatttccccaagttctgtgaccctttctggcaaattaaacccaaagaaggggtcatgtgaactcaaacttgaagcccatctgtcagaagttctggaggcttggatttgcgactggtgtctgaagggcctgggaacagtcttgtgaaacctagtcctcagcttgtgggatatgacgctatctccaggtagattgtgtcagaatggaattggagtacacccagctggtgttcgctgcagaactgattgctcacttagtgtgtgggaaaactccacacatctggacatggaaatattctgtgctgattgccgtggtgtaagagcaatgcaaaaagtttgggtattttcccctcggagtatattttaaagctaaattgctaataattgcttaaatttactatatttgcctttataaaaactttatgtatgttgaagcttgaagctatgcaattataatataaacatggatttacaactaaagcatgttataatttaaataattgagtttttcaaatcggttcatatgaaatcctaggcaatattgtaaaattatacagacctgtcaactttttccacttaaaagttgtgagcaaaatttaagggcatagtcgttttcaagtaattttaaatgtcaatgttaatatttagtttagtgatgttaatggagctatgttttctgatattaaaaatgagttttaggagttgagaccaataaaataaggaggtaataaatatctatatctgtttaaacacataaaatatacaatttaacactaaaattacttggtataaaaagtcaaaaaaaagaataaaaagccatcatacaacacaatatatgcgtgatatatatttttctctaaatataaactacatcagcttttataaagctcaagttgaaataataacgttttatgacaaatcattatatggtatattctgacttaattttgcatttacaatttatttttaaacactaaatagcattataattttactgggataactatatatagtgtagtatattaaagttaataaaatgacgttgcatatgagagaaaaagcataataaatcagaaacaatataaaaagctttcagaaaagataaaaatattgtatttctctagtctgttcactctccagtgtctctggttctttcatatcatcttcctttcctcaaatcttttaatactccctccctcatcatttccaactagtgaccctactttctatttcattaagaaaacagatacattcagaagagaactgccagtttaaagaacatttacaaagccatcacccatgtaataaccagccagagcaagaaatagagccctttaataacctactcttctccccccaccactgatgacaccgctccctccatcttaggtgtagcccccatgctgacttttgtaataataatttctttgcttttgtttataagttttcttccttataagcatctctaaacaacagttttgttttacagatgttcaaacattaaatgctttttagacttggaattgtgactatcttgtttcactccacattgcttgtgagactcattgatattgcagatagctgtagttgatccatttttattgttgtacagtttaccattgtataaatataccatgatttattcatgataactttgaggaacattctggttgtttgcaggttttatttttacagttcattagttttattgatgtataataattgtatatgtttatggggtatatgtgatattttgatacatgtgtacaatgtgtaatgattaaatcaaggtaattgggatatccatcagctcaaacatttatcatttctttgcattgggaacattccaaatcttctcttctagctattttgaaatacacaataaattgaatactgtggtca

SEQ ID NO: 30212 - protein, 66 aa, Homo sapiens
MTASEAEFLPSAPSCLQHGGAEPLSREGASAQDASRGSRKEKLAFPGLCPWGRFQLYVYFSDLSYL

SEQ ID NO: 30213 - DNA, 648 bp, Homo sapiens
gagactgaaagcaaccgcggctgcccggagggccgaactggagggtgggcgcagccttggctgccttgggaaccgtgctgcctcgactcggctacccctcgctgggcggtcgtgcgcactcgctaggtcgggcagccccgggtcgcttagcggccgaggaggcggcagagatcccgttcccctgcagagctacggggaccggaaggcgaaacagagctgtggacgcgggagcacatgctgcccaccagtggagcacaagtaaagaaagaacgcgcgattgcccggcgcggagaggggtgggggaagccccgccaggactgggcggcgcccggcttggagaatcagtaactgcgaggcaggggatggagcactcccttggcctggttgcgctgaggaaggagttgtggttcatctggatgctgccgactggataggatttaggatttgcctggattaaggtcatcaaagccgaatccgaacttgaattctgtgcggcggattgcagagctgtcttgaggccctgaggactgggatctgcgacacccagtggacaaaagtcggccgtaccccagaggctaattttctcacggcaggcacctgttgcagaggctgcacgtaaaataaaggcgaacgctagtttccgagctc

SEQ ID NO: 30214 - protein, 37 aa, Homo sapiens
MLPTSGAQVKKERAIARRGEGWGKPRQDWAAPGLENQ

SEQ ID NO: 30215 - DNA, 2985 bp, Homo sapiens; identical to SEQ ID NO: 4190

SEQ ID NO: 30216 - protein, 686 aa, Homo sapiens; identical to SEQ ID NO: 4191

SEQ ID NO: 30217 - DNA, 1353 bp, Homo sapiens
gggagagagatcttcctctctcttcgggcgtgttaagacagcggggttggcctgtacttcctctggccctggctgaagaggcgatcatggccttgagacctgaggaccccagtagcgggttccggcatagcaacgtggtggccttcatcaacgagaaaatggccaggcacacgaaaggccccgagttctatcttgagaatatatccttatcctgggagaaggtggaagacaagctgagggccatactggaggacagcgaggtgcccagtgaggtcaaagaggcctgcacctggggcagcctggccttgggagtgcgctttgcccacaggcaggcacagctacaaaggcacagggtgcggtggctgcacggcttcgccaaactgcacaaatcagccgcacaggccttggcatcagacctgaagaagctcagggagcagcaggagacggaacgcaaggaggcggcctcccggctaagaatggcccagaccagcctcgtggaggtgcagaaagagagagacaaggagctggtgtctccccatgagtgggagcagggggcagggtggccaggcctggccactgccggaggggtttgcacagaaggagcagctgaggaggaagaagaggcggcggtggctgctgctggtgctgctggaggaaaaggagcagaagaagagcagaggggatgttggaggttgtggctgcccctgtggaggccatggctccccctgtggaggctggggctgcccccatggagacccagttcccccacgtggaggccagggctgcctccatggagaccacagagaagctggagagaatcctcctgcagctccttggagatgctgatcaggaaaagtacacctattgggggcagaaggagggagatctccggtcggtcgaaacagccacatcttatttctctggaaccacgaacccctggtccagagcctcatcagaacctcttcctgtccagctccctgcctcatactcatactcatactcaagccctttttcctccttctcagacatacccactatatcccctccacaagcaacagtcacagcaccagttccgcctcagctgccttccgactgggaggcctttgatactagcctgtggtctgatggggggccccacagaatagaccatcaggagcacccaagagacaggagatactccgaacctcatcagcaaagacctccagtatatcgcaggccaggggactgggactgcccttggtgtaacgctgtgaatttttcacggagggatacttgcttcgactgtgggaagggaatctggctgcaaaaacctcattgagtgcagaaatgcaaaatagaaccgaagcatgtata

SEQ ID NO: 30218 - protein, 352 aa, Homo sapiens
MALRPEDPSSGFRHSNVVAFINEKMARHTKGPEFYLENISLSWEKVEDKLRAILEDSEVPSEVKEACTWGSLALGVRFAHRQAQLQRHRVRWLHGFAKLHKSAAQALASDLKKLREQQETERKEAASRLRMAQTSLVEVQKERDKELVSPHEWEQGAGWPGLATAGGVCTEGAAEEEEEAAVAAAGAAGGKGAEEEQRGCWRLWLPLWRPWLPLWRLGLPPWRPSSPTWRPGLPPWRPQRSWRESSCSSLEMLIRKSTPIGGRRREISGRSKQPHLISLEPRTPGPEPHQNLFLSSSLPHTHTHTQALFPPSQTYPLYPLHKQQSQHQFRLSCLPTGRPLILACGLMGGPTE

SEQ ID NO: 30219 - DNA, 511 bp, Homo sapiens
gacaaaccattgtcaagagggagggatacatgggacttttttgacttgattataagggcttaattttatcttatttctctggaaccacgaacccctggtccagagcctcatcagaacctcttcctgtccagctccctgcctcatactcatactcatactcaagccctttttcctccttctcagacatacccactatatcccctccacaagcaacagtcacagcaccagttccgcctcagctgccttccgactgggaggcctttgatactagcctgtggtctgatggggggccccacagaatagaccatcaggagcacccaagagacaggagatactccgaacctcatcagcaaagacctccagtatatcgcaggccaggggactgggactgcccttggtgtaacgctgtgaatttttcacggagggatacttgcttcgactgtgggaagggaatctggctgcaaaaacctcattgagtgcagaaatgcaaaatagaaccgaagcatgtata

SEQ ID NO: 30220 - protein, 143 aa, Homo sapiens
LDYKGLILSYFSGTTNPWSRASSEPLPVQLPASYSYSYSSPFSSFSDIPTISPPQATVTAPVPPQLPSDWEAFDTSLWSDGGPHRIDHQEHPRDRRYSEPHQQRPPVYRRPGDWDCPWCNAVNFSRRDTCFDCGKGIWLQKPH

SEQ ID NO: 30221 - DNA, 748 bp, Homo sapiens
ctcaggacccagcgggggcagcgcgatgaggcgggtgaccctgttcctgaaaggcagccctaagaacggaaagagtggttgctgtatatggaactttatctgatttgctttctgtggccagcagtaaactcggcataaaagccaccagtgtgtataatgggaaaggtggactgattgatgatattgctttgatcagggatgatgatgttttgtttgtttgtgaaggagaatcatttattgatcctcagacagattctaagcctcctgagggattgttaggattccacacagactggctgacattaaatgttggagggcggtactttacaactacacgcgagcactttagtgaataaagaacctgacagtatgctggcccacatgtttaaggacaaaagtgtctggggaaataagcaatatcatagaggcgctttcttaattgaccgaagtcctgagtactttgaacccattttgaactccttgcgtcatggacagctcattgtaaatgatggcattaatttattgggtgtgttagaagaagcaagattttttggtattgtctcattgatctaacacctggaagtggcaataaagaattctcaaccaccggaggatcattcaccaatatcccgaaaggaatttgtccgattttttgctagcaactccaaccaagtcagaactgcgatgccaggatttgaacttcagtggtgctgatctttctcgtttggaccttcgatacattaacttc

SEQ ID NO: 30222 - protein, 88 aa, Homo sapiens
MLEGGTLQLHASTLVNKEPDSMLAHMFKDKSVWGNKQYHRGAFLIDRSPEYFEPILNSLRHGQLIVNDGINLLGVLEEARFFGIVSLI

SEQ ID NO: 30223 - DNA, 8063 bp, Homo sapiens
acagcgctctcgacacggagcacccttctagcttcttcgtctccaggactgacgctcaggctcctctctcgccttagcccaacttgctttcccgcctcgcaaactccggtttccctccactcccaactcttttcactacacgtttcccctcctctatctcccacgccacgaaccccgatccccagactcctctctcccgccctcctccttcctctctcctcccttcaactcttcatccgcttccacctcagactctgcgcgcacccaattcagtcgcccgctcccgttcggctcctcgaagccatggcgggacctgggggctggagggacagggaggtcacggatctgggccacctgccggatccaactggaatattctcactagataaaaccattggccttggtacttatggcagaatctatttgggacttcatgagaagactggtgcatttacagctgttaaagtgatgaacgctcgtaagacccctttacctgaaataggaaggcgagtgagagtgaataaatatcaaaaatctgttgggtggagatacagtgatgaggaagaggatctcaggactgaactcaaccttctgaggaagtactctttccacaaaaacattgtgtccttctatggagcatttttcaagctgagtccccctggtcagcggcaccaactttggatggtgatggagttatgtgcagcaggttcggtcactgatgtagtgagaatgaccagtaatcagagtttaaaagaagattggattgcttatatctgccgagaaatccttcagggcttagctcaccttcacgcacaccgagtaattcaccgggacatcaaaggtcagaatgtgctgctgactcataatgctgaagtaaaactggttgattttggagtgagtgcccaggtgagcagaactaatggaagaaggaatagtttcattgggacaccatactggatggcacctgaggtgattgactgtgatgaggacccaagacgctcctatgattacagaagtgatgtgtggtctgtgggaattactgccattgaaatggctgaaggagcccctcctctgtgtaaccttcaacccttggaagctctcttcgttattttgcgggaatctgctcccacagtcaaatccagcggatggtcccgtaagttccacaatttcatggaaaagtgtacgataaaaaatttcctgtttcgtcctacttctgcaaacatgcttcaacacccatttgttcgggatataaaaaatgaacgacatgttgttgagtcattaacaaggcatcttactggaatcattaaaaaaagacagaaaaaaggaatacctttgatctttgaaagagaagaagctattaaggaacagtacaccgtgagaagattcagaggaccctcttgcactcacgagcttctgagattgccaaccagcagcagatgcagaccacttagagtcctgcatggggaaccctctcagccaaggtggctacctgatcgagaagagccacaggtccaggcacttcagcagctacagggagcagccagggtattcatgccactgcaggctctggacagtgcacctaagcctctaaaggggcaggctcaggcacctcaacgactacaaggggcagctcgggtgttcatgccactacaggctcaggtgaaggctaaagcctctaaacctctacaaatgcagattaaggcacctccacgactacggagggcagccagggtgctcatgccactacaggcacaggttagggcacctaggcttctgcaggtacagtcccaggtatccaaaaagcagcaggcccagacccagacatcagaaccacaagatttggaccaggtaccagaggaatttcagggtcaagatcaggtacccgaacaacaaaggcagggccaggcccctgaacaacagcagaggcacaaccaggtgcctgaacaagagctggagcagaaccaggcacctgaacagccagaggtacaggaacaggctgccgagcctgcacaggcagagactgaggcagaggaacctgagtcattacgagtaaatgcccaggtatttctgcccctgctatcacaagatcaccatgtgctgttgccactacatttggatactcaggtgctcattccagtagaggggcaaactgaaggatcacctcaggcacaggcttggacactagaacccccacaggcaattggctcagttcaagcactgatagagggactatcaagagacttgcttcgggcaccaaactcaaataactcaaagccacttggtccgttgcaaaccctgatggaaaatctgtcatcaaataggttttactcacaaccagaacaggcacgggagaaaaaatcaaaagtttctactctgaggcaagcactggcaaaaagactatcaccaaagaggttcagggcaaagtcatcatggagacctgaaaagcttgaactctcggatttagaagcccgcaggcaaaggcgccaacgcagatgggaagatatctttaatcagcatgaggaagaattgagacaagttgataaagacaaagaagatgaatcatcagacaatgatgaagtatttcattcgattcaggctgaagtccagatagagccattgaagccatacatttcaaatcctaaaaaaattgaggttcaagagagatctccttctgtgcctaacaaccaggatcatgcacatcatgtcaagttctcttcaagcgttcctcagcggtctcttttggaacaagctcagaagcccattgacatcagacaaaggagttcgcaaaatcgtcaaaattggctggcagcatcagaatcttcttctgaggaagaaagtcctgtgactggaaggaggtctcagtcatcaccaccttattctactattgatcagaagttgctggttgacatccatgttccagatggatttaaagtaggaaaaatatcaccccctgtatacttgacaaacgaatgggtaggctataatgcactctctgaaatcttccggaatgattggttaactccggcacctgtcattcagccacctgaagaggatggtgattatgttgaactctatgatgccagtgctgatactgatggtgatgatgatgatgagtctaatgatacttttgaagatacctatgatcatgccaatggcaatgatgacttggataaccaggttgatcaggctaatgatgtttgtaaagaccatgatgatgacaacaataagtttgttgatgatgtaaataataattattatgaggcgcctagttgtccaagggcaagctatggcagagatggaagctgcaagcaagatggttatgatggaagtcgtggaaaagaggaagcctacagaggctatggaagccatacagccaatagaagccatggaggaagtgcagccagtgaggacaatgcagccattggagatcaggaagaacatgcagccaatataggcagtgaaagaagaggcagtgagggtgatggaggtaagggagtcgttcgaaccagtgaagagagtggagcccttggactcaatggagaagaaaattgctcagagacagatggtccaggattgaagagacctgcgtctcaggactttgaatatctacaggaggagccaggtggtggaaatgaggcctcaaatgccattgactcaggtgctgcaccgtcagcacctgatcatgagagtgacaataaggacatatcagaatcatcaacacaatcagatttttctgccaatcactcatctccttccaaaggttctgggatgtctgctgatgctaactttgccagtgccatcttatacgctggattcgtagaagtacctgaggaatcacctaagcaaccctctgaagtcaatgttaacccactctatgtctctcctgcatgtaaaaaaccactaatccacatgtatgaaaaggagttcacttctgagatctgctgtggttctttgtggggagtcaatttgctgttgggaacccgatctaatctatatctgatggacagaagtggaaaggctgacattactaaacttataaggcgaagaccattccgccagattcaagtcttagagccactcaatttgctgattaccatctcaggtcataagaacagacttcgggtgtatcatctgacctggttgaggaacaagattttgaataatgatccagaaagtaaaagaaggcaagaagaaatgctgaagacagaggaagcctgcaaagctattgataagttaacaggctgtgaacacttcagtgtcctccaacatgaagaaacaacatatattgcaattgctttgaaatcatcaattcacctttatgcatgggcaccaaagtcctttgatgaaagcactgctattaaatatgcattgatcaatcagcagactctgaaggagactacatgtcctatcaagcctatatacgaatactggcaaaaatacaggcagctgatccagtgaaccggtttaagagaccagatgagctccttcatttgctgaagctcaaggtatttccaacacttgatcataagccagtgacagttgacctggctattggttctgaaaaaagactaaagattttcttcagctcagcagatggatatcacctcatcgatgcagaatctgaggttatgtctgatgtgaccctgccaaagaatcccctggaaatcattataccacagaatatcatcattttacctgattgcttgggaattggcatgatgctcaccttcaatgctgaagccctctctgtggaagcaaatgaacaactcttcaagaagatccttgaaatgtggaaagacataccatcttctatagcttttgaatgtacacagcgaaccacaggatggggccaaaaggccattgaagtgcgctctttgcaatccagggttctggaaagtgagctgaagcgcaggtcaattaagaagctgagattcctgtgcacccggggtgacaagctgttctttacctctaccctgcgcaatcaccacagccgggtttacttcatgacacttggaaaacttgaagagctccaaagcaattatgatgtctaaaagtttccagtgatttattaccacattataaacatcatgtataggcagtctgcatcttcagatttcagagattaaatgagtattcagttttatttttagtaaagattaaatccaaaactttacttttaatgtagcacagaatagttttaatgagaaatgcagctttatgtataaaattaactatagcaagctctaggtactccaatggtgtacaatgtcttttgcacaaactttgtaacttttgttactgtgaattcaaacattactctttggacagtttggacagtatctgtattcagattttacaacatggagtaaagaaacctgttatgaattagattacaagcagccttcaaaagaattggcactgggataagatttttcagaaaaagaaaaacatcggcaaactgtgtgtgatttttccaaagctatataaagaaccaaaggtttagtcaagaaacaaaaatcttaaagattattataacccagactaaggttgaacaacctgcatgcccagagaaaactatggcgacaaaggggaaaaggccaccactcgttttctcactgattcatgccaattaagcctacagttaaagaccagttttgttcttttcacccatttttaagctggttttctcctgataagaagaaaggaagaaagccccagacgcttggtttttctcagaacccccaaaagatgtgcaatagctgttgttacaaaccaccaaataatacagttgtgagcctgaatacaggactgaactcctatacacgtgtactgtagaatgagtattttttaataccttaaggtaggcgtcaaattctactccccaaagcagagatagattgatttatcaaaattattatctggccaacagtgtgactatcagacagcatcaaatatttgcccaatccaagattagactacacaaaagcttccttccagtattaaacaaaaagaattaaacataactatgaaaaaactttgctaatatctgtgtttttcagatttcattttttgtaaaatcagaaattaatctaaacatattcagtgataagttcatgtgtaacgacttaatgttaaaggttaaaaaaaagatttcacaaaatatacaactttcaccatatatataagcctgcaaaattagagtagtgaaagtcatgctagtccatcacccaaatatgttatagacgccatagacaggtgatgtttggtcacctatggtaactgctacctgatgaagagcataatttctgcatatccatcctcaataccatggtaaattctggggcaatagagaagcaacagaactgccacaaagtatacctcaatataattcctctagttctgcttctaaaatctgaggacagtgctagtgggaaaataattttcaaactacctggttaaccaaaatacaaaagcagctgactatgtgtgatttcataatagcacatttcttgacacttagtgctagaaatgaagatttggattttcctaacaacttacatcaagaatgtagtgtagctcattattgagaatttaggaaagcctgaatccattaattaaggaaataaatgtgactcacatttcttttactgtgacacaataatgtgatcctaaaactggcttatccttgagtgtttacaactcaaacaactttttgaatgcagtagttttttttttttaaaaacaaacttttatgtcaaattttttttcttagaagtagtcttcattattataaatttgtacaccaaaaggccatggggaactttgtgcaagtacctcatcgctgagcaaatggagcttgctatgttttaatttcagaaaatttcctcatatacgtagtgtgtagaatcaagtcttttaataattcattttttcttcataatatttactcaaagttaagcttaaaaataagttttatcttaaaatcatatttgaagacagtaagacagtaaactattttaggaagtcaacccccattgcactctgtggcagttattctggtaaaaataggcaaaagtgacctgaatctacaatgatgtcccaaagtaaccaagtaagagagattgtaaatgataaaccgagctttaaaggataaagtgttaataaagaaaggaagctgggcacatgtcaaaaagggagatcgaaatgttaggtaatcatttagaaaggacagaaaatatttaaagtggctcataggtaatgaatatttctgacttagatgtaaatccatctggaatctttacatcctttgccagctgaaacaagaaagtgaagggacaatgatatttcatggtcagtttattttgtaagagacagaagaaattatatctatacattaccttgtagcagcagtacctggaagccccagcccgtcacagaagtgtggaggggggctcctgactagacaatttccctagcccttgtgatttgaagcatgaaagttctggcaggttatgagcagcactagggataaagtatggttttattttggtgtaatttaggtttttcaacaaagcccttgtctaaaataaaaggcattattggaaatatttgaaaactagaaaatgatggataaaagggctgataagaaaatttctgactgtcagtagaagtgagataagatcctcagaggaaacagtaagaagggataatcattaagatagtaaaacaggcaaagcagaatcacatgtgcacacacacatacacatgtaaacattggaatgcataagttttaatattttagcgctatcagtttctaaatgcattaattactaactgccctctcccaagattcatttagttcaaacagtatccgtaaactaggaataatgccacatgcattcaatgggatcttttaagtactcttcagtttgttccaagaaatgtgcctactgaaatcaaattaatttgtattcaatgtgtacttcaagactgctaattgtttcatctgaaagcctacaatgaatcattgttcaaccttgaaaaataaaattttgtaaaacatc

SEQ ID NO: 30224 - protein, 1384 aa, Homo sapiens
MAGPGGWRDREVTDLGHLPDPTGIFSLDKTIGLGTYGRIYLGLHEKTGAFTAVKVMNARKTPLPEIGRRVRVNKYQKSVGWRYSDEEEDLRTELNLLRKYSFHKNIVSFYGAFFKLSPPGQRHQLWMVMELCAAGSVTDVVRMTSNQSLKEDWIAYICREILQGLAHLHAHRVIHRDIKGQNVLLTHNAEVKLVDFGVSAQVSRTNGRRNSFIGTPYWMAPEVIDCDEDPRRSYDYRSDVWSVGITAIEMAEGAPPLCNLQPLEALFVILRESAPTVKSSGWSRKFHNFMEKCTIKNFLFRPTSANMLQHPFVRDIKNERHVVESLTRHLTGIIKKRQKKGIPLIFEREEAIKEQYTVRRFRGPSCTHELLRLPTSSRCRPLRVLHGEPSQPRWLPDREEPQVQALQQLQGAARVFMPLQALDSAPKPLKGQAQAPQRLQGAARVFMPLQAQVKAKASKPLQMQIKAPPRLRRAARVLMPLQAQVRAPRLLQVQSQVSKKQQAQTQTSEPQDLDQVPEEFQGQDQVPEQQRQGQAPEQQQRHNQVPEQELEQNQAPEQPEVQEQAAEPAQAETEAEEPESLRVNAQVFLPLLSQDHHVLLPLHLDTQVLIPVEGQTEGSPQAQAWTLEPPQAIGSVQALIEGLSRDLLRAPNSNNSKPLGPLQTLMENLSSNRFYSQPEQAREKKSKVSTLRQALAKRLSPKRFRAKSSWRPEKLELSDLEARRQRRQRRWEDIFNQHEEELRQVDKDKEDESSDNDEVFHSIQAEVQIEPLKPYISNPKKIEVQERSPSVPNNQDHAHHVKFSSSVPQRSLLEQAQKPIDIRQRSSQNRQNWLAASESSSEEESPVTGRRSQSSPPYSTIDQKLLVDIHVPDGFKVGKISPPVYLTNEWVGYNALSEIFRNDWLTPAPVIQPPEEDGDYVELYDASADTDGDDDDESNDTFEDTYDHANGNDDLDNQVDQANDVCKDHDDDNNKFVDDVNNNYYEAPSCPRASYGRDGSCKQDGYDGSRGKEEAYRGYGSHTANRSHGGSAASEDNAAIGDQEEHAANIGSERRGSEGDGGKGVVRTSEESGALGLNGEENCSETDGPGLKRPASQDFEYLQEEPGGGNEASNAIDSGAAPSAPDHESDNKDISESSTQSDFSANHSSPSKGSGMSADANFASAILYAGFVEVPEESPKQPSEVNVNPLYVSPACKKPLIHMYEKEFTSEICCGSLWGVNLLLGTRSNLYLMDRSGKADITKLIRRRPFRQIQVLEPLNLLITISGHKNRLRVYHLTWLRNKILNNDPESKRRQEEMLKTEEACKAIDKLTGCEHFSVLQHEETTYIAIALKSSIHLYAWAPKSFDESTAIKYALINQQTLKETTCPIKPIYEYWQKYRQLIQ

SEQ ID NO: 30225 - DNA, 1885 bp, Homo sapiens
ttcagaaaaaaagtgattcaatttccataaatttaatttactcacagcgttttcataatgttgctataacatctgaatgacagtccatggcattatttccgtggttgcagcaagccacttctcctactccctgtccatattagatgcatctcctgtttttcaagggagagaaacccctgctcagcccctgatgagcacatcatcaaatatttactattgttttattaatcaatgtgggtggttattatgtgtctctggctcagggagtgtttcatccaactaagctccctcagtggttgtctcacttcatctcttatagattaacttccttccaaaatgtcaccattcctgtatctggttctcttggtacttgggcttcatgctacaatccactgtgcatcacctgaaggcaaagtaacagcctgccattcatcccaaccaaatgccactctctacaagatgtcatccattaatgctgactttgcattcaatctgtaccggaggttcactgtggagaccccagataagaacatcttcttttcccctgtgagcatttctgcagctttggttatgctttcctttggggcctgctgcagcacccaaactgagattgtggagaccttggggttcaacctcacagacactccaatggtagagatccagcatggcttccagcatctgatctgttcactgaattttccaaagaaggaactggaattgcagataggaaatgccctcttcattggcaagcatctgaaaccactggcaaagttcttgaatgatgtcaagaccctctatgagactgaagtcttttctaccgacttctccaacatttctgcagccaagcaggagattaacagtcatgtggagatgcaaaccaaagggaaagttgtgggtctaattcaagacctcaagccaaacaccatcatggtcttagtgaactatattcactttaaagcccagtgggcaaatccttttgatccatccaagacagaagacagttccagcttcttaatagacaagaccaccactgttcaagtgcccatgatgcaccagatggaacaatactatcacctagtggatatggaattgaactgcacagttctgcaaatggactacagcaagaatgctctggcactctttgttcttcccaaggagggacagatggagtcagtggaagctgccatgtcatctaaaacactgaagaagtggaaccgcttactacagaagggatgggttgacttgtttgttccaaagttttccatttctgccacatatgaccttggagccacacttttgaagatgggcattcagcatgcctattctgaaaatgctgatttttctggactcacagaggacaatggtctgaaactttccaatgctgcccataaggctgtgctgcacattggtgaaaagggaactgaagctgcagctgtccctgaagttgaactttcggatcagcctgaaaacactttcctacaccctattatccaaattgatagatctttcatgttgttgattttggagagaagcacaaggagtattctctttctagggaaagttgtgaacccaacggaagcgtagttgggaaaaaggccattggctaattgcacgtgtgtattgcaatgggaaataaataaataatatagcctggtgtgattgatgtgagcttggacttgcattcccttatgatgggatgaagattgaaccctggctgaactttgttggctgtggaagaggccaatcctatggcagagcattcagaatgtcaatgagtaattcattattatccaaagcataggaaggctctatgtttgtatatttctctttgtcagaatacccctcaactcatttgctctaataaatttgactgggttgaaaaatt

SEQ ID NO: 30226 - protein, 415 aa, Homo sapiens
MSPFLYLVLLVLGLHATIHCASPEGKVTACHSSQPNATLYKMSSINADFAFNLYRRFTVETPDKNIFFSPVSISAALVMLSFGACCSTQTEIVETLGFNLTDTPMVEIQHGFQHLICSLNFPKKELELQIGNALFIGKHLKPLAKFLNDVKTLYETEVFSTDFSNISAAKQEINSHVEMQTKGKVVGLIQDLKPNTIMVLVNYIHFKAQWANPFDPSKTEDSSSFLIDKTTTVQVPMMHQMEQYYHLVDMELNCTVLQMDYSKNALALFVLPKEGQMESVEAAMSSKTLKKWNRLLQKGWVDLFVPKFSISATYDLGATLLKMGIQHAYSENADFSGLTEDNGLKLSNAAHKAVLHIGEKGTEAAAVPEVELSDQPENTFLHPIIQIDRSFMLLILERSTRSILFLGKVVNPTEA

SEQ ID NO: 30227 - DNA, 1336 bp, Homo sapiens
attaacttccttccaaaatgtcaccattcctgtatctggttctcttggtacttgggcttcatgctacaatccactgtgcatcacctgaaggcaaagtaacagcctgccattcatcccaaccaaatgccactctctacaagatgtcatccattaatgctgactttgcattcaatctgtaccggaggttcactgtggagaccccagataagaacatcttcttttcccctgtgagcatttctgcagctttggttatgctttcctttggggcctgctgcagcacccaaactgagattgtggagaccttggggttcaacctcacagacactccaatggtagagatccagcatggcttccagcatctgatctgttcactgaattttccaaagaaggaactggaattgcagataggaaatgccctcttcattggcaagcatctgaaaccactggcaaagttcttgaatgatgtcaagaccctctatgagactgaagtcttttctaccgacttctccaacatttctgcagccaagcaggagattaacagtcatgtggagatgcaaaccaaagggaaagttgtgggtctaattcaagacctcaagccaaacaccatcatggtcttagtgaactatattcactttaaagcccagtgggcaaatccttttgatccatccaagacagaagacagttccagcttcttaatagacaagaccaccactgttcaagtgcccatgatgcaccagatggaacaatactatcacctagtggatatggaattgaactgcacagttctgcaaatggactacagcaagaatgctctggcactctttgttcttcccaaggagggacagatggagtcagtggaagctgccatgtcatctaaaacactgaagaagtggaaccgcttactacagaagggatgggttgacttgtttgttccaaagttttccatttctgccacatatgaccttggagccacacttttgaagatgggcattcagcatgcctattctgaaaatgctgatttttctggactcacagaggacaatggtctgaaactttccaatgctgcccataaggctgtgctgcacattggtgaaaagggaactgaagctgcagctgtccctgaagttgaactttcggatcagcctgaaaacactttcctacaccctattatccaaattgatagatctttcatgttgttgattttggagagaagcacaaggagtattctctttctagggaaagttgtgaacccaacggaagcgtagttgggaaaaaggccattggctaattgcacgtgtgtattgcaatgggaaataaataaataatatagcctggt

SEQ ID NO: 30228 - protein, 415 aa, Homo sapiens; identical to SEQ ID NO: 30226

SEQ ID NO: 30229 - DNA, 2683 bp, Homo sapiens
agtcttcggggaggagctgcattacacacaggcttcggaggcttccgtggagaagcttggaggtaatggctgtcgtaaatgctagttattttcagagagttctcgaagatttggaataaagccgagccccagaaagacaggtcaaccacagaagtgctgagccaggtaaagaccctgctggacaagcagctggagtgagaatcaagacagctggaccacaggaccagacccagcagtatccatgtaacagttaatatcagagaagcacatgacctgggcaatctgcatgtgatgccaaccaagccttggaaagacagtgcaaccacagaagtgccgagctgggtaaaggccctgctggacaagcagttggagtgagaatcaagacagccggaccacaggaccagacccaccaggatccacatgacagtggtatcttccggtatcatcctattcaaacaacgtgttcaagcatccttggaaaattgaggtggagaacaggccacacaagctgtaaaccctttgtagtcataagacgaaagaggatttgttaagagtattgttttgggtagaacttgcattagcagtgacaaagatagccacctcaacctttggtaataacccttggcacacaaatataaaccataatggagtctgagtatgtcctatgcaactggaaagaccagttgtggccagcaaaagttttgtccagatctgaaacttcatcaaacagtaagaggaaaaaggcattttctctagaagttcaaatactctcactagatgaaaaaattaaattggacagcacagaaacaaagatcctaaataaatctcaaattgaagccattgctgcctcattaggactacagtcagaggacagtgctccacctacagaggaaactgcctatggaagatcactaaaagtggcactgggtattctgaatgagagaacaaatttgagtcaagcaagcacttcagatgaagaggagatcactatgctgtctcaaaatgtaccacaaaaacagtccgattcaccccctcataaaaaataccggaaggatgaaggtgacttaccagggtgtcttgaggaaagggaaaactcagcatgcttgttagcatcttcagagagtgatgattccctgtatgatgataaatcacaagcacccacaatggtcgatactattccaagtgaagtggaaacaaagtcattacaaaactctagctggtgcgagactttcccttcactttcggaagataatgatgaaaaagagaacaagaataagattgatatctcagcagttatgtctgtgcattctgcagtcaaagaggaaagtgcatgtgttaaagatgaaaagtttgctccacctttgtcacctttgtcatcagatatgctcattatgcccaaagctttgaaagaagagagcgaggatacctgcctagagaccctggctgttccctctgaatgctctgctttctcagagaatattgaggatcctggagagggtccctcaaatccatgcttagataccagccagaatcaaccttccatggaatcagagatgggggctgcagcatgccctgggagttgttcaagggaatgcgaggtttcatttagtgcctctaaccctgtctgggattattcacatcttatgagtagtgaaagaaattttcagagactggattttgaagaacttgaggaagaaggtcaagcctctgacaagtcattgcttccaagtcgcattaatctttctctattagatgatgatgaggaagacgaagaacttccacgcttcattttacattatgagacacatccgtttgaaacaggaatgatagtctggtttaaatatcagaaatatccattttggccagcagtgataaaaagtatcagacgaaaagagaggaaagcaagtgtgctttttgttgaggcaaacatgaattctgaaaagaagggcattagagtaaattttagaagattaaagaaatttgattgtaaagagaaacaaatgctagtggacaaagccagggaggattatagtgagagtattgactggtgcatctcactaatttgtgactacagagttagaataggttgtggttctttcacgggctctttgcttgagtattatgctgctgatattagttacccagttaggaaagaaacaaaacaggatactttcaggaacaaatttccaaagctgcataatgaagatgccagggaaccgatggctgtaacttcccagaccaagaaaatgtccttccaaaaaattctccctgaccggatgaaggctgctcgggaccgagccaacaagaacctggtggacttcattgtgaatgcaaagggaacagagaaccatcttctggccattgtaaatggcacaaaaggatccagatggctgaaatcatttttgaatgcaaataggttcacaccctgtattgaaacatactttgaggatgaagatcagttggatgaagtggtgaaatatttacaagaagtctgcaatcaaatagatcaaataatgccaacttggataaaagatgataaaattaaatttatcctagaagttcttctgccagaagcaattatttgttcaatttctgctgttgatgggttagattacgaggcagctgaagcaaagtatctaaaaggaccatgtctaggctacagggaaagagaattatttgatgc

SEQ ID NO: 30230 - protein, 39 aa, Homo sapiens
MLVIFREFSKIWNKAEPQKDRSTTEVLSQVKTLLDKQLE

SEQ ID NO: 30231 - DNA, 3955 bp, Homo sapiens
caagaggctgcagctgacaagaagcttcaagcataggttaatatcagagaagcacatgacctgggcaatctgcatgtgatgccaaccaagccttggaaagacagtgcaaccacagaagtgccgagctgggtaaaggccctgctggacaagcagttggagtgagaatcaagacagccggaccacaggaccagacccaccaggatccacatgacagtggtatcttccggtatcatcctattcaaacaacgtgttcaagcatccttggaaaattgaggtggagaacaggccacacaagctgtaaaccctttgtagtcataagacgaaagaggatttgttaagagtattgttttgggtagaacttgcattagcagtgacaaagatagccacctcaacctttggtaataacccttggcacacaaatataaaccataatggagtctgagtatgtcctatgcaactggaaagaccagttgtggccagcaaaagttttgtccagatctgaaacttcatcaaacagtaagaggaaaaaggcattttctctagaagttcaaatactctcactagatgaaaaaattaaattggacagcacagaaacaaagatcctaaataaatctcaaattgaagccattgctgcctcattaggactacagtcagaggacagtgctccacctacagaggaaactgcctatggaagatcactaaaagtggcactgggtattctgaatgagagaacaaatttgagtcaagcaagcacttcagatgaagaggagatcactatgctgtctcaaaatgtaccacaaaaacagtccgattcaccccctcataaaaaataccggaaggatgaaggtgacttaccagggtgtcttgaggaaagggaaaactcagcatgcttgttagcatcttcagagagtgatgattccctgtatgatgataaatcacaagcacccacaatggtcgatactattccaagtgaagtggaaacaaagtcattacaaaactctagctggtgcgagactttcccttcactttcggaagataatgatgaaaaagagaacaagaataagattgatatctcagcagttatgtctgtgcattctgcagtcaaagaggaaagtgcatgtgttaaagatgaaaagtttgctccacctttgtcacctttgtcatcagatatgctcattatgcccaaagctttgaaagaagagagcgaggatacctgcctagagaccctggctgttccctctgaatgctctgctttctcagagaatattgaggatcctggagagggtccctcaaatccatgcttagataccagccagaatcaaccttccatggaatcagagatgggggctgcagcatgccctgggagttgttcaagggaatgcgaggtttcatttagtgcctctaaccctgtctgggattattcacatcttatgagtagtgaaagaaattttcagagactggattttgaagaacttgaggaagaaggtcaagcctctgacaagtcattgcttccaagtcgcattaatctttctctattagatgatgatgaggaagacgaagaacttccacgcttcattttacattatgagacacatccgtttgaaacaggaatgatagtctggtttaaatatcagaaatatccattttggccagcagtgataaaaagtatcagacgaaaagagaggaaagcaagtgtgctttttgttgaggcaaacatgaattctgaaaagaagggcattagagtaaattttagaagattaaagaaatttgattgtaaagagaaacaaatgctagtggacaaagccagggaggattatagtgagagtattgactggtgcatctcactaatttgtgactacagagttagaataggttgtggttctttcacgggctctttgcttgagtattatgctgctgatattagttacccagttaggaaagaaacaaaacaggatactttcaggaacaaatttccaaagctgcataatgaagatgccagggaaccgatggctgtaacttcccagaccaagaaaatgtccttccaaaaaattctccctgaccggatgaaggctgctcgggaccgagccaacaagaacctggtggacttcattgtgaatgcaaagggaacagagaaccatcttctggccattgtaaatggcacaaaaggatccagatggctgaaatcatttttgaatgcaaataggttcacaccctgtattgaaacatactttgaggatgaagatcagttggatgaagtggtgaaatatttacaagaagtctgcaatcaaatagatcaaataatgccaacttggataaaagatgataaaattaaatttatcctagaagttcttctgccagaagcaattatttgttcaatttctgctgttgatgggttagattacgaggcagctgaagcaaagtatctaaaaggaccatgtctaggctacagggaaagagaattatttgatgcaaaaataatatatgaaaagagacgaaaagcaccaacaaatgaagctcactaaatgtgctgaaagttgaaaccatgacagggagctctcatagatactagttgaaaaaagtctctgaacaattctctctaatacatattttctgcaaatgggagcatggataatgtgttcacttttttttgagatctctaggatctgtggttataattacatctttatttccttttcttgcgcttcttcaaagttaattttgtcaacatatttcagcagttctactttcccgtacattttttagaaagcataattcctaaatgattttgaagggaaagtactattttgttttatgacacttttgagtctatgctgtattgttaaatatattgtgcacaattattttaatgttaaaattgcactggtgttagatattaacgaagatgattggaaaaaagtctgaaagatacatcatttctatattccttgcttaatttttataaaatattgggttttcccttaagatagttgaagtatttttcttgccatgcctatttatttttgcaaaaaaattatctgctatatagaaccaaagatagattcgctttgctatatattataactatacttgcttttgcaataaaacaacttgtaattcaaaaatgaagattatctgcatatagtatttatgtgtgtgaataacatcttggcatgcagaaaataattttggctgctttgaacaggattgttcattctacacttccctgaaattccatttttgggagtgtctatccttcaatggctgaatagttccttaaatcagacaagctcctggctatcttcataaccagcagtgagtagatcttcttaatatagctgtctgaccacatgtggaaggcagctagacttattgtatttacagcctggccactctagacatatgaatccaggctgactgcttaagtgcccatctcgtttgatataaactgtagaaaaggcaagcactttgttctgagtcttttatctccaaatacatagttgtctcaaaccaagcaagctttatcaaaatggcttatttgcagaatagttccaatgatataaatgccaactggcaagtcattccaaactgcttgaaggagtagatgaaccagaatctgagaatttggaaataggtcacagaaaaagcctccatttggctaaatatgacaattatctgagtatggttaaatacatacaattaaatgtctgaagccaatgagttgtttattctaacttgaaatatatttttgtgagaataaatgttagaaaagttagtttattttggaaacctgccgtgaaaggaaattctaaaggcttaacatgaaactgtctgcatttctacctgttagacaatggttgctcttgggctcttgttatacagtcatatggctacacgtttatgtaaagtttgcaaaagtttggtgttttgatttataataaaactgttatattattca

SEQ ID NO: 30232 - protein, 696 aa, Homo sapiens
MESEYVLCNWKDQLWPAKVLSRSETSSNSKRKKAFSLEVQILSLDEKIKLDSTETKILNKSQIEAIAASLGLQSEDSAPPTEETAYGRSLKVALGILNERTNLSQASTSDEEEITMLSQNVPQKQSDSPPHKKYRKDEGDLPGCLEERENSACLLASSESDDSLYDDKSQAPTMVDTIPSEVETKSLQNSSWCETFPSLSEDNDEKENKNKIDISAVMSVHSAVKEESACVKDEKFAPPLSPLSSDMLIMPKALKEESEDTCLETLAVPSECSAFSENIEDPGEGPSNPCLDTSQNQPSMESEMGAAACPGSCSRECEVSFSASNPVWDYSHLMSSERNFQRLDFEELEEEGQASDKSLLPSRINLSLLDDDEEDEELPRFILHYETHPFETGMIVWFKYQKYPFWPAVIKSIRRKERKASVLFVEANMNSEKKGIRVNFRRLKKFDCKEKQMLVDKAREDYSESIDWCISLICDYRVRIGCGSFTGSLLEYYAADISYPVRKETKQDTFRNKFPKLHNEDAREPMAVTSQTKKMSFQKILPDRMKAARDRANKNLVDFIVNAKGTENHLLAIVNGTKGSRWLKSFLNANRFTPCIETYFEDEDQLDEVVKYLQEVCNQIDQIMPTWIKDDKIKFILEVLLPEAIICSISAVDGLDYEAAEAKYLKGPCLGYRERELFDAKIIYEKRRKAPTNEAH

SEQ ID NO: 30233 - DNA, 282 bp, Homo sapiens
atggaagtgaaaggttggggtggagaagatgttcatctttatcgaaaatacttacgtggtgacctcattgttattcggaatccagttcctggtcttttccacctctggcatgaaaagcactgtgctgatgagctgacccccgagcagtaccgcatgtgcatccagtctaaagccatggatgaggcttctcgctcccacctgggaatgctggtcttcagggaggaaatagagacgcatcttcataaacaggcatacaggacaaacagcgaagctgttggttga

SEQ ID NO: 30234 - protein, 93 aa, Homo sapiens [sequence omitted]

SEQ ID NO: 30235 - DNA, 1286 bp, Homo sapiens
tgcctgtcagcaggggcagagtagcgatcgtcgccaaagcgcgcggttttatttctctccgctttggacggggcaaactagcttttgggagtgaagcgggtacgcagttatccaacaatgtctggtgagtcaggacagcctgaggctggtccctcacatgcagggctagattggccgaaccctgagaggaatcgggctggggtcccgggaggggtgatccgaagagctggttcccaagggcccaggtcctggatccaaaaggttcttgagcagattatggactcacctcgccagtgtgtcaccccctcggaggtggtgcctgtaactgtgctggccgtccagaggtacctgttagaggatgagccacgcgacacggtgcccaagcctcccctttattgctatgatgtgacgatctcagatggggtgtaccaggagaagtgctacctggaccccagcttgaactctctcgtatatcaaaatattcttaaagttggcattcaaatgagaatttccagggtctcatgtctttacaatgagaaaaggataggccaggggatcctgtgcatagataacgtccactgtggggagacttcagacagtatttctttagaaactcccttcagaaatagagcgcaccaggagaaaccagagaggcctttaagaggcgggaagagtcattacctggcgctgtggaataacgaagatccctatggagatatctggttaacagacaagcaacctgaggaacacaactttagcgataccaaaataatttccctttctcatcttgaaatgacctggactaacagaagaaattttcctgcattgcttgtgaggatcttacataaatcaaaactgcgatactatggaaaacctgataaaaagatgattgaaccatatcagacctttttggaagttgctgacagttcaggcacagtgtcagtgattatgtggaatgccctgtgtcctgagtggtataaaagtttgcgggttggtttagttcttctgcttcaagactattctgttaaaaagagttatccattcagaatacagcctgtccccgtggatccacagatcaaactaatttctacaatggaaatctgcctgaatcttcgagatcccccaacaaatataattatcattccagaaaagcaggtgaaaccagaatggagactgccaaagctaaatcaccgatttaccacaaggtcagaactggatgatatgccagaaaattgcatctgtgatgttattggccttttagtttttgtaggaagggtccagcggtc

SEQ ID NO: 30236 - protein, 388 aa, Homo sapiens
MSGESGQPEAGPSHAGLDWPNPERNRAGVPGGVIRRAGSQGPRSWIQKVLEQIMDSPRQCVTPSEVVPVTVLAVQRYLLEDEPRDTVPKPPLYCYDVTISDGVYQEKCYLDPSLNSLVYQNILKVGIQMRISRVSCLYNEKRIGQGILCIDNVHCGETSDSISLETPFRNRAHQEKPERPLRGGKSHYLALWNNEDPYGDIWLTDKQPEEHNFSDTKIISLSHLEMTWTNRRNFPALLVRILHKSKLRYYGKPDKKMIEPYQTFLEVADSSGTVSVIMWNALCPEWYKSLRVGLVLLLQDYSVKKSYPFRIQPVPVDPQIKLISTMEICLNLRDPPTNIIIIPEKQVKPEWRLPKLNHRFTTRSELDDMPENCICDVIGLLVFVGRVQ

SEQ ID NO: 30237 - DNA, 2310 bp, Homo sapiens
tgcctgtcagcaggggcagagtagcgatcgtcgccaaagcgcgcggttttatttctctccgctttggacggggcaaactagcttttgggagtgaagcgggtacgcagttatccaacaatgtctggtgagtcaggacagcctgaggctggtccctcacatgcagggctagattggccgaaccctgagaggaatcgggctggggtcccgggaggggtgatccgaagagctggttcccaagggcccaggtcctggatccaaaaggttcttgagcagattatggactcacctcgccagtgtgtcaccccctcggaggtggtgcctgtaactgtgctggccgtccagaggtacctgttagaggatgagccacgcgacacggtgcccaagcctcccctttattgctatgatgtgacgatctcagatggggtgtaccaggagaagtgctacctggaccccagcttgaactctctcgtatatcaaaatattcttaaagttggcattcaaatgagaatttccagggtctcatgtctttacaatgagaaaaggataggccaggggatcctgtgcatagataacgtccactgtggggagacttcagacagtatttctttagaaactcccttcagaaatagagcgcaccaggagaaaccagagaggcctttaagaggcgggaagagtcattacctggcgctgtggaataacgaagatccctatggagatatctggttaacagacaagcaacctgaggaacacaactttagcgataccaaaataatttccctttctcatcttgaaatgacctggactaacagaagaaattttcctgcattgcttgtgaggatcttacataaatcaaaactgcgatactatggaaaacctgataaaaagatgattgaaccatatcagacctttttggaagttgctgacagttcaggcacagtgtcagtgattatgtggaatgccctgtgtcctgagtggtataaaagtttgcgggttggtttagttcttctgcttcaagactattctgttaaaaagagttatccattcagaatacagcctgtccccgtggatccacagatcaaactaatttctacaatggaaatctgcctgaatcttcgagatcccccaacaaatataattatcattccagaaaagcaggtgaaaccagaatggagactgccaaagctaaatcaccgatttaccacaaggtcagaactggatgatatgccagaaaattgcatctgtgatgttattggccttttagtttttgtaggaagggtccagcggtcaaaaaagaaagaaaaccgtgaagatttttggtcatatcgctggattcacattgctgacggtacttcagaacaaccatttatagtggaactgttttcaacatcgcagccagaaatctttgaaaatatttacccaatggcatattttgtgtgtacacagttgaaagttgtcagaaatgacaatcaagtacctaagctgctttacctcaccactacaaatgagagtggagtgtttattactggtcatagaggccagccgtatacgtatgatgccaaggtaaaaaactttattcaatggattagaacaaagtctgattccggggaacagaagaatatggttattggtggatattacccctatccaccagtgccagagacattttccaagtatagtagttctattaaaggtactaatgtaattgccagtccttctaaatatgtttatattttatatgtatggcttatgctatttcaattagtcatctttattcttttcttttatgggagtgatctaaagtttagcaacattcaccgataatagctttgtcttaatgcagatctaaaaatatatgtcacgtattttctatatagttttccctatatctcgcatggtgctctaaagattaatactttgatttttatcagactggaagaaaagagaaaacacagatgataaccaactggagatataggttgagtattcctaatccaaaaatccgaaatctgaaatgttccaaaacctgaaacttctttttttttttttgagacggagtctcgctctgtcgcccaggctggagtgcagtggcgggatctcggctcactgcaagctccgcctcccgggttcacgccattctcctgcctcagcctcccaaagtgctgggattacaggcgtgagccaccgcgcccggcctaacctgaaacttcttgagtactgaagtgacactcaaagaactactcattggagcagttcagattttggaattttgcattagggaagctgaactgataagtataatacaaatattcc

SEQ ID NO: 30238 - protein, 567 aa, Homo sapiens
MSGESGQPEAGPSHAGLDWPNPERNRAGVPGGVIRRAGSQGPRSWIQKVLEQIMDSPRQCVTPSEVVPVTVLAVQRYLLEDEPRDTVPKPPLYCYDVTISDGVYQEKCYLDPSLNSLVYQNILKVGIQMRISRVSCLYNEKRIGQGILCIDNVHCGETSDSISLETPFRNRAHQEKPERPLRGGKSHYLALWNNEDPYGDIWLTDKQPEEHNFSDTKIISLSHLEMTWTNRRNFPALLVRILHKSKLRYYGKPDKKMIEPYQTFLEVADSSGTVSVIMWNALCPEWYKSLRVGLVLLLQDYSVKKSYPFRIQPVPVDPQIKLISTMEICLNLRDPPTNIIIIPEKQVKPEWRLPKLNHRFTTRSELDDMPENCICDVIGLLVFVGRVQRSKKKENREDFWSYRWIHIADGTSEQPFIVELFSTSQPEIFENIYPMAYFVCTQLKVVRNDNQVPKLLYLTTTNESGVFITGHRGQPYTYDAKVKNFIQWIRTKSDSGEQKNMVIGGYYPYPPVPETFSKYSSSIKGTNVIASPSKYVYILYVWLMLFQLVIFILFFYGSDLKFSNIHR

SEQ ID NO: 30239 - DNA, 3869 bp, Homo sapiens
tgcctgtcagcaggggcagagtagcgatcgtcgccaaagcgcgcggttttatttctctccgctttggacggggcaaactagcttttgggagtgaagcgggtacgcagttatccaacaatgtctggtgagtcaggacagcctgaggctggtccctcacatgcagggctagattggccgaaccctgagaggaatcgggctggggtcccgggaggggtgatccgaagagctggttcccaagggcccaggtcctggatccaaaaggttcttgagcagattatggactcacctcgccagtgtgtcaccccctcggaggtggtgcctgtaactgtgctggccgtccagaggtacctgttagaggatgagccacgcgacacggtgcccaagcctcccctttattgctatgatgtgacgatctcagatggggtgtaccaggagaagtgctacctggaccccagcttgaactctctcgtatatcaaaatattcttaaagttggcattcaaatgagaatttccagggtctcatgtctttacaatgagaaaaggataggccaggggatcctgtgcatagataacgtccactgtggggagacttcagacagtatttctttagaaactcccttcagaaatagagcgcaccaggagaaaccagagaggcctttaagaggcgggaagagtcattacctggcgctgtggaataacgaagatccctatggagatatctggttaacagacaagcaacctgaggaacacaactttagcgataccaaaataatttccctttctcatcttgaaatgacctggactaacagaagaaattttcctgcattgcttgtgaggatcttacataaatcaaaactgcgatactatggaaaacctgataaaaagatgattgaaccatatcagacctttttggaagttgctgacagttcaggcacagtgtcagtgattatgtggaatgccctgtgtcctgagtggtataaaagtttgcgggttggtttagttcttctgcttcaagactattctgttaaaaagagttatccattcagaatacagcctgtccccgtggatccacagatcaaactaatttctacaatggaaatctgcctgaatcttcgagatcccccaacaaatataattatcattccagaaaagcaggtgaaaccagaatggagactgccaaagctaaatcaccgatttaccacaaggtcagaactggatgatatgccagaaaattgcatctgtgatgttattggccttttagtttttgtaggaagggtccagcggtcaaaaaagaaagaaaaccgtgaagatttttggtcatatcgctggattcacattgctgacggtacttcagaacaaccatttatagtggaactgttttcaacatcgcagccagaaatctttgaaaatatttacccaatggcatattttgtgtgtacacagttgaaagttgtcagaaatgacaatcaagtacctaagctgctttacctcaccactacaaatgagagtggagtgtttattactggtcatagaggccagccgtatacgtatgatgccaaggtaaaaaactttattcaatggattagaacaaagtctgattccggggaacagaagaatatggttattggtggatattacccctatccaccagtgccagagacattttccaagtatagtagttctattaaagttgagtcgctcttgacagctataagtgaagtcaggaaggagattgaagacttgcagtatagggaacaaaagcgcattgcaattcaggggataattactgctataaagtatatcccccatagcagtgcgactgaaagtgcctcagcatcagaaacacttcggaatgctaacagaccctcgacctctcaagcagctagagtagaaattcaagaaagaaatggtaaacggcatcaagatgatgagcctgtgaattctcagtatttccaaactacatctacaaatttaagtctgagcaataaaataagaattcttcaaggcccacacgctaatccagttgctgtacctcaaccaggagcttctgtacaaacaaagggaattaaaccgggcatgccaagcatcttcaaccgtcgagcaaatataaatgctaatctgcaagggaaagccagaaaaactataagtgataggtgggagagtcagctgtggagagagaaaaagtttggcttaatagatcacctacactacagccgtgtttatcctgaaagtattccacggaaatttatgtttgaacacagaaagtttcttagtgaccagtataattctcagcctgcgaaatatgtaccaccagaaggaaggcccccaaaacttgatgattttaagagcgcccgaagccttggacattttgaagtaaccatactaggtctgaaccatgagatagcaatcgatgttgctttcctacccatgtattgtccagaagatattcgaacatctcaaatagacacactgttgacctccatgaattacagctgtgcatatccacaggacacaactggaaatgaccgattgccaggtccaagagcggttgcaggtgatattataaaagcagcaactgaactggatagagtgcatatcgtcggtatcttggatatctgtaatttgggtaataataaagtggaagtctatttgcacaagatttatagtccagagaatacttcttaaaagttagcaaatgaaattattacagattatacgagtgtactgctttaaagatattccatcattttgctggtaatttcagtaactgttttcagcaagaatattacatgagctctaaagttattaagcagttttatgttcgttttgtgtttagggagctttttaaaacacttcatttcagattcattattgaaaaaggtcatcaaaataatttttgtgtataagggaatttaccttgcttaccttactagtatgactattatcttgacttctggtaatttatgttcactattccatttgtgaagtgtactttcattctaaagcctcagtataaggcatcctaacttacaagagtaactttccatggacatttaacatccttccaattttattcacatataatgggaaattttgaattgccagtttgaagactgttctcctaaagtgttcaacctgcacttcttacaaccaaggtagtttgtatcattttcaaaagtacacattattagggtctagttgcccctggtccttagcttgctcagctgcaaaataagcgtgctaaattaaattgtcttaaggtttttccacttcattttgtgactttgtgtggttcgaatttctcagtattttaaccagtgtgttgatgttaaagtcaaaggctgcagtatgtctatattcttgctgtactcattggtagtttcagtatatgtaatgtgagtttaaatagtgaaattgtatctcatattaacatttcaaatgctcatattgaaaatggaaaatagtaaacacgggaattgattttattctggttgtctataatacttcattttaaatgtaaatggccactctgcatttgcaaggcccggtggttgacatctgtgtggtttgttagatgagacaaaatgaccattaaatgagtttatagattattctgtatcaagataaatctgattccagttaagctataaacttgtgggattttcttgtagccctatagttctgtgacttcatttgctatacgctttaaatgtgttgagcagcctatgaacctaaagacatactgcagtttgttcataaatgtattcagtcttttattctttataattgtgtgtaaatgttaactaaacagtggattcctctcgtgttacagttttgagtgaattattaaagaagttaaaatgcaataa

SEQ ID NO: 30240 - protein, 855 aa, Homo sapiens
MSGESGQPEAGPSHAGLDWPNPERNRAGVPGGVIRRAGSQGPRSWIQKVLEQIMDSPRQCVTPSEVVPVTVLAVQRYLLEDEPRDTVPKPPLYCYDVTISDGVYQEKCYLDPSLNSLVYQNILKVGIQMRISRVSCLYNEKRIGQGILCIDNVHCGETSDSISLETPFRNRAHQEKPERPLRGGKSHYLALWNNEDPYGDIWLTDKQPEEHNFSDTKIISLSHLEMTWTNRRNFPALLVRILHKSKLRYYGKPDKKMIEPYQTFLEVADSSGTVSVIMWNALCPEWYKSLRVGLVLLLQDYSVKKSYPFRIQPVPVDPQIKLISTMEICLNLRDPPTNIIIIPEKQVKPEWRLPKLNHRFTTRSELDDMPENCICDVIGLLVFVGRVQRSKKKENREDFWSYRWIHIADGTSEQPFIVELFSTSQPEIFENIYPMAYFVCTQLKVVRNDNQVPKLLYLTTTNESGVFITGHRGQPYTYDAKVKNFIQWIRTKSDSGEQKNMVIGGYYPYPPVPETFSKYSSSIKVESLLTAISEVRKEIEDLQYREQKRIAIQGIITAIKYIPHSSATESASASETLRNANRPSTSQAARVEIQERNGKRHQDDEPVNSQYFQTTSTNLSLSNKIRILQGPHANPVAVPQPGASVQTKGIKPGMPSIFNRRANINANLQGKARKTISDRWESQLWREKKFGLIDHLHYSRVYPESIPRKFMFEHRKFLSDQYNSQPAKYVPPEGRPPKLDDFKSARSLGHFEVTILGLNHEIAIDVAFLPMYCPEDIRTSQIDTLLTSMNYSCAYPQDTTGNDRLPGPRAVAGDIIKAATELDRVHIVGILDICNLGNNKVEVYLHKIYSPENTS

SEQ ID NO: 30241 - DNA, 3578 bp, Homo sapiens
tgcctgtcagcaggggcagagtagcgatcgtcgccaaagcgcgcggttttatttctctccgctttggacggggcaaactagcttttgggagtgaagcgggtacgcagttatccaacaatgtctggtgagtcaggacagcctgaggctggtccctcacatgcagggctagattggccgaaccctgagaggaatcgggctggggtcccgggaggggtgatccgaagagctggttcccaagggcccaggtcctggatccaaaaggttcttgagcagattatggactcacctcgccagtgtgtcaccccctcggaggtggtgcctgtaactgtgctggccgtccagaggtacctgttagaggatgagccacgcgacacggtgcccaagcctcccctttattgctatgatgtgacgatctcagatggggtgtaccaggagaagtgctacctggaccccagcttgaactctctcgtatatcaaaatattcttaaagttggcattcaaatgagaatttccagggtctcatgtctttacaatgagaaaaggataggccaggggatcctgtgcatagataacgtccactgtggggagacttcagacagtatttctttagaaactcccttcagaaatagagcgcaccaggagaaaccagagaggcctttaagaggcgggaagagtcattacctggcgctgtggaataacgaagatccctatggagatatctggttaacagacaagcaacctgaggaacacaactttagcgataccaaaataatttccctttctcatcttgaaatgacctggactaacagaagaaattttcctgcattgcttgtgaggatcttacataaatcaaaactgcgatactatggaaaacctgataaaaagatgattgaaccatatcagacctttttggaagttgctgacagttcaggcacagtgtcagtgattatgtggaatgccctgtgtcctgagtggtataaaagtttgcgggttggtttagttcttctgcttcaagactattctgttaaaaagagttatccattcagaatacagcctgtccccgtggatccacagatcaaactaatttctacaatggaaatctgcctgaatcttcgagatcccccaacaaatataattatcattccagaaaagcaggtgaaaccagaatggagactgccaaagctaaatcaccgatttaccacaaggtcagaactggatgatatgccagaaaattgcatctgtgatgttattggccttttagtttttgtaggaagggtccagcggtcaaaaaagaaagaaaaccgtgaagatttttggtcatatcgctggattcacattgctgacggtacttcagaacaaccatttatagtggaactgttttcaacatcgcagccagaaatctttgaaaatatttacccaatggcatattttgtgtgtacacagttgaaagttgtcagaaatgacaatcaagtacctaagctgctttacctcaccactacaaatgagagtggagtgtttattactggtcatagaggccagccgtatacgtatgatgccaagaatgctaacagaccctcgacctctcaagcagctagagtagaaattcaagaaagaaatggtaaacggcatcaagatgatgagcctgtgaattctcagtatttccaaactacatctacaaatttaagtctgagcaataaaataagaattcttcaaggcccacacgctaatccagttgctgtacctcaaccaggagcttctgtacaaacaaagggaattaaaccgggcatgccaagcatcttcaaccgtcgagcaaatataaatgctaatctgcaagggaaagccagaaaaactataagtgataggtgggagagtcagctgtggagagagaaaaagtttggcttaatagatcacctacactacagccgtgtttatcctgaaagtattccacggaaatttatgtttgaacacagaaagtttcttagtgaccagtataattctcagcctgcgaaatatgtaccaccagaaggaaggcccccaaaacttgatgattttaagagcgcccgaagccttggacattttgaagtaaccatactaggtctgaaccatgagatagcaatcgatgttgctttcctacccatgtattgtccagaagatattcgaacatctcaaatagacacactgttgacctccatgaattacagctgtgcatatccacaggacacaactggaaatgaccgattgccaggtccaagagcggttgcaggtgatattataaaagcagcaactgaactggatagagtgcatatcgtcggtatcttggatatctgtaatttgggtaataataaagtggaagtctatttgcacaagatttatagtccagagaatacttcttaaaagttagcaaatgaaattattacagattatacgagtgtactgctttaaagatattccatcattttgctggtaatttcagtaactgttttcagcaagaatattacatgagctctaaagttattaagcagttttatgttcgttttgtgtttagggagctttttaaaacacttcatttcagattcattattgaaaaaggtcatcaaaataatttttgtgtataagggaatttaccttgcttaccttactagtatgactattatcttgacttctggtaatttatgttcactattccatttgtgaagtgtactttcattctaaagcctcagtataaggcatcctaacttacaagagtaactttccatggacatttaacatccttccaattttattcacatataatgggaaattttgaattgccagtttgaagactgttctcctaaagtgttcaacctgcacttcttacaaccaaggtagtttgtatcattttcaaaagtacacattattagggtctagttgcccctggtccttagcttgctcagctgcaaaataagcgtgctaaattaaattgtcttaaggtttttccacttcattttgtgactttgtgtggttcgaatttctcagtattttaaccagtgtgttgatgttaaagtcaaaggctgcagtatgtctatattcttgctgtactcattggtagtttcagtatatgtaatgtgagtttaaatagtgaaattgtatctcatattaacatttcaaatgctcatattgaaaatggaaaatagtaaacacgggaattgattttattctggttgtctataatacttcattttaaatgtaaatggccactctgcatttgcaaggcccggtggttgacatctgtgtggtttgttagatgagacaaaatgaccattaaatgagtttatagattattctgtatcaagataaatctgattccagttaagctataaacttgtgggattttcttgtagccctatagttctgtgacttcatttgctatacgctttaaatgtgttgagcagcctatgaacctaaagacatactgcagtttgttcataaatgtattcagtcttttattctttataattgtgtgtaaatgttaactaaacagtggattcctctcgtgttacagttttgagtgaattattaaagaagttaaaatgcaataa

SEQ ID NO: 30242 - protein, 758 aa, Homo sapiens
MSGESGQPEAGPSHAGLDWPNPERNRAGVPGGVIRRAGSQGPRSWIQKVLEQIMDSPRQCVTPSEVVPVTVLAVQRYLLEDEPRDTVPKPPLYCYDVTISDGVYQEKCYLDPSLNSLVYQNILKVGIQMRISRVSCLYNEKRIGQGILCIDNVHCGETSDSISLETPFRNRAHQEKPERPLRGGKSHYLALWNNEDPYGDIWLTDKQPEEHNFSDTKIISLSHLEMTWTNRRNFPALLVRILHKSKLRYYGKPDKKMIEPYQTFLEVADSSGTVSVIMWNALCPEWYKSLRVGLVLLLQDYSVKKSYPFRIQPVPVDPQIKLISTMEICLNLRDPPTNIIIIPEKQVKPEWRLPKLNHRFTTRSELDDMPENCICDVIGLLVFVGRVQRSKKKENREDFWSYRWIHIADGTSEQPFIVELFSTSQPEIFENIYPMAYFVCTQLKVVRNDNQVPKLLYLTTTNESGVFITGHRGQPYTYDAKNANRPSTSQAARVEIQERNGKRHQDDEPVNSQYFQTTSTNLSLSNKIRILQGPHANPVAVPQPGASVQTKGIKPGMPSIFNRRANINANLQGKARKTISDRWESQLWREKKFGLIDHLHYSRVYPESIPRKFMFEHRKFLSDQYNSQPAKYVPPEGRPPKLDDFKSARSLGHFEVTILGLNHEIAIDVAFLPMYCPEDIRTSQIDTLLTSMNYSCAYPQDTTGNDRLPGPRAVAGDIIKAATELDRVHIVGILDICNLGNNKVEVYLHKIYSPENTS

SEQ ID NO: 30243 - DNA, 556 bp, Homo sapiens
gcaaatgaggggtacagagtggaagcctgtattcaaatttaactgataaaagtattttgcctatttcacaaaattatatagaaggatgccagatataaacacagtgtctcacagttaatgtagtaagtttataattttgtgttgtgaaattacattgcaaatctaattcttatttttatcatttcagttctttaaaacttacaattttcttggacttttttgcagttgagtcgctcttgacagctataagtgaagtcaggaaggagattgaagacttgcagtatagggaacaaaagcgcattgcaattcaggggataattactgctataaagtatatcccccatagcagtgcgactgaaagtgcctcagcatcagaaacacttcggaatgctaacagaccctcgacctctcaagcagctagagtagaaattcaagaaagaaatggtaaacggcatcaagatgatgagcctgtgaattctcagtatttccaaactacatctacaaatttaagtctgagcaataaaataagaattcttcaaggcccacacgctaatcc

SEQ ID NO: 30244 - protein, 139 aa, Homo sapiens
FCVVKLHCKSNSYFYHFSSLKLTIFLDFFAVESLLTAISEVRKEIEDLQYREQKRIAIQGIITAIKYIPHSSATESASASETLRNANRPSTSQAARVEIQERNGKRHQDDEPVNSQYFQTTSTNLSLSNKIRILQGPHA

SEQ ID NO: 30245 - DNA, 2675 bp, Homo sapiens
atagagctgatgtatccagaggttatgttgctagaggtgagatcagttacctacgtgcaactgaaatttcaaacttctgttcagcagggacgtgagtggacaatggtgactgatagttggaaatatcagcaaacatcttaaattttatactcaaatgaatgagcaatgaaccaggagaataggtccagttttttttggctccttgtaatttttacctttttacttaaaattacagcatctttttcaatgagtgcctatgtgactgtgacttattacaatgaaaccagcaactacactgcaatagagacatgtgaatgtggcgtttatggattagcttcaccagtggctaatgctatgggagtggtaggcatccctaagaacaataactaccaagcttgtgaccacaacactgagtttagtaatactaagaagccctggattgcgctgatagaaagaggtaattgtacattttcagaaaaaattcaaacagcgggcagaagaaatgctgatgctgttgtgatttacaatgctccagagactggcaatcagacgatacagatggcaaattttggtgcagtagacattgttgcaatcatgatcggcaatctgaaaggcacaaaaattctgcaatctattcaaagaggcatacaagtgacaatggtcatagaagtagggaaaaaacatggcccttgggtgaatcactattcaatttttttcgtttctgtgtccttttttattattacggcggcaactgtgggctattttatcttttattctgctcgaaggctacggaatgcaagagctcaaagcaggaagcagaggcaattaaaggcagatgctaaaaaagctattggaaggcttcaactacgcacactgaaacaaggagacaaggaaattggccctgatggagatagttgtgctgtgtgcattgaattgtataaaccaaatgatttggtacgcatcttaacgtgcaaccatattttccataagacatgtgttgacccatggctgttagaacacaggacttgccccatgtgcaaatgtgacatactcaaagctttgggaattgaggtggatgttgaagatggatcagtgtctttacaagtccctgtatccaatgaaatatctaatagtgcctcctcccatgaagaggataatcgcagcgagaccgcatcatctggatatgcttcagtacagggaacagatgaaccgcctctggaggaacacgtgcagtcaacaaatgaaagtctacagctggtaaaccatgaagcaaattctgtggcagtggatgttattcctcatgttgacaacccaacctttgaagaagacgaaactcctaatcaagagactgctgttcgagaaattaaatcttaaaatctgtgtaaatagaaaacttgaaccattagtaataacagaactgccaatcagggcctagtttctattaataaattggataaatttaataaaataagagtgatactgaaagtgctcagatgactaatattatgctatagttaaatggcttaaaatatttaacctgttaacttttttccacaaactcattataatatttttcataggcaagtttcctctcagtagtgataacaacatttttagacattcaaaactgtcttcaagaagtcacgtttttcatttataacaattttcttataaaaacatgttgcttttaaaatgtggagtagctgtaatcactttattttatgatagtatcttaatgaaaaatactacttctttagcttgggctacatgtgtcagggtttttctccaggtgcttatattgatctggaattgtaatgtaaaaagcaatgcaaacttaggcgagtacttcttgaaatgtctatttaagctgctttaagttaatagaaaagattaaagcaaaatattcatttttactttttcttatttttaaaattaggctgaatgtacttcatgtgatttgtcaaccatagtttatcagagattatggacttaattgattggtatattagtgacatcaacttgacacaagattagacaaaaaattccttacaaaaatactgtgtaactatttctcaaacttgtgggatttttcaaaagctcagtatatgaatcatcatactgtttgaaattgctaatgacagagtaagtaacactaatattggtcattgatcttcgttcatgaattagtctacagaaaaaaaatgttctgtaaaattagtctgttgaaaatgttttccaaacaatgttactttgaaaattgagtttatgtttgacctaaatgggctaaaattacattagataaactaaaattctgtccgtgtaactataaattttgtgaatgcattttcctggtgtttgaaaaagaagggggggagaattccaggtgccttaatataaagtttgaagcttcatccaccaaagttaaatagagctatttaaaaatgcactttatttgtactctgtgtggcttttgttttagaattttgttcaaattatagcagaatttaggcaaaaataaaacagacatgtatttttgtttgctgaatggatgaaaccattgcattcttgtacactgatttgaaatgctgtaaatatgtcccaatttgtattgattctctttaaatataaaatgtaaataaaatattccaataaaagtttgtgtctggtgttagttt

SEQ ID NO: 30246 - protein, 402 aa, Homo sapiens; identical to SEQ ID NO: 4203

SEQ ID NO: 30247 - DNA, 2854 bp, Homo sapiens
cagtcggctgggcggagcttcacgctaaagccccagagcccgacgcggcagccgcggtagcggagaagactggagctccgaggagctgcatctgcggcaacctgtgtgctgacgctacgtgcctcctggctccgacgtagctcgcagctccccagtctcactccattccttccccacctggcgcgcacctgctcaagaccagggtcctgccaagcgctaggagggcgcgtgccaggggcgctagggaactgcggagcgcgcgcgccatggggccgccgcctggggccggggtctcctgccgcggtggctgcggcttttccagattgctggcatggtgcttcctgctggccctgagtccgcaggcacccggttcccggggggctgaagcagtgtggaccgcgtacctcaacgtgtcctggcgggttccgcacacgggagtgaaccgtacggtgtgggagctgagcgaggagggcgtgtacggccaggactcgccgctggagcctgtggctggggtcctggtaccgcccgacgggcccggggcgcttaacgcctgtaacccgcacacgaatttcacggtgcccacggtttggggaagcaccgtgcaagtctcttggttggccctcatccaacgcggcgggggctgcaccttcgcagacaagatccatctggcttatgagagaggggcgtctggagccgtcatctttaacttccccgggacccgcaatgaggtcatccccatgtctcacccgggtgcagtagacattgttgcaatcatgatcggcaatctgaaaggcacaaaaattctgcaatctattcaaagaggcatacaagtgacaatggtcatagaagtagggaaaaaacatggcccttgggtgaatcactattcaatttttttcgtttctgtgtccttttttattattacggcggcaactgtgggctattttatcttttattctgctcgaaggctacggaatgcaagagctcaaagcaggaagcagaggcaattaaaggcagatgctaaaaaagctattggaaggcttcaactacgcacactgaaacaaggagacaaggaaattggccctgatggagatagttgtgctgtgtgcattgaattgtataaaccaaatgatttggtacgcatcttaacgtgcaaccatattttccataagacatgtgttgacccatggctgttagaacacaggacttgccccatgtgcaaatgtgacatactcaaagctttgggaattgaggtggatgttgaagatggatcagtgtctttacaagtccctgtatccaatgaaatatctaatagtgcctcctcccatgaagaggataatcgcagcgagaccgcatcatctggatatgcttcagtacagggaacagatgaaccgcctctggaggaacacgtgcagtcaacaaatgaaagtctacagctggtaaaccatgaagcaaattctgtggcagtggatgttattcctcatgttgacaacccaacctttgaagaagacgaaactcctaatcaagagactgctgttcgagaaattaaatcttaaaatctgtgtaaatagaaaacttgaaccattagtaataacagaactgccaatcagggcctagtttctattaataaattggataaatttaataaaataagagtgatactgaaagtgctcagatgactaatattatgctatagttaaatggcttaaaatatttaacctgttaacttttttccacaaactcattataatatttttcataggcaagtttcctctcagtagtgataacaacatttttagacattcaaaactgtcttcaagaagtcacgtttttcatttataacaattttcttataaaaacatgttgcttttaaaatgtggagtagctgtaatcactttattttatgatagtatcttaatgaaaaatactacttctttagcttgggctacatgtgtcagggtttttctccaggtgcttatattgatctggaattgtaatgtaaaaagcaatgcaaacttaggcgagtacttcttgaaatgtctatttaagctgctttaagttaatagaaaagattaaagcaaaatattcatttttactttttcttatttttaaaattaggctgaatgtacttcatgtgatttgtcaaccatagtttatcagagattatggacttaattgattggtatattagtgacatcaacttgacacaagattagacaaaaaattccttacaaaaatactgtgtaactatttctcaaacttgtgggatttttcaaaagctcagtatatgaatcatcatactgtttgaaattgctaatgacagagtaagtaacactaatattggtcattgatcttcgttcatgaattagtctacagaaaaaaaatgttctgtaaaattagtctgttgaaaatgttttccaaacaatgttactttgaaaattgagtttatgtttgacctaaatgggctaaaattacattagataaactaaaattctgtccgtgtaactataaattttgtgaatgcattttcctggtgtttgaaaaagaagggggggagaattccaggtgccttaatataaagtttgaagcttcatccaccaaagttaaatagagctatttaaaaatgcactttatttgtactctgtgtggcttttgttttagaattttgttcaaattatagcagaatttaggcaaaaataaaacagacatgtatttttgtttgctgaatggatgaaaccattgcattcttgtacactgatttgaaatgctgtaaatatgtcccaatttgtattgattctctttaaatataaaatgtaaataaaatattccaataaaagtttgtgtctggtgttagttt

SEQ ID NO: 30248 - protein, 428 aa, Homo sapiens; identical to SEQ ID NO: 4205

SEQ ID NO: 30249 - DNA, 5709 bp, Homo sapiens
acgtgggagagaagggagggttgggggaagtgtggaaaacctgaacctgagctgctgtcgcctgaggaagatttggtgggaggagaagcagaggggaagagacgggttgagagtgaggtgaggagggcatctaggtcactgctcccggggggcacaaagttcgcgatgtggctgaagcctgaggaagtgcttctgaaaaatgcgctgaagctgtggctgatggaaaggtccaacgactacttcgtgctgcagcggcgtcggggctacggggaggaaggcggaggggggctcacagggcttctggttgggactcttgattcagtcttggactctactgctaaagtagctccatttcgcatcctacaccagacaccagattctcaagtttacttgtcaattgcatgtggagccaacagagaagaaataaccaagcattgggattggttggaacaaaatattatgaagaccttatctgtatttgattcaaatgaagatattactaattttgtacaaggaaaaataagaggattaattgctgaagagggaaaacattgttttgcaaaagaagatgatcctgagaaatttcgagaagcccttttgaaatttgaaaaatgttttggtttaccagagaaggagaagttagtgacctattattcatgcagttattggaaaggacgggttccttgtcagggttggctttatcttagcaccaactttctgagcttctattcttttttgttgggatcagaaataaaactcattatctcctgggatgaagtctcaaaacttgaaaagacttcaaatgtcatactgacagagagtattcacgtgtgttcccaaggagagaatcactacttttcaatgtttttgcacattaaccaaacataccttcttatggaacagctggcaaactatgccattagaagactttttgataaggaaacatttgataatgacccagtcctttataatcctctacagatcaccaaaagaggtctggaaaatagagcccacagtgagcaatttaatgccttttttaggctgcccaaaggagagagtttgaaagaagtacatgaatgtttcttatgggtaccattcagccacttcaatactcatgggaaaatgtgcatctcagaaaattatatctgctttgctagccaagatggcaatcagtgtagtgtaatcattccactacgagaggtcttagctatagataagacaaatgattccagcaaatctgtcatcattagcatcaaaggaaaaacagcttttcgcttccatgaagttaaagactttgaacaactggtagcaaaactcaggctcagatgcggagcagcttcaactcaatatcatgatattagcacagagcttgctattagttctgagtctacagagccatctgataattttgaggtgcaatctttgacaagtcagagggaatgcagtaaaactgtgaacactgaagccttaatgacagtatttcaccctcagaatttggagactcttaattctaaaatgttgaaagaaaaaatgaaggaacagtcatggaaaatactgtttgcagaatgtggacgtggtgttagtatgtttcgaaccaaaaagactcgagatcttgttgtaagagggattccagaaacattaagaggagaactctggatgcttttttcaggtgctgttaatgacatggctactaatcctgactattatactgaagtggttgagcagtccttagggacctgcaacttggctactgaagaaattgaacgtgatttacgtcgctctctgcctgagcacccagcctttcagagtgatactggcatatctgctctgagaagggtactcacagcttatgcatacaggaatcccaaaattggatactgccaggcaatgaatattttgacttcagtgctgcttctatatgcaaaagaggaagaagctttttggcttctggttgctgtatgtgaacgaatgttgcctgattattttaatcgtcgaattattggtgccttggtggatcaggcagtctttgaagaacttatcagggatcaccttcctcagctgacagaacacatgactgatatgacattcttttcctcagtttctctctcttggtttctcacactttttattagtgtgctacctattgaaagtgcagtgaatgtggtggactgtttcttctatgatggaataaaggccattttgcaactgggattggcaatacttgactataatttagacaaactgctgacttgtaaagatgatgctgaagctgtgacagccttaaacaggttctttgacaatgtcactaataaggatagtccattgccttcaaatgttcagcaaggttcaaatgtgagtgatgaaaaaaccagtcatactagagtggatattacagatttgattagagaatcaaatgagaaatatggtaatattcgctatgaagatatacatagtatgcgctgtcgaaataggttgtatgtgatacagaccctagaggaaacaacaaaacagaatgtgttgcgtgttgtatcacaagatgtgaaattgagccttcaagaattggatgaactttatgtcatctttaagaaagagctgtttttatcttgttattggtgtttgggttgcccagtattgaagcatcatgaccccagtctgccatatttggaacagtatcagattgactgccagcagttcagagcgttgtatcacttgttgagtccctgggctcattctgcaaataaagactcactagctttatggacattcagattgttagatgaaaactctgattgccttataaacttcaaagaattctcctctgcaattgacataatgtacaatggaagttttactgagaagcttaagctgctttttaagctacatattcctccagcttacactgaagtgaaatctaaggatgcttcaaaaggagatgaactttccaaggaagaattactttatttcagtcagctgcatgtttccaagcctgcaaatgagaaggaagcagaatcagcaaaacacagccctgaaaaaggcaaagggaaaattgatattcaagcatatctaagtcaatggcaagatgagcttttcaaaaaagaagaaaacattaaggatttaccaagaatgaatcagtctcagtttattcagttttcaaagaccctctataacttatttcatgaggaccctgaagaagaatcattatatcaagccattgctgttgtaaccagccttttactcaggatggaagaagttggaaggaaactacatagccctacatcatcagccaaaggattctctggtactgtctgtggttctggaggacccagtgaggaaaaaacagggagccacttggagaaagatccttgttcctttagggaggaacctcagtggtcatttgcatttgaacagattcttgcatcgctgttgaatgaaccagcattggtgaggttttttgagaaacccatagatgtaaaagccaagctggaaaatgcaagaatttctcagttaaggtctagaaccaagatgtaaatccctaggaattgcctatcatagacaagtttactaacattcctgtagctgtcagtttgattcctgtgagtagggctcagggatttatcttgttaccaatgtgtctgaaggccaaaatatatatccagaagcacaatgcatcattcctttgttgttgataatgggctttgttagcactttttaaaacaaacaaacaaacaaaacaaaaaagcaaaccacatttgttatctcaaattttgatgatattctcaaatacaaatatacttttttatatttcacaatatatgcaatatcaggggaatatgctaaatgttaccaccagagggcacaagcatatcacttttagtaaggaaattactagcttgtgttgctatttacatatgaattactgattattttgaaaagacggtgttatgcttgggtgttagtgaggctgatatgtcatgtcaatcgataaaccctactttccaaattatctaaaagattaccatttggggcccttgttttcaagttatctaactgaaatattattaatttttttaagttaatctcattcagtcttctagtaataaatgcttttttaagtaccttctacagtcttcctacctgaggggttcagaggctgctgactcacactgctaactctgttactgacaaaagcaaatcaataactctaaattctgggctgatataaagaaaaaaacaatattggatttggatttaatctgggtaaaatcagccttctgagaagggctaagaaacagttcaattaactgtataggtctttcattagaccgagacatcactagaaattctgggcactgctgtttgtggtatttgtctcagagtagcttatgactgttttggttctagctttagattttggattttcaccagtcatgtgttaatttacattagatagtaaagaatggctacactaagactgaattatcttattagtctggcaagcatataaagtatacttgtatgtaatgattgccaaggtaacagaattgctgacatctgtctaaaaagttttgactatccaatttagatgtgtaatttctatatactttatgctgtttatatttcagtcattacaccaagtccatttagagataatgggctttgttagcactttcaaaaaaaaaaaaagcaaaccatacttgtccactgtcctgtgctattcctaccaaggacaatttattaatcaattgacttagaaaatagggggagaaatcattcattggagcttctttctttagaaaagactttggttataagccttttgacttttctagatgtgaaaccatgaaagggcagacctccttcagagtgactcaagaggtctccctttcttggagggagttggtacagtcagcctttgggaagaatccactgtgaacaaagcttaacacatggggcttcatcgctcatagaatatgttattttcaaagaagttcaagaattttcaagttgagcctttgaaaatcccataaattggttttagctaaacacttactagtagtgtctttaaattatttaatcaaccttgtcttttcaaggaaattaccacttaaagagatagttggtaaataaacatctatgccttttctcagaaatgatttgctgaactatgtccatattttacagcttagataatagtttatatggaaactattatacatctgctattgtgcaatgattgttaaattatactgaagtagctctagaaagacacatgtatacaaggcactattgtacacactttgctgaatattttgtcagttgtatttacaaagaaaggtactttcttaagagcatatatgttattaatatttgatatgattttaaagtcagaatagtacagattgctgagtattatactttaggctagattaattaaaattgaatactgaaagagattttttgagttgcaaaaagtttataaatgcaaagcaaaaagaaaacatttattttctgagtctgcaggagaaacaaactaaacattatagttttatagctgctatcttgttaaccaaacaggttgttcataatattaaaaatcttacgtagttgtgttaaactgaaccagttcattataccttatgcattaaattaaatatgttataaggtggctttacttgtctttataaaaataaatatatctactaaacatga

SEQ ID NO: 30250 - protein, 1120 aa, Homo sapiens; identical to SEQ ID NO: 4207

SEQ ID NO: 30251 - DNA, 1448 bp, Homo sapiens
cagtgtagtgtaatcattccactacgagaggtcttagctatagataagacaaatgattccagcaaatctgtcatcattagcatcaaaggaaaaacagcttttcgcttccatgaagttaaagactttgaacaactggtagcaaaactcaggctcagatgcggagcagcttcaactcaatatcatgatattagcacagaggtaattaattatacagcaatcaaatcatttggaaaaaaaggtgtgtgtttagtgtagcccattcttcaagaggaattcatagtacctttcctatttatgcccaggggttttttttaaagatagaatctaagaaattatattgtctaactcacatccttaagcagaagtgagaattaaggactttattcatttttaggaacccatacattataaaattactataatttgatctttcttttactctatttgctgtttaccatataaatataccttgtactttcacatagtttggtttttaagaagtcaaaatatatttgagaattcagtgaggcctcgaaaaaggactcctcttactgttgcaaagacatagcaattttaaacctgtctggatatcttttatttaatatcttataggtcagccttatttacataatctggccaaaagcaaaatagtggtatatctgtttactagtaaaatattagagaggacagagaaatcaggaaagatccaaaattgacaccctaacatcacaattaaaagaactagaaaagcaagagcaaacactttcaaaagctagcagaaggcaagaaataactaaaatcagagcagaactgaaggaaatagagacacaaaaaacccttcaaaaaattaacgaatccacaagctggttttttgaaaggatcaacaaaattgatagaccactagcaagactaataaagaaaaaaagagagaagaatcaaatacacgcaataaaaaatgataaaggggatatcacgaccaatcccacagaaatacaaactaccatcagagaatactacaaacacctctacgcaaataaactagaaaatctagaagaaatggataaattcctcgacacatacactctcccaagactaaaccaggaagaagttgaatctctgaatagaccaataacaggagctgaaattgtggcaataatcaatagcttaacaacgaaaaagagcccaggaccagatggattcacagccgaattctaccagaggtacaaggaggaactggtaccattccttctgaaactattccaatcaatagaaaaagagggaatcctccctaacccattttatgaggccagcatcatcctgataccaaagccgggcagagacacaactaaaaaagagaattttggaccaatatccttgatgaacattgatgcaaaaatcctcaataaaatactggcaagccgaatccagcagcacatcaaaaagcttat

SEQ ID NO: 30252 - protein, 129 aa, Homo sapiens
MDKFLDTYTLPRLNQEEVESLNRPITGAEIVAIINSLTTKKSPGPDGFTAEFYQRYKEELVPFLLKLFQSIEKEGILPNPFYEASIILIPKPGRDTTKKENFGPISLMNIDAKILNKILASRIQQHIKK

SEQ ID NO: 30253 - DNA, 2577 bp, Homo sapiens
atggctactaatcctgactattatactgaagtggttgagcagtccttagggacctgcaacttggctactgaagaaattgaacgtgatttacgtcgctctctgcctgagcacccagcctttcagagtgatactggcatatctgctctgagaagggtactcacagcttatgcatacaggaatcccaaaattggatactgccaggcaatgaatattttgacttcagtgctgcttctatatgcaaaagaggaagaagctttttggcttctggttgctgtatgtgaacgaatgttgcctgattattttaatcgtcgaattattggtgccttggtggatcaggcagtctttgaagaacttatcagggatcaccttcctcagctgacagaacacatgactgatatgacattcttttcctcagtttctctctcttggtttctcacactttttattagtgtgctacctattgaaagtgcagtgaatgtggtggactgtttcttctatgatggaataaaggccattttgcaactgggattggcaatacttgactataatttagacaaactgctgacttgtaaagatgatgctgaagctgtgacagccttaaacaggttctttgacaatgtcactaataaggatagtccattgccttcaaatgttcagcaaggttcaaatgtgagtgatgaaaaaaccagtcatactagagtggatattacagatttgattagagaatcaaatgagaaatatggtaatattcgctatgaagatatacatagtatgcgctgtcgaaataggttgtatgtgatacagaccctagaggaaacaacaaaacagaatgtgttgcgtgttgtatcacaagatgtgaaattgagccttcaagaattggatgaactttatgtcatctttaagaaagagctgtttttatcttgttattggtgtttgggttgcccagtattgaagcatcatgaccccagtctgccatatttggaacagtatcagattgactgccagcagggttcagaggctgctgactcacactgctaactctgttactgacaaaagcaaatcaataactctaaattctgggctgatataaagaaaaaaacaatattggatttggatttaatctgggtaaaatcagccttctgagaagggctaagaaacagttcaattaactgtataggtctttcattagaccgagacatcactagaaattctgggcactgctgtttgtggtatttgtctcagagtagcttatgactgttttggttctagctttagattttggattttcaccagtcatgtgttaatttacattagatagtaaagaatggctacactaagactgaattatcttattagtctggcaagcatataaagtatacttgtatgtaatgattgccaaggtaacagaattgctgacatctgtctaaaaagttttgactatccaatttagatgtgtaatttctatatactttatgctgtttatatttcagtcattacaccaagtccatttagagataatgggctttgttagcactttcaaaaaaaaaaaaagcaaaccatacttgtccactgtcctgtgctattcctaccaaggacaatttattaatcaattgacttagaaaatagggggagaaatcattcattggagcttctttctttagaaaagactttggttataagccttttgacttttctagatgtgaaaccatgaaagggcagacctccttcagagtgactcaagaggtctccctttcttggagggagttggtacagtcagcctttgggaagaatccactgtgaacaaagcttaacacatggggcttcatcgctcatagaatatgttattttcaaagaagttcaagaattttcaagttgagcctttgaaaatcccataaattggttttagctaaacacttactagtagtgtctttaaattatttaatcaaccttgtcttttcaaggaaattaccacttaaagagatagttggtaaataaacatctatgccttttctcagaaatgatttgctgaactatgtccatattttacagcttagataatagtttatatggaaactattatacatctgctattgtgcaatgattgttaaattatactgaagtagctctagaaagacacatgtatacaaggcactattgtacacactttgctgaatattttgtcagttgtatttacaaagaaaggtactttcttaagagcatatatgttattaatatttgatatgattttaaagtcagaatagtacagattgctgagtattatactttaggctagattaattaaaattgaatactgaaagagattttttgagttgcaaaaagtttataaatgcaaagcaaaaagaaaacatttattttctgagtctgcaggagaaacaaactaaacattatagttttatagctgctatcttgttaaccaaacaggttgttcataatattaaaaatcttacgtagttgtgttaaactgaaccagttcattataccttatgcattaaattaaatatgttataaggtggctttacttgtctttataaaaataaatatatctactaaacatga

SEQ ID NO: 30254 - protein, 345 aa, Homo sapiens
MATNPDYYTEVVEQSLGTCNLATEEIERDLRRSLPEHPAFQSDTGISALRRVLTAYAYRNPKIGYCQAMNILTSVLLLYAKEEEAFWLLVAVCERMLPDYFNRRIIGALVDQAVFEELIRDHLPQLTEHMTDMTFFSSVSLSWFLTLFISVLPIESAVNVVDCFFYDGIKAILQLGLAILDYNLDKLLTCKDDAEAVTALNRFFDNVTNKDSPLPSNVQQGSNVSDEKTSHTRVDITDLIRESNEKYGNIRYEDIHSMRCRNRLYVIQTLEETTKQNVLRVVSQDVKLSLQELDELYVIFKKELFLSCYWCLGCPVLKHHDPSLPYLEQYQIDCQQGSEAADSHC

SEQ ID NO: 30255 - DNA, 1187 bp, Homo sapiens
aggttctgggaagtaggagaccccactggctttggtcccctaagaatggactctgctgcctgtgctgctgctgccacccctgttccagccctggctttggccctagctccagacctagcacaagccccactggcactccctggcctgttaagcccatcttgccttctctcctctggacaagaagtaaatgggagtgaaagaggaacttgtctctggaggccctggctgtcttccacaaatgactccccaaggcagatgaggaagctggtggatttggctgctggtggggcaacggctgctgaggtcaccaaggctgaatccaagttccatcaccctgtcaggctcttctggcctaaatcccgctccttcgactatctgtacagtgctggggagattttactgcagaactttcctgtccaggcaaccatcaacctatacgaggactcagacagcgaagaagaagaggaagatgaagagcaggaggatgaagaagagaagtaggaggccaatgaaaaggggccagaagggtgtgtgagggtaccagggtccataccctacagcgccacagctcatcccccttcctcacccctaacctatccaaatggaggcagccagagtctgattggggttcagtttgtctggcaagttttcacagacatcagttagccggaagtattagtccagcagatagagctttctggactgaaaattgggtcatctagctgcccagctcaccctggcttacctgaatggcctgtgagctcaggcctcttgcatctcattgtctgggctgctgttgtgttgaccatgggagggttctaggagctctagaaggaaggcttgctgaagcccccaggaagcagagcagggcagggaatgcccttgtggagggaagtagtcattcctcaggccctttgactccctagccttcccaggtggccatgtagtcccgtctctctgtggaaagcctgacttctggcttcaccccaaggaataccaacagcagatccatgcaaggttggggtgcctttttgatgagtcttacaggaagggaaggcagtgtgtagagaatcggcttgctctggggatgcctccccattttgcctgctgtccattgaagtctgtgtgttggcatgagatgaatcaggagaaaaataaactggatggtgttttcctttttcttggaa

SEQ ID NO: 30256 - protein, 151 aa, Homo sapiens; identical to SEQ ID NO: 4211

SEQ ID NO: 30257 - DNA, 1039 bp, Homo sapiens
aggttctgggaagtaggagaccccactggctttggtcccctaagaatggactctgctgcctgtgctgctgctgccacccctgttccagccctggctttggccctagctccagacctagcacaagccccactggcactccctggcctgttaagcccatcttgccttctctcctctggacaagaagtaaatgggagtgaaaggctcttctggcctaaatcccgctccttcgactatctgtacagtgctggggagattttactgcagaactttcctgtccaggcaaccatcaacctatacgaggactcagacagcgaagaagaagaggaagatgaagagcaggaggatgaagaagagaagtaggaggccaatgaaaaggggccagaagggtgtgtgagggtaccagggtccataccctacagcgccacagctcatcccccttcctcacccctaacctatccaaatggaggcagccagagtctgattggggttcagtttgtctggcaagttttcacagacatcagttagccggaagtattagtccagcagatagagctttctggactgaaaattgggtcatctagctgcccagctcaccctggcttacctgaatggcctgtgagctcaggcctcttgcatctcattgtctgggctgctgttgtgttgaccatgggagggttctaggagctctagaaggaaggcttgctgaagcccccaggaagcagagcagggcagggaatgcccttgtggagggaagtagtcattcctcaggccctttgactccctagccttcccaggtggccatgtagtcccgtctctctgtggaaagcctgacttctggcttcaccccaaggaataccaacagcagatccatgcaaggttggggtgcctttttgatgagtcttacaggaagggaaggcagtgtgtagagaatcggcttgctctggggatgcctccccattttgcctgctgtccattgaagtctgtgtgttggcatgagatgaatcaggagaaaaataaactggatggtgttttccttttt

SEQ ID NO: 30258 - protein, 104 aa, Homo sapiens; identical to SEQ ID NO: 4213

SEQ ID NO: 30259 - DNA, 1864 bp, Homo sapiens
cccagagcaagccgattctctacacactgccttcccttcctgtaagactcatcaaaaaggcaccccaaccttgcatggatctgctgttggtattccttggggtgaagccagaagtcaggctttccacagagagacgggactacatggccacctgggaaggctagggagtcaaagggcctgaggaatgactacttccctccacaagggcattccctgccctgctctgcttcctgggggcttcagcaagccttccttctagagctcctagaaccctcccatggtcaacacaacagcagcccagacaatgagatgcaagaggcctgagctcacaggccattcaggtcttctagatgccttcttgaggctgcttgtggccacccacagacacttgtaaggaggagagaagtcagcctggcagagagactctgaaatgagggattagaggtgttcaaggagcaagagcttcagcctgaagacaagggagcagtccctgaagacgcttctactgagaggtctgccatggcctctcttggcctccaacttgtgggctacatcctaggccttctggggcttttgggcacactggttgccatgctgctccccagctggaaaacaagttcttatgtcggtgccagcattgtgacagcagttggcttctccaagggcctctggatggaatgtgccacacacagcacaggcatcacccagtgtgacatctatagcacccttctgggcctgcccgctgacatccaggctgcccaggccatgatggtgacatccagtgcaatctcctccctggcctgcattatctctgtggtgggcatgagatgcacagtcttctgccaggaatcccgagccaaagacagagtggcggtagcaggtggagtctttttcatccttggaggcctcctgggattcattcctgttgcctggaatcttcatgggatcctacgggacttctactcaccactggtgcctgacagcatgaaatttgagattggagaggctctttacttgggcattatttcttccctgttctccctgatagctggaatcatcctctgcttttcctgctcatcccagagaaatcgctccaactactacgatgcctaccaagcccaacctcttgccacaaggagctctccaaggcctggtcaacctcccaaagtcaagagtgagttcaattcctacagcctgacagggtatgtgtgaagaaccaggggccagagctggggggtggctgggtctgtgaaaaacagtggacagcaccccgagggccacaggtgagggacactaccactggatcgtgtcagaaggtgctgctgaggatagactgactttggccattggattgagcaaaggcagaaatgggggctagtgtaacagcatgcaggttgaattgccaaggatgctcgccatgccagcctttctgttttcctcaccttgctgctcccctgccctaagtccccaaccctcaacttgaaaccccattcccttaagccaggactcagaggatccctttgccctctggtttacctgggactccatccccaaacccactaatcacatcccactgactgaccctctgtgatcaaagaccctctctctggctgaggttggctcttagctcattgctggggatgggaaggagaagcagtggcttttgtgggcattgctctaacctacttctcaagcttccctccaaagaaactgattggccctggaacctccatcccactcttgttatgactccacagtgtccagactaatttgtgcatgaactgaaataaaaccatcctacggtatccagggaacagaaagcaggatgcaggatgggaggacaggaaggcagcctgggacattt

SEQ ID NO: 30260 - protein, 38 aa, Homo sapiens
MVNTTAAQTMRCKRPELTGHSGLLDAFLRLLVATHRHL

SEQ ID NO: 30261 - DNA, 2964 bp, Homo sapiens
gcagatggattttgcaaagctgtggttaacgattagaaatcctttatcacctcagcccgtggccccttgtacttcgctcccctccctcaggatccctttctccctctccaggggcatctccccctccaaggctctgcaaagaactgccctgtcttctagatgccttcttgaggctgcttgtggccacccacagacacttgtaaggaggagagaagtcagcctggcagagagactctgaaatgagggattagaggtgttcaaggagcaagagcttcagcctgaagacaagggagcagtccctgaagacgcttctactgagaggtctgccatggcctctcttggcctccaacttgtgggctacatcctaggccttctggggcttttgggcacactggttgccatgctgctccccagctggaaaacaagttcttatgtcggtgccagcattgtgacagcagttggcttctccaagggcctctggatggaatgtgccacacacagcacaggcatcacccagtgtgacatctatagcacccttctgggcctgcccgctgacatccaggctgcccaggccatgatggtgacatccagtgcaatctcctccctggcctgcattatctctgtggtgggcatgagatgcacagtcttctgccaggaatcccgagccaaagacagagtggcggtagcaggtggagtctttttcatccttggaggcctcctgggattcattcctgttgcctggaatcttcatgggatcctacgggacttctactcaccactggtgcctgacagcatgaaatttgagattggagaggctctttacttgggcattatttcttccctgttctccctgatagctggaatcatcctctgcttttcctgctcatcccagagaaatcgctccaactactacgatgcctaccaagcccaacctcttgccacaaggagctctccaaggcctggtcaacctcccaaagtcaagagtgagttcaattcctacagcctgacagggtatgtgtgaagaaccaggggccagagctggggggtggctgggtctgtgaaaaacagtggacagcaccccgagggccacaggtgagggacactaccactggatcgtgtcagaaggtgctgctgaggatagactgactttggccattggattgagcaaaggcagaaatgggggctagtgtaacagcatgcaggttgaattgccaaggatgctcgccatgccagcctttctgttttcctcaccttgctgctcccctgccctaagtccccaaccctcaacttgaaaccccattcccttaagccaggactcagaggatccctttgccctctggtttacctgggactccatccccaaacccactaatcacatcccactgactgaccctctgtgatcaaagaccctctctctggctgaggttggctcttagctcattgctggggatgggaaggagaagcagtggcttttgtgggcattgctctaacctacttctcaagcttccctccaaagaaactgattggccctggaacctccatcccactcttgttatgactccacagtgtccagactaatttgtgcatgaactgaaataaaaccatcctacggtatccagggaacagaaagcaggatgcaggatgggaggacaggaaggcagcctgggacatttaaaaaaataaaaatgaaaaaaaaacccagaacccatttctcagggcactttccagaattctctcatatttgtgggctgggatcaagcctgcagcttgaggaaagcacaaggaaaggaaagaagatctggtggaaagctcaggtggcagcggactctgactccactgaggaactgcctcagaagctgcgatcacaactttggctgaagcccctgcctcactctagggcacctgacctggcctcttgcctaaaccacaaggctaagggctatagacaatggtttccttaggaacagtaaaccagtttttctagggatggcccttggctgggggatgacagtgtgggagctgtggggtactgaggaagacaccattccttgacggtgtctaagaagccaggtggatgtgtgtggtggctccagtgggtgtttctactctgccagtgagaggcagccccctagaaactcttcaggcgtaatggaaaatcagctcaaatgagatcaggcccccccagggtccacccacagagcactacagagcctctgaaagaccatagcaccaagcgagccccttcagattcccccactgtccatcggaagatgctccagagtggctagagggcatctaagggctccagcatggcatatccatgcccacggtgctgtgtccatgatctgagtgatagctgcactgctgcctgggattgcagctgaggtgggagtggagaatggttcccaggaagacagttccacctctaaggtccgaaaatgttccctttaccctggagtgggagtgaggggtcatacaccaaaggtattttccctcaccagtctaggcatgactggcttctgaaaaattccagcacacctcctcgaacctcattgtcagcagagagggcccatctgttgtctgtaacatgcctttcacatgtccaccttcttgccatgttccagctgctctcccaacctggaaggccgtctccccttagccaagtcctcctcaggcttggagaacttcctcagcgtcacctccttcattgagccttctctgatcactccatccctctcctacccctccctcccccaaccctcaatgtataaattgcttcttgatgcttagcattcacaatttttgattgatcgttatttgtgtgtgtgtgtccgatctcacaagtatattgtaaacccttcggtgggtgggggccatatcctagacctctctgtatcccccagactatctgtaacagtgccaggcacacagtaggtgatcaataaacacttgttgattgagtaa

SEQ ID NO: 30262 - protein, 77 aa, Homo sapiens
MDFAKLWLTIRNPLSPQPVAPCTSLPSLRIPFSLSRGISPSKALQRTALSSRCLLEAACGHPQTLVRRREVSLAERL

SEQ ID NO: 30263 - DNA, 904 bp, Homo sapiens
agacacttgtaaggaggagagaagtcagcctggcagagagactctgaaatgagggattagaggtgttcaaggagcaagagcttcagcctgaagacaagggagcagtccctgaagacgcttctactgagaggtctgccatggcctctcttggcctccaacttgtgggctacatcctaggccttctggggcttttgggcacactggttgccatgctgctccccagctggaaaacaagttcttatgtcggtgccagcattgtgacagcagttggcttctccaagggcctctggatggaatgtgccacacacagcacaggcatcacccagtgtgacatctatagcacccttctgggcctgcccgctgacatccaggctgcccaggccatgatggtgacatccagtgcaatctcctccctggcctgcattatctctgtggtgggcatgagatgcacagtcttctgccaggaatcccgagccaaagacagagtggcggtagcaggtggagtctttttcatccttggaggcctcctgggattcattcctgttgcctggaatcttcatgggatcctacgggacttctactcaccactggtgcctgacagcatgaaatttgagattggagaggctctttacttgggcattatttcttccctgttctccctgatagtccatccctctcctacccctccctcccccaaccctcaatgtataaattgcttcttgatgcttagcattcacaatttttgattgatcgttatttgtgtgtgtgtgtccgatctcacaagtatattgtaaacccttcggtgggtgggggccatatcctagacctctctgtatcccccagactatctgtaacagtgccaggcacacagtaggtgatcaataaacacttgttgattgagtaa

SEQ ID NO: 30264 - protein, 202 aa, Homo sapiens
MASLGLQLVGYILGLLGLLGTLVAMLLPSWKTSSYVGASIVTAVGFSKGLWMECATHSTGITQCDIYSTLLGLPADIQAAQAMMVTSSAISSLACIISVVGMRCTVFCQESRAKDRVAVAGGVFFILGGLLGFIPVAWNLHGILRDFYSPLVPDSMKFEIGEALYLGIISSLFSLIVHPSPTPPSPNPQCINCFLMLSIHNF

SEQ ID NO: 30265 - DNA, 759 bp, Homo sapiens
aaggaggagagaagtcagcctggcagagagactctgaaatgagggattagaggtgttcaaggagcaagagcttcagcctgaagacaagggagcagtccctgaagacgcttctactgagaggtctgccatggcctctcttggcctccaacttgtgggctacatcctaggccttctggggcttttgggcacactggttgccatgctgctccccagctggaaaacaagttcttatgtcggtgccagcattgtgacagcagttggcttctccaagggcctctggatggaatgtgccacacacagcacaggcatcacccagtgtgacatctatagcacccttctgggcctgcccgctgacatccaggctgcccaggccatgatggtgacatccagtgcaatctcctccctggcctgcattatctctgtggtgggcatgagatgcacagtcttctgccaggaatcccgagccaaagacagagtggcggtagcaggtggagtctttttcatccttggaggcctcctgggattcattcctgttgcctggaatcttcatgggatcctacgggacttctactcaccactggtgcttagcattcacaatttttgattgatcgttatttgtgtgtgtgtgtccgatctcacaagtatattgtaaacccttcggtgggtgggggccatatcctagacctctctgtatcccccagactatctgtaacagtgccaggcacacagtaggtgatcaataaacacttgttgattgag

SEQ ID NO: 30266 - protein, 158 aa, Homo sapiens [sequence omitted]

SEQ ID NO: 30267 - DNA, 1181 bp, Homo sapiens
gagaagtcagcctggcagagagactctgaaatgagggattagaggtgttcaaggagcaagagcttcagcctgaagacaagggagcagtccctgaagacgcttctatcaccactggtgcctgacagcatgaaatttgagattggagaggctctttacttgggcattatttcttccctgttctccctgatagctggaatcatcctctgcttttcctgctcatcccagagaaatcgctccaactactacgatgcctaccaagcccaacctcttgccacaaggagctctccaaggcctggtcaacctcccaaagtcaagagtgagttcaattcctacagcctgacagggtatgtgtgaagaaccaggggccagagctggggggtggctgggtctgtgaaaaacagtggacagcaccccgagggccacaggtgagggacactaccactggatcgtgtcagaaggtgctgctgaggatagactgactttggccattggattgagcaaaggcagaaatgggggctagtgtaacagcatgcaggttgaattgccaaggatgctcgccatgccagcctttctgttttcctcaccttgctgctcccctgccctaagtccccaaccctcaacttgaaaccccattcccttaagccaggactcagaggatccctttgccctctggtttacctgggactccatccccaaacccactaatcacatcccactgactgaccctctgtgatcaaagaccctctctctggctgaggttggctcttagctcattgctggggatgggaaggagaagcagtggcttttgtgggcattgctctaacctacttctcaagcttccctccaaagaaactgattggccctggaacctccatcccactcttgttatgactccacagtgtccagactaatttgtgcatgaactgaaataaaaccatcctacggtatccagggaacagaaagcaggatgcaggatgggaggacaggaaggcagcctgggacatttaaaaaaataaaaatgaaaaaaaaacccagaacccatttctcagggcactttccagaattctctcatatttgtgggctgggatcaagcctgcagcttgaggaaagcacaaggaaaggaaagaagatctggtggaaagctcaggtggcagcggactctgactccactgaggaactgc

SEQ ID NO: 30268 - protein, 75 aa, Homo sapiens
MKFEIGEALYLGIISSLFSLIAGIILCFSCSSQRNRSNYYDAYQAQPLATRSSPRPGQPPKVKSEFNSYSLTGYV

SEQ ID NO: 30269 - DNA, 526 bp, Homo sapiens
agacattgtattcatttctttattgtgtttacatagcacatactctccaaagagttcagggtacttttcaaaagacattgaataatgaacacataaaaatataccaacagtaaaaagtaggaagtagaggagaaacaatcaaaggaaggtgagatcaagcagtggcaaaaggattagctatccattcacttcaataccagagccacctctttgtttcctatttactaagaagccataccagcatgagatctccttgatagtgttaaatcccactgtggaaagattgaaaaatatctcccagccttaccagaggttacgatctagtgtggaggcaaaagacattgagaagaaaaaagcaggtgcctcctcctggctctcctgttaggttaacataatcataattcccctttgaaatgtctcccacatttgccctttaacttcctattgccatgataagcatttaggttattacctaaataacttgttacctcatgccttgattatctaaataaattcttagatggcc

SEQ ID NO: 30270 - protein, 85 aa, Homo sapiens [sequence omitted]

SEQ ID NO: 30271 - DNA, 2152 bp, Homo sapiens
gaaccggtggagaaacgaagaaggctccagaatgagatgacaacaccttctctagattattccatgcctgctccttacaggagggtagaagcacctgttgcctacccagaaggggagaacagccatgataaatcgagttctgagagaagtacaccaccataccttttcccagaatacccagaagcaagcaagaatacaggtcagaatagggaggtttcaattctgtatccaggggccaaagaccaacgccaggggtccctgcttcctgaagaattagaagatcagatgccaagattggtggcagaagaatctaacagaggtagcacaaccataaacaaagaagaagtcaacaagggaccttttgtagctgttgtgggtgttgccaaaggtgttagagattcaggagctcccattcagctgatcccttttaacagagaggagcttgctgagagacgaaaagcagttgaatcctggaacccagtgccttattctgtggcctctgctgcaatccctgctgcagccattggggagaaagcaagaggctatgaggagagcgaaggtcataatacaccaaagttgaagaaccagagagagctggaagaattgaagagaaccacagaaaaattggaacgtgttttggctgaaaggaatttgttccagcaaaaggtggaggagctggaacaggagaggaatcactggcagtctgaattcaagaaagtccaacatgaattggtgatctacagtacccaggaggcggaaggcttgtactggagcaagaaacacatgggttatcgccaagctgaattccagattctgaaagctgagctggaaagaaccaaagaggaaaagcaagagttaaaagagaaactgaaggaaacagagacacacctggaaatgctgcagaaggctcaggtctcctaccggaccccagagggagatgacctagaaaggttaattactagggtttagttatcagcttgtgagtgctaatgggaagcatcccttaggacccccacttactggccgtagacaaaggaggaagccttaattcacaggccaccaagaattgagtaattacttcttagaaagctgcagccagtctccctgtgcttggtggcgttgtgctttcttctttctagctaatgaaaacataactgttgagaaatgtggttccattttgaaggggcttcattttattctgttggttaatgacttcatgtcatctcttctcctgccccctcactccttcatacagggctttggcaaagcttacgcggctacgtatccacgtcagctatctccttacttctgtcctccctcacttggagcttcgtgagatcgggtatgactcagaacaagtggatgggatcctgtacacggtgctggaggcaaatcacatactggattgagcaccagactgtatacccttctcttctcttatcttctgtctgttctcttttctctccctccctcacgtctctctctctctctctctctctctctctctctctctctcaccctcacctttatgccttatatagagaatctctgtgtaaatcctggctcataatcagtctcctttttatcagttttggtgtggagaaagaggccagtttaaataggctttcaagagtctagggtcagaaaagcaatagtcactaagctaggtgacctgaaagctttaattttcatgacctggatatgtggtctattgtatatctttttctgaaatggtttgtattcatttaggttagatcaatcagcagatattgggtccggtataccaggtattattttggggtaagctaacaagtacaactcatgtttgcagccttcgaagatgtaacaatctcgttggaaacataagacatacatcacattatacacaaaagtgtatgatatgtacaactgagtggtacagatatgacatggaagatctgggggaggaagttcaaggaaggcaccacaccagaaatgggacctaaattaaggcttaaagaatgagcatggccacactgtcagtgagtgttctttaggtggtaggactatggttgatatttttcttcttcctatcttcctgcctttttcagattttcaatattaaacttgttattcttacattggaaaaaaataaattgtttttaaaaagatc

SEQ ID NO: 30272 - protein, 310 aa, Homo sapiens [sequence omitted]

SEQ ID NO: 30273 - DNA, 3031 bp, Homo sapiens
aaaaaatgattattaccgaggattcattgcccagcctagaagccatcttgaactattccattttcaaccgtgaaaatgacctgctggcccagtttgatgccatcccaggcaaaaaaggcactcgtgttctcatttggaacatccgcagaaataaaaatggaaaatctgagttggactttgatacagatcaatatgacatcctggtatcagactttgacacagaagaaaaaatgactggcggtgttacctctgagctaccagaaacagaatattctttaagggcattttgtggtattctatacatgaagccacgcatgaaaatttttctgcgtcaaaagaaggtgactacccagatgattgccaagagcctggccaatgtagaatatgatacatataaacctaccttcacaaataagcaggtgagaatcacctttgggttctcttgcaagaatagtaaccagtttggaataatgatgtatcataacaaccgactcataaaatcttttgagaaggtggggtgccaggtgaagccaactcgtggagaaggtgtaggagtaattggagtcattgagtgcaatttcctaaaacctgcctacaacaaacaagactttgagtataccaaggagtaccggctaacaataaatgcccttgcccagaagctcaatgcttactggaaggaaaaaacatctcaagataattttgagacctcaactgtagccaggccaataccgaaggttcctgaccagacatgggttcagtgtgatgagtgtcttaaatggagaaagcttcctgggaagattgatccatccatgttacctgcaagatggttttgttattataattcccatccaaagtacaggagatgctctgttccagaggaacaagaactcactgatgaagacctgtgcttgagcaaagctaagaaacaagaacaaactgttgaggagaagaagaagatgcctatggaaaatgagaaccaccaggtattcagtaatccaccaaagatccttactgttcaagaaatggctggattgaataacaagacaattggatatgagggaattcatagccctagtgtgcttccttctggtggagaagaaagcagatcaccatctcttcaacttaagcctctggattccagtgttttacagttttccagtaagtacaaatggatcctaggtgaagaaccggtggagaaacgaagaaggctccagaatgagatgacaacaccttctctagattattccatgcctgctccttacaggagggtagaagcacctgttgcctacccagaaggggagaacagccatgataaatcgagttctgagagaagtacaccaccataccttttcccagaatacccagaagcaagcaagaatacaggtcagaatagggaggtttcaattctgtatccaggggccaaagaccaacgccaggggtccctgcttcctgaagaattagaagatcagatgccaagattggtggcagaagaatctaacagaggtagcacaaccataaacaaagaagaagtcaacaagggaccttttgtagctgttgtgggtgttgccaaaggtgttagagattcaggagctcccattcagctgatcccttttaacagagaggagcttgctgagagacgaaaagcagttgaatcctggaacccagtgccttattctgtggcctctgctgcaatccctgctgcagccattggggagaaagcaagaggctatgaggagagcgaaggtcataatacaccaaagttgaagaaccagagagagctggaagaattgaagagaaccacagaaaaattggaacgtgttttggctgaaaggaatttgttccagcaaaaggtggaggagctggaacaggagaggaatcactggcagtctgaattcaagaaagtccaacatgaattggtgatctacagtacccaggaggcggaaggcttgtactggagcaagaaacacatgggttatcgccaagctgaattccagattctgaaagctgagctggaaagaaccaaagaggaaaagcaagagttaaaagagaaactgaaggaaacagagacacacctggaaatgctgcagaaggctcaggtctcctaccggaccccagagggagatgacctagaaagggctttggcaaagcttacgcggctacgtatccacgtcagctatctccttacttctgtcctccctcacttggagcttcgtgagatcgggtatgactcagaacaagtggatgggatcctgtacacggtgctggaggcaaatcacatactggattgagcaccagactgtatacccttctcttctcttatcttctgtctgttctcttttctctccctccctcacgtctctctctctctctctctctctctctctctctctctctcaccctcacctttatgccttatatagagaatctctgtgtaaatcctggctcataatcagtctcctttttatcagttttggtgtggagaaagaggccagtttaaataggctttcaagagtctagggtcagaaaagcaatagtcactaagctaggtgacctgaaagctttaattttcatgacctggatatgtggtctattgtatatctttttctgaaatggtttgtattcatttaggttagatcaatcagcagatattgggtccggtataccaggtattattttggggtaagctaacaagtacaactcatgtttgcagccttcgaagatgtaacaatctcgttggaaacataagacatacatcacattatacacaaaagtgtatgatatgtacaactgagtggtacagatatgacatggaagatctgggggaggaagttcaaggaaggcaccacaccagaaatgggacctaaattaaggcttaaagaatgagcatggccacactgtcagtgagtgttctttaggtggtaggactatggttgatatttttcttcttcctatcttcctgcctttttcagattttcaatattaaacttgttattcttacattggaaaaaaataaattgtttttaaaaagatc

SEQ ID NO: 30274 - protein, 760 aa, Homo sapiens
MIITEDSLPSLEAILNYSIFNRENDLLAQFDAIPGKKGTRVLIWNIRRNKNGKSELDFDTDQYDILVSDFDTEEKMTGGVTSELPETEYSLRAFCGILYMKPRMKIFLRQKKVTTQMIAKSLANVEYDTYKPTFTNKQVRITFGFSCKNSNQFGIMMYHNNRLIKSFEKVGCQVKPTRGEGVGVIGVIECNFLKPAYNKQDFEYTKEYRLTINALAQKLNAYWKEKTSQDNFETSTVARPIPKVPDQTWVQCDECLKWRKLPGKIDPSMLPARWFCYYNSHPKYRRCSVPEEQELTDEDLCLSKAKKQEQTVEEKKKMPMENENHQVFSNPPKILTVQEMAGLNNKTIGYEGIHSPSVLPSGGEESRSPSLQLKPLDSSVLQFSSKYKWILGEEPVEKRRRLQNEMTTPSLDYSMPAPYRRVEAPVAYPEGENSHDKSSSERSTPPYLFPEYPEASKNTGQNREVSILYPGAKDQRQGSLLPEELEDQMPRLVAEESNRGSTTINKEEVNKGPFVAVVGVAKGVRDSGAPIQLIPFNREELAERRKAVESWNPVPYSVASAAIPAAAIGEKARGYEESEGHNTPKLKNQRELEELKRTTEKLERVLAERNLFQQKVEELEQERNHWQSEFKKVQHELVIYSTQEAEGLYWSKKHMGYRQAEFQILKAELERTKEEKQELKEKLKETETHLEMLQKAQVSYRTPEGDDLERALAKLTRLRIHVSYLLTSVLPHLELREIGYDSEQVDGILYTVLEANHILD

SEQ ID NO: 30275 - DNA, 763 bp, Homo sapiens
agtcgccgggtcggtagaggtgctgacagggcggagccgccgcttgcctcagccggcctcacccctcccgcccgggacaggtggctggagcgcgctccgcctccgccagctgcgagtgggagcgagggagggccggtcccggacggtcgccgccagctgcgagtggaagtgagcgagggctagtcccggaccgccgggccaggggtccggcggcagcagacgggtaccgtggcggccaaaaaaatgctcctgtaccgaggggcccccgccggccctggcgcgccgggctgcgggctggcccggcccggcggcggcccgcaggccttcgggatccgcctgagcacgatgagcccccgctacctccagagcaactccagcagccacacgcgacccttcagtgccatcgcggagctgctagataatgctgtagatccagatgtatctgccaggacggtctttatagatgttgaggaggtcaagaataaatcttgtttgacctttaccgatgatggatgtgggatgacacctcataaactacaccgaatgctcagctttggctttacagataaagtaataaagaagagccagtgtcccattggggtctttggtaatggtttcaagtcaggctccatgcggctaggaaaggacgcccttgtcttcaccaagaatgggggtactctcactgttggacttctatcacagacctatctggaatgtgtccaggcccaggcagttattgtaccaattgttccattcaaccagc

SEQ ID NO: 30276 - protein, 172 aa, Homo sapiens
MLLYRGAPAGPGAPGCGLARPGGGPQAFGIRLSTMSPRYLQSNSSSHTRPFSAIAELLDNAVDPDVSARTVFIDVEEVKNKSCLTFTDDGCGMTPHKLHRMLSFGFTDKVIKKSQCPIGVFGNGFKSGSMRLGKDALVFTKNGGTLTVGLLSQTYLECVQAQAVIVPIVPFN

SEQ ID NO: 30277 - DNA, 2607 bp, Homo sapiens
ggacttgaggtccgcggcctatttacccaagttggaggtaggggcctgtggaaacatgaagagggtaaacagctgtgtgaagagtgatgagcatgtcctggaggagctggaaacagaaggggagaggcagctgaaaagcctccttcagcatcaacttgatacttctgtctccattgaggaatgtatgtctaagaaagagagctttgctcctggtactatgtacaagccctttgggaaggaagcagctgggactatgactttgtcccaattccagacactgcatgagaaggaccaggaaactgcttctctcagggaattagggcttaatgaaacagaaatcttgatctggaagagccatgtttctggtgaaaagaagacaaaactgagggcaactcctgaagcaatacagaaccgtcttcaagatattgaagaaaggatctcggagcgtcagcgcattctttgcctgccacagagatttgcaaagagcaaacagctgacccggcgagaaatggaaatagaaaagtctttatttcagggagctgatcgtcactccttccttaaggctctttattaccaagatgaaccccaaaagaagaacaaaggtgatcccatgaacaacctggaaagtttttaccaagagatgataatgaaaaaacgtcttgaagagtttcaacttatgagaggtgaaccctttgcttcccactcactggtctcagctacatcagtgggtgatagtggcacagctgagagcccatcattactccaggacaagggaaaacaggcagcacagggtaaaggccccagtctccatgtggcaaatgttattgatttttcacctgagcagtgttggactgggcctaagaagctgacgcagccaatagaatttgtcccagaagatgaaatccagagaaatcgtttgtcagaggaagagatccgaaaaattcctatgttttcttcatataatccaggggaaccaaacaaggtattatacctgaagaaccttagccctcgggtgactgaaagagatcttgtgtcattgttcgctcggttccaggagaaaaaaggacctccaattcaattccgaatgatgactggacgaatgaggggccaggcttttatcacctttcccaataaggagatagcatggcaagcattgcatctagtaaatggatacaaactacatgggaaaatattggtgatagagtttggaaagaacaaaaagcaacggtcaaatctccaagcgacttctctcatatcatgtgctacaggttgaagaagctgagtggaagcaaaactgtcttgtactaaagaactgactccagatggtaagacaaatccacaggaacaaatggagagaacgtgaaataggaaataagtttaatataaaaaaactataaacatatacttactcttctctcagcttcttttaaagatgtaaaattatattaagtaattataataatgtgtgttgggtttgtaatgtataggaataacatatataacaataataccacaaagcgggggatgggtttatataggaatagggttgttacattggaattaagttagtgtttatctgaagcctattctgtttagttaagatgtgtatggtaagccctagagcaaccactgaggaaataacttttaaaaaatcaaaaatattattaaatgtaaatatcacattatgaaataatgcaaaagaaggaatggagaagcaaaaagcttgaggcatatcaaaaacaataaaatggcagtcataagtcttcctatatcaaaataacaatgtgcatggattaagcaatactataaaaggcagagatgtcagaaacaagtctgattccacttcatgccatctatttgagacacactttagaagatagaaagagattaaaggtaaaaggatggaaaacaaatatatcacacagacaacagccataagaaagctggagtggctattctaataccagacaaaatagacttaaaaaaatgttactggagataaagagtaaaatgttacaatgataaaagggtcaatacatcaggaagatgtaacaactataaatatatatgcatctaacagtagagcccaaaatacatgaagcaaaaactgaaaggaaaggagaaacagataagtccataaaaagagttggaatattcaatacccctttttcaataatagagcacctagacagaagataaaccaggaaatagaagacttgaacaacattataaggcaaattgacctaaaagacatctatagaactttccacccaacatcagaatacatattcttctcgagtgcatatgaaacatctccaaaataggtcataagttaaagcataaaacaagccttaataaatataagtagactgaaatcatgcaaagcatgccctctgaccacatgggatgaagttagaaaacaatgaaaagttgggaaactcacaaatatgtggaaatcagacacacttgtaagtgactggctgggtgcagtagctcacgcctgaaatctcagcactttggtaggccgaagtgggaggattccttggatcccttgagaccaggaattcaagaccagcctgggcaacacagcaagaccctgtcattacc

SEQ ID NO: 30278 - protein, 405 aa, Homo sapiens
MKRVNSCVKSDEHVLEELETEGERQLKSLLQHQLDTSVSIEECMSKKESFAPGTMYKPFGKEAAGTMTLSQFQTLHEKDQETASLRELGLNETEILIWKSHVSGEKKTKLRATPEAIQNRLQDIEERISERQRILCLPQRFAKSKQLTRREMEIEKSLFQGADRHSFLKALYYQDEPQKKNKGDPMNNLESFYQEMIMKKRLEEFQLMRGEPFASHSLVSATSVGDSGTAESPSLLQDKGKQAAQGKGPSLHVANVIDFSPEQCWTGPKKLTQPIEFVPEDEIQRNRLSEEEIRKIPMFSSYNPGEPNKVLYLKNLSPRVTERDLVSLFARFQEKKGPPIQFRMMTGRMRGQAFITFPNKEIAWQALHLVNGYKLHGKILVIEFGKNKKQRSNLQATSLISCATG

SEQ ID NO: 30279 - DNA, 817 bp, Homo sapiens
cagaagatgaaatccagagaaatcgtttgtcagaggaagagatccgaaaaattcctatgttttcttcatataatccaggggaaccaaacaaggtattatacctgaagaaccttagccctcgggtgactgaaagagatcttgtgtcattgttcgctcggttccaggagaaaaaaggacctccaattcaattccgaatgatgactggacgaatgaggggccaggcttttatcacctttcccaataaggagatagcatggcaagcattgcatctagtaaatggatacaaactacatgggaaaatattggtgatagagtttggaaagaacaaaaagcaacggtcaaatctccaagcgacttctctcatatcatgtgctacaggttgaagaagctgagtggaagcaaaactgtcttgtactaaagaactgactccagatggtaagacaaatccacaggaacaaatggagagaacgtgaaataggaaataagtttaatataaaaaaactataaacatatacttactcttctctcagcttcttttaaagatgtaaaattatattaagtaattataataatgtgtgttgggtttgtaatgtataggaataacatatataacaataataccacaaagcgggggatgggtttatataggaatagggttgttacattggaattaagttagtgtttatctgaagcctattctgtttagttaagatgtgtatggtaagccctagagcaaccactgaggaaataacttttaaaaaatcaaaaatattattaaatgtaaatatcacattatgaaataatgcaaaagaaggaa

SEQ ID NO: 30280 - protein, 108 aa, Homo sapiens
MFSSYNPGEPNKVLYLKNLSPRVTERDLVSLFARFQEKKGPPIQFRMMTGRMRGQAFITFPNKEIAWQALHLVNGYKLHGKILVIEFGKNKKQRSNLQATSLISCATG

SEQ ID NO: 30281 - DNA, 3211 bp, Homo sapiens
cttgaggtccgcggcctatttacccaagttggaggtaggggcctgtggaaacatgaagagggtaaacagctgtgtgaagagtgatgagcatgtcctggaggagctggaaacagaaggggagaggcagctgaaaagcctccttcagcatcaacttgatacttctgtctccattgaggaatgtatgtctaagaaagagagctttgctcctggtactatgtacaagccctttgggaaggaagcagctgggactatgactttgtcccaattccagacactgcatgagaaggaccaggaaactgcttctctcagggaattagggcttaatgaaacagaaatcttgatctggaagagccatgtttctggtgaaaagaagacaaaactgagggcaactcctgaagcaatacagaaccgtcttcaagatattgaagaaaggatctcggagcgtcagcgcattctttgcctgccacagagatttgcaaagagcaaacagctgacccggcgagaaatggaaatagaaaagtctttatttcagggagctgatcgtcactccttccttaaggctctttattaccaagcataccacaaaaagacaagtgcagacaagtacatgacctcaatgaagaggaagataaaattaggcacaaaagatgaaccccaaaagaagaacaaaggtgatcccatgaacaacctggaaagtttttaccaagagatgataatgaaaaaacgtcttgaagagtttcaacttatgagaggacttaccagttttcccagagaagacttccaaaatctttcttacgagggtactaccagcgttctaggagccaaatggcagaaaaggactgggaggacctcaacatttagtattctcttagtttccttgctttcagaaacagtgttcacatcttcagccatgtatggcattccccatcttctgacaatgagcctcaagttttctaccaggattggcaagttatcttttaccccatagcatattgtgagggagggtatttaaaaatcatattggcttttagacagccttcaactgatttgccttattttaaccccatcccttcacatttatttctgaaggtaagtgaaattatcagttcctgaactatttaaggattcttaagtggtgacaggtgtgttcttggctctctccactaccagtttaaaattcagctttcttcagtgtgctgagttggttcctgctcatccaattatttttcatcttccagattattattgctgttgtctccttttcttgttcctcctgaccttgttgatttgtgtttttttttttttttttttaagtgcctatagttttagagagttttctggatggaatgaaattaaatgaatgtgttcaatccaccatttttatgtgaaactaattctaatcataatgaaagagttttcttacggctgagcatggtgtctcacgcctgtaatcccagcattttgggaggccaaggcgggtggatcacctgagtttgggagttcaagaccagcctggacaacatggtgaaaccccacgtctactaaaaatacaaaaattagccaggtgtggtggcacatgactgtaatcccagctactcgggaggctgaggcatgagaatcacttgagcctgggaggccaaggttgcagtgagcagagattgcgccactgcactccagcctgggtgacagagtgagactttgtctcaaaaagaaaaaaacaaagagtgccttacctcctttatatgatattttggttgatcctcaatttgttttaggtattatacctgaagaaccttagccctcgggtgactgaaagagatcttgtgtcattgttcgctcggttccaggagaaaaaaggacctccaattcaattccgaatgatgactggacgaatgaggggccaggcttttatcacctttcccaataaggagatagcatggcaagcattgcatctagtaaatggatacaaactacatgggaaaatattggtgatagagtttggaaagaacaaaaagcaacggtcaaatctccaagcgacttctctcatatcatgtgctacaggtagcactacagaaattagtggtagctagaatatatataaattgtgggtcctggatggtctttcttgaattggaatcttggatctaggatttatgtatagacaccagtttgtttggagttgaagaggaaaaactaactgagggaggggaaaaaagtaatttcagcttttggagagaactggtagaaaacattttctattatataattgaagactatataggacagatgatatgctgagtatgaagggtaaagtgcaaagagtattattttctcaggatgaattacaacggattattcctaaggatttttaaaaatctttataatttttctggggtcctcaatatttgtctctagagataacattctttcttagactgcttcgtatacacagaaataaaaaactaattaaatgttgaaatatttctttactagagcccatttgccatatttcatccacctagtaaataaaagagtaggacccccaggcctaagcatcaacaaatgctattaagtcagaactatcagcagtaatagtaggtagtttcataagtcagttgacttatttaatgaatgcttcctccacaagttatcagtcttcaaaaagctatatatttttctagtgaaatattttagatcaaaatgttggtgttctcacagccatttaagctagcaaccattgagtatcattgaattcatagcaataaacattgattaagtgtctaatatatgttaaatattaggcatatgaattttagaagaggaacatacaagcaaagaatgccaaacggaaatggaaataaagcgttctctagaaaagaggatgccagtcacaaatcccccagttgtttgtttatggttgctggaaaataaaaaaacaatatacagagaggaagtagtacaaactggagtcagacctgtacagccacacttaacattctatgaccttggcaagtcacttaatctgagcctcacatttttcatctataaagtgaggataataatgctacttacctcactgggttgtgaagatgaactgagatattatccaggctgaagaacagaaaggaaaacaatgaataaaattgaacaagagtatagaacctgtgtgacaccattaagcattcctacatatttctaatgggagtacagg

SEQ ID NO: 30282 - protein, 311 aa, Homo sapiens
MKRVNSCVKSDEHVLEELETEGERQLKSLLQHQLDTSVSIEECMSKKESFAPGTMYKPFGKEAAGTMTLSQFQTLHEKDQETASLRELGLNETEILIWKSHVSGEKKTKLRATPEAIQNRLQDIEERISERQRILCLPQRFAKSKQLTRREMEIEKSLFQGADRHSFLKALYYQAYHKKTSADKYMTSMKRKIKLGTKDEPQKKNKGDPMNNLESFYQEMIMKKRLEEFQLMRGLTSFPREDFQNLSYEGTTSVLGAKWQKRTGRTSTFSILLVSLLSETVFTSSAMYGIPHLLTMSLKFSTRIGKLSFTP

SEQ ID NO: 30283 - DNA, 1700 bp, Homo sapiens
ggacttgaggtccgcggcctatttacccaagttggaggtaggggcctgtggaaacatgaagagggtaaacagctgtgtgaagagtgatgagcatgtcctggaggagctggaaacagaaggggagaggcagctgaaaagcctccttcagcatcaacttgatacttctgtctccattgaggaatgtatgtctaagaaagagagctttgctcctggtactatgtacaagccctttgggaaggaagcagctgggactatgactttgtcccaattccagacactgcatgagaaggaccaggaaactgcttctctcagggaattagggcttaatgaaacagaaatcttgatctggaagagccatgtttctggtgaaaagaagacaaaactgagggcaactcctgaagcaatacagaaccgtcttcaagatattgaagaaaggatctcggagcgtcagcgcattctttgcctgccacagagatttgcaaagagcaaacagctgacccggcgagaaatggaaatagaaaagtctttatttcagggagctgatcgtcactccttccttaaggctctttattaccaagatgaaccccaaaagaagaacaaaggtgatcccatgaacaacctggaaagtttttaccaagagatgataatgaaaaaacgtcttgaagagtttcaacttatgagaggtgaaccctttgcttcccactcactggtctcagctacatcagtgggtgatagtggcacagctgagagcccatcattactccaggacaagggaaaacaggcagcacagggtaaaggccccagtctccatgtggcaaatgttattgatttttcacctgagcagtgttggactgggcctaagaagctgacgcagccaatagaatttgtcccagaagatgaaatccagagaaatcgtttgtcagaggaagagatccgaaaaattcctatgttttcttcatataatccaggggaaccaaacaaggtattatacctgaagaaccttagccctcgggtgactgaaagagatcttgtgtcattgttcgctcggttccaggagaaaaaaggacctccaattcaattccgaatgatgactggacgaatgaggggccaggcttttatcacctttcccaataaggagatagcatggcaagcattgcatctagtaaatggatacaaactacatgggaaaatattggtgatagagtttggaaagaacaaaaagcaacggtcaaatctccaagcgacttctctcatatcatgtgctacaggtagcactacagaaattagtggtagctagaatatatataaattgtgggtcctggatggtctttcttgaattggaatcttggatctaggatttatgtatagacaccagtttgtttggagttgaagaggaaaaactaactgagggaggggaaaaaagtaatttcagcttttggagagaactggtagaaaacattttctattatataattgaagactatataggacagatgatatgctgagtatgaagggtaaagtgcaaagagtattattttctcaggatgaattacaacggattattcctaaggatttttaaaaatctttataatttttctggggtcctcaatatttgtctctagagataacattctttcttagactgcttcgtatacacagaaataaaaaactaattaaatgttgaaatatttctttactag

SEQ ID NO: 30284 - protein, 413 aa, Homo sapiens
MKRVNSCVKSDEHVLEELETEGERQLKSLLQHQLDTSVSIEECMSKKESFAPGTMYKPFGKEAAGTMTLSQFQTLHEKDQETASLRELGLNETEILIWKSHVSGEKKTKLRATPEAIQNRLQDIEERISERQRILCLPQRFAKSKQLTRREMEIEKSLFQGADRHSFLKALYYQDEPQKKNKGDPMNNLESFYQEMIMKKRLEEFQLMRGEPFASHSLVSATSVGDSGTAESPSLLQDKGKQAAQGKGPSLHVANVIDFSPEQCWTGPKKLTQPIEFVPEDEIQRNRLSEEEIRKIPMFSSYNPGEPNKVLYLKNLSPRVTERDLVSLFARFQEKKGPPIQFRMMTGRMRGQAFITFPNKEIAWQALHLVNGYKLHGKILVIEFGKNKKQRSNLQATSLISCATGSTTEISGS

SEQ ID NO: 30285 - DNA, 2468 bp, Homo sapiens
cttgaggtccgcggcctatttacccaagttggaggtaggggcctgtggaaacatgaagagggtaaacagctgtgtgaagagtgatgagcatgtcctggaggagctggaaacagaaggggagaggcagctgaaaagcctccttcagcatcaacttgatacttctgtctccattgaggaatgtatgtctaagaaagagagctttgctcctggtactatgtacaagccctttgggaaggaagcagctgggactatgactttgtcccaattccagacactgcatgagaaggaccaggaaactgcttctctcagggaattagggcttaatgaaacagaaatcttgatctggaagagccatgtttctggtgaaaagaagacaaaactgagggcaactcctgaagcaatacagaaccgtcttcaagatattgaagaaaggatctcggagcgtcagcgcattctttgcctgccacagagatttgcaaagagcaaacagctgacccggcgagaaatggaaatagaaaagtctttatttcagggagctgatcgtcactccttccttaaggctctttattaccaagcataccacaaaaagacaagtgcagacaagtacatgacctcaatgaagaggaagataaaattaggcacaaaagatgaaccccaaaagaagaacaaaggtgatcccatgaacaacctggaaagtttttaccaagagatgataatgaaaaaacgtcttgaagagtttcaacttatgagaggacttaccagttttcccagagaagacttccaaaatctttcttacgagggtactaccagcgttctaggagccaaatggcagaaaaggactgggaggacctcaacatttagtattctcttagtttccttgctttcagaaacagtgttcacatcttcagccatgtatggcattccccatcttctgacaatgagcctcaagttttctaccaggattggcaagttatcttttaccccatagcatattgtgagggagggtatttaaaaatcatattggcttttagacagccttcaactgatttgccttattttaaccccatcccttcacatttatttctgaaggtaagtgaaattatcagttcctgaactatttaaggattcttaagtggtgacaggtgtgttcttggctctctccactaccagtttaaaattcagctttcttcagtgtgctgagttggttcctgctcatccaattatttttcatcttccagattattattgctgttgtctccttttcttgttcctcctgaccttgttgatttgtgtttttttttttttttttttaagtgcctatagttttagagagttttctggatggaatgaaattaaatgaatgtgttcaatccaccatttttatgtgaaactaattctaatcataatgaaagagttttcttacggctgagcatggtgtctcacgcctgtaatcccagcattttgggaggccaaggcgggtggatcacctgagtttgggagttcaagaccagcctggacaacatggtgaaaccccacgtctactaaaaatacaaaaattagccaggtgtggtggcacatgactgtaatcccagctactcgggaggctgaggcatgagaatcacttgagcctgggaggccaaggttgcagtgagcagagattgcgccactgcactccagcctgggtgacagagtgagactttgtctcaaaaagaaaaaaacaaagagtgccttacctcctttatatgatattttggttgatcctcaatttgttttaggtattatacctgaagaaccttagccctcgggtgactgaaagagatcttgtgtcattgttcgctcggttccaggagaaaaaaggacctccaattcaattccgaatgatgactggacgaatgaggggccaggcttttatcacctttcccaataaggagatagcatggcaagcattgcatctagtaaatggatacaaactacatgggaaaatattggtgatagagtttggaaagaacaaaaagcaacggtcaaatctccaagcgacttctctcatatcatgtgctacaggtagcactacagaaattagtggtagctagaatatatataaattgtgggtcctggatggtctttcttgaattggaatcttggatctaggatttatgtatagacaccagtttgtttggagttgaagaggaaaaactaactgagggaggggaaaaaagtaatttcagcttttggagagaactggtagaaaacattttctattatataattgaagactatataggacagatgatatgctgagtatgaagggtaaagtgcaaagagtattattttctcaggatgaattacaacggattattcctaaggatttttaaaaatctttataatttttctggggtcctcaatatttgtctctagagataacattctttcttagactgcttcgtatacacagaaataaaaaactaatt

SEQ ID NO: 30286 - protein, 311 aa, Homo sapiens; identical to SEQ ID NO: 30282

SEQ ID NO: 30287 - DNA, 4751 bp, Homo sapiens
acccgcgcgaggtaggcgctctggtgcttgcggaggacgcttccttcctcagatgcaccgatcttcccgatactgcctttggagcggctagattgctagccttggctgctccattggcctgccttgccccttacctgccgattgcatatgaactcttcttctgtctgtacatcgttgtcgtcggagtcgtcgcgatcgtcgtggcgctcgtgtgatggccttcgtccgtttagagtagtgtagttagttaggggccaacgaagaagaaagaagacgcgattagtgcagagatgctggaggtggtcagttactaagctagagtaagatagcggagcgaaaagagccaaacctagccggggggcgcacggtcacccaaaggaggtcgactcgccggcgcttcctatcgcgccgagctccctccattcctctccctccgccgaggcgcgaggttgcggcgcgcagcgcagcgcagctcagcgcaccgactgccgcgggctccgctgggcgattgcagccgagtccgtttctcgtctagctgccgccgcggcgaccgctgcctggtcttcctcccggacgctagtgggttatcagctaacacccgcgagcatctataacataggccaactgacgccatccttcaaaaacaactaaaggatgatatgatgaacctagcctgttaatttcgtcttctcaattttaaactttggttgcttaagactgaagcaatcatggtgaacctgaggaatgcggtgcattcattccttgtgcacctaattggcctattggtttggcaatgtgatatttctgtgagcccagtagcagctatagtaactgacattttcaatacctccgatggtggacgcttcaaattcccagacggggtacaaaactggccagcactttcaatcgtcatcataataatcatgacaataggtggcaacatccttgtgatcatggcagtaagcatggaaaagaaactgcacaatgccaccaattacttcttaatgtccctagccattgctgatatgctagtgggactacttgtcatgcccctgtctctcctggcaatcctttatgattatgtctggccactacctagatatttgtgccccgtctggatttctttagatgttttattttcaacagcgtccatcatgcacctctgcgctatatcgctggatcggtatgtagcaatacgtaatcctattgagcatagccgtttcaattcgcggactaaggccatcatgaagattgctattgtttgggcaatttctataggtgtatcagttcctatccctgtgattggactgagggacgaagaaaaggtgttcgtgaacaacacgacgtgcgtgctcaacgacccaaatttcgttcttattgggtccttcgtagctttcttcataccgctgacgattatggtgattacgtattgcctgaccatctacgttctgcgccgacaagctttgatgttactgcacggccacaccgaggaaccgcctggactaagtctggatttcctgaagtgctgcaagaggaatacggccgaggaagagaactctgcaaaccctaaccaagaccagaacgcacgccgaagaaagaagaaggagagacgtcctaggggcaccatgcaggctatcaacaatgaaagaaaagcttcgaaagtccttgggattgttttctttgtgtttctgatcatgtggtgcccatttttcattaccaatattctgtctgttctttgtgagaagtcctgtaaccaaaagctcatggaaaagcttctgaatgtgtttgtttggattggctatgtttgttcaggaatcaatcctctggtgtatactctgttcaacaaaatttaccgaagggcattctccaactatttgcgttgcaattataaggtagagaaaaagcctcctgtcaggcagattccaagagttgccgccactgctttgtctgggagggagcttaatgttaacatttatcggcataccaatgaaccggtgatcgagaaagccagtgacaatgagcccggtatagagatgcaagttgagaatttagagttaccagtaaatccctccagtgtggttagcgaaaggattagcagtgtgtgagaaagaacagcacagtcttttcctacggtacaagctacatatgtaggaaaattttcttctttaatttttctgttggtcttaactaatgtaaatattgctgtctgaaaaagtgtttttacatatagctttgcaaccttgtactttacaatcatgcctacattagtgagatttagggttctatatttactgtttataataggtggagactaacttattttgattgtttgatgaataaaatgtttatttttgctctccctcccttctttccttccttttttcctttcttccttcctttctctctttcttttgtgcatatggcaacgttcatgttcatctcaggtggcatttgcaggtgaccagaatgaggcacatgacagtggttatatttcaaccacacctaaattaacaaattcagtggacatttgttctgggttaacagtaaatatacactttacattcttgctctgctcatctacacatataaacacagtaagataggttctgctttctgatacatctgtcagtgagtcagaggcagaacctagtcttgttgttcatataggggcaaaaatttgacattgtcagaatgttgtgttggtatttactgcaatgtctgtccctaaacatagtggtattttaacatagcagctggttaaccgggactacagaagtggaaggataatgagatgtaatacaccaaatagcttttcacttcttaaggacagtgttcaaattctgattattacaacaagcaaactgaaattagtgttttcattctggtccttagtaaattcctaattctatgattaaactgggaaatgagatcccagagttatttcccaacccaggattcaacatcaattgggttttgatctcagcatcctggaaatttgtgtgcttcacacaaagtgaaattagtattttgagccttattaaaatattttcttaattatggtacctctgtctataggacttaatttagcagtccatttttgagtaaaacttgtattggaagtatagatggtagaaactttggaagttttacttgattaaggactacagaattgggcccttagaatgtgaaaaaaaaaagtaattaaaaagacacttttaccgaactcgggattacagaaacacggagtttccatttggattttaaacaaaatttatgtcattttcagatccttccaaactctctagtgcaggaaaaggctgcagctaatttgtgaaagtggcaagctcttcattgcactgcagttatttaccagaagtttaaatctttgttaaaatatagtgttgtgttacaataagtgttggccatcatttcattcgtgggcctgctgctctctaagaattcagtagcattttaatagtttctaaaccatgaaaagttttcaagcattgctaaagtcaggccattcagtctatgctgtgtgcagagtatacaagtgtttctagtaacagtatttccatacgtgcccatttcacacaactgtggataaattttggaagaattcatgatgctagttcttacgcttgacagttacttacacacctgagaatgtgcctctcagtatcttaaaattggttaatgaaaaatctgaatttctaaaacccttggtctgtgttctcaacacacagtatagataaatccaatagtctgccacaagggcagtggaagagctgctgtatttgaggaaactcatacagtctctatttgatttgcaacactgccaaacatcagtcaattgcttgagcatgcccaaatataacatgaaagtcaagtctacctgccttgcctgttaggtctgttgaagtgcatgttaaaataattatatgaagcagaatgagatgatttaattcttaccgaaatgaaaatggctgaagaaacacagcatgcatttagcatgagttctgcacatacagatggtgtcctgcatgtatgccatgtatgttgcatgaatccatcgatttgtattaatgtagggcagaatagctgatagaagaaggactgaagaaaatccttcagcaatccttaaaaagaccatgcattcagatctgaagtagtgtgagtgttagaaaaaactggaaacatctgatttctgaactatcagggcaagctcatagcacatgttttacaaagaaacaaaatataaatcacagatttccaaaagtactagcaataagttgaatgataatagctcacagcacatttgttaatgattcttgtgtcatcaagtagtagtacttaatagtacccaacctggtaattatcctcaagttgtgtgctattcgtaagttctgtgcagtttggtatgaaacaaatatactcatttggatataaatcttacccttcaatgttaaatctacaaacttttataaatgttttaaagaagtccatgtgataattgtaaaggtgatgaatttaccatcaaacaaatcattttgatgtattattatatatgtatatctgtgtaagacacgtgcaacagactgccttatattattttctgtaattcttctcctttgtcaaatggtattttttgtgaatggttgcaaagtgttgtcttattcctaattcctgtatgttatccactacaggttttatgagacttcctattaatttattaaatttattaaatgttg

SEQ ID NO: 30288 - protein, 458 aa, Homo sapiens; identical to SEQ ID NO: 4221

SEQ ID NO: 30289 - DNA, 3727 bp, Homo sapiens
gaggtaggcgctctggtgcttgcggaggacgcttccttcctcagatgcaccgatcttcccgatactgcctttggagcggctagattgctagccttggctgctccattggcctgccttgccccttacctgccgattgcatatgaactcttcttctgtctgtacatcgttgtcgtcggagtcgtcgcgatcgtcgtggcgctcgtgtgatggccttcgtccgtttagagtagtgtagttagttaggggccaacgaagaagaaagaagacgcgattagtgcagagatgctggaggtggtcagttactaagctagagtaagatagcggagcgaaaagagccaaacctagccggggggcgcacggtcacccaaaggaggtcgactcgccggcgcttcctatcgcgccgagctccctccattcctctccctccgccgaggcgcgaggttgcggcgcgcagcgcagcgcagctcagcgcaccgactgccgcgggctccgctgggcgattgcagccgagtccgtttctcgtctagctgccgccgcggcgaccgctgcctggtcttcctcccggacgctagtgggttatcagctaacacccgcgagcatctataacataggccaactgacgccatccttcaaaaacaactgtctgggaaaaaaagaataaaaagtagtgtgagagcagaaaacgtgattgaaacacgaccaatctttcttcagtgccaaagggtggaaaagaaaggatgatatgatgaacctagcctgttaatttcgtcttctcaattttaaactttggttgcttaagactgaagcaatcatggtgaacctgaggaatgcggtgcattcattccttgtgcacctaattggcctattggtttggcaatgtgatatttctgtgagcccagtagcagctatagtaactgacattttcaatacctccgatggtggacgcttcaaattcccagacggggtacaaaactggccagcactttcaatcgtcatcataataatcatgacaataggtggcaacatccttgtgatcatggcagtaagcatggaaaagaaactgcacaatgccaccaattacttcttaatgtccctagccattgctgatatgctagtgggactacttgtcatgcccctgtctctcctggcaatcctttatgattatgtctggccactacctagatatttgtgccccgtctggatttctttagatgttttattttcaacagcgtccatcatgcacctctgcgctatatcgctggatcggtatgtagcaatacgtaatcctattgagcatagccgtttcaattcgcggactaaggccatcatgaagattgctattgtttgggcaatttctataggtgtatcagttcctatccctgtgattggactgagggacgaagaaaaggtgttcgtgaacaacacgacgtgcgtgctcaacgacccaaatttcgttcttattgggtccttcgtagctttcttcataccgctgacgattatggtgattacgtattgcctgaccatctacgttctgcgccgacaagctttgatgttactgcacggccacaccgaggaaccgcctggactaagtctggatttcctgaagtgctgcaagaggaatacggccgaggaagagaactctgcaaaccctaaccaagaccagaacgcacgccgaagaaagaagaaggagagacgtcctaggggcaccatgcaggctatcaacaatgaaagaaaagcttcgaaagtccttgggattgttttctttgtgtttctgatcatgtggtgcccatttttcattaccaatattctgtctgttctttgtgagaagtcctgtaaccaaaagctcatggaaaagcttctgaatgtgtttgtttggattggctatgtttgttcaggaatcaatcctctggtgtatactctgttcaacaaaatttaccgaagggcattctccaactatttgcgttgcaattataaggtagagaaaaagcctcctgtcaggcagattccaagagttgccgccactgctttgtctgggagggagcttaatgttaacatttatcggcataccaatgaaccggtgatcgagaaagccagtgacaatgagcccggtatagagatgcaagttgagaatttagagttaccagtaaatccctccagtgtggttagcgaaaggattagcagtgtgtgagaaagaacagcacagtcttttcctacggtacaagctacatatgtaggaaaattttcttctttaatttttctgttggtcttaactaatgtaaatattgctgtctgaaaaagtgtttttacatatagctttgcaaccttgtactttacaatcatgcctacattagtgagatttagggttctatatttactgtttataataggtggagactaacttattttgattgtttgatgaataaaatgtttatttttgctctccctcccttctttccttccttttttcctttcttccttcctttctctctttcttttgtgcatatggcaacgttcatgttcatctcaggtggcatttgcaggtgaccagaatgaggcacatgacagtggttatatttcaaccacacctaaattaacaaattcagtggacatttgttctgggttaacagtaaatatacactttacattcttgctctgctcatctacacatataaacacagtaagataggttctgctttctgatacatctgtcagtgagtcagaggcagaacctagtcttgttgttcatataggggcaaaaatttgacattgtcagaatgttgtgttggtatttactgcaatgtctgtccctaaacatagtggtattttaacatagcagctggttaaccgggactacagaagtggaaggataatgagatgtaatacaccaaatagcttttcacttcttaaggacagtgttcaaattctgattattacaacaagcaaactgaaattagtgttttcattctggtccttagtaaattcctaattctatgattaaactgggaaatgagatcccagagttatttcccaacccaggattcaacatcaattgggttttgatctcagcatcctggaaatttgtgtgcttcacacaaagtgaaattagtattttgagccttattaaaatattttcttaattatggtacctctgtctataggacttaatttagcagtccatttttgagtaaaacttgtattggaagtatagatggtagaaactttggaagttttacttgattaaggactacagaattgggcccttagaatgtgaaaaaaaaaagtaattaaaaagacacttttaccgaactcgggattacagaaacacggagtttccatttggattttaaacaaaatttatgtcattttcagatccttccaaactctctagtgcaggaaaaggctgcagctaatttgtgaaagtggcaagctcttcattgcactgcagttatttaccagaagtttaaatctttgttaaaatatagtgttgtgttacaataagtgttggccatcatttcattcgtgggcctgctgctctctaagaattcagtagcattttaatagtttctaaaccatgaaaagttttcaagcattgctaaagtcaggccattcagtctatgctgtgtgcagagtatacaagtgtttctagtaacagtatttccatacgtgcccatttcacacaactgtggataaattttggaagaattcatgatgctagttcttacgcttg

SEQ ID NO: 30290 - protein, 458 aa, Homo sapiens; identical to SEQ ID NO: 4221

SEQ ID NO: 30291 - DNA, 4648 bp, Homo sapiens
gaggtaggcgctctggtgcttgcggaggacgcttccttcctcagatgcaccgatcttcccgatactgcctttggagcggctagattgctagccttggctgctccattggcctgccttgccccttacctgccgattgcatatgaactcttcttctgtctgtacatcgttgtcgtcggagtcgtcgcgatcgtcgtggcgctcgtgtgatggccttcgtccgtttagagtagtgtagttagttaggggccaacgaagaagaaagaagacgcgattagtgcagagatgctggaggtggtcagttactaagctagagtaagatagcggagcgaaaagagccaaacctagccggggggcgcacggtcacccaaaggaggtcgactcgccggcgcttcctatcgcgccgagctccctccattcctctccctccgccgaggcgcgaggttgcggcgcgcagcgcagcgcagctcagcgcaccgactgccgcgggctccgctgggcgattgcagccgagtccgtttctcgtctagctgccgccgcggcgaccgctgcctggtcttcctcccggacgctagtgggttatcagctaacacccgcgagcatctataacataggccaactgacgccatccttcaaaaacaactaaaggatgatatgatgaacctagcctgttaatttcgtcttctcaattttaaactttggttgcttaagactgaagcaatcatggtgaacctgaggaatgcggtgcattcattccttgtgcacctaattggcctattggtttggcaatgtgatatttctgtgagcccagtagcagctatagtaactgacattttcaatacctccgatggtggacgcttcaaattcccagacggggtacaaaactggccagcactttcaatcgtcatcataataatcatgacaataggtggcaacatccttgtgatcatggcagtaagcatggaaaagaaactgcacaatgccaccaattacttcttaatgtccctagccattgctgatatgctagtgggactacttgtcatgcccctgtctctcctggcaatcctttatgattatgtctggccactacctagatatttgtgccccgtctggatttctttagatgttttattttcaacagcgtccatcatgcacctctgcgctatatcgctggatcggtgtatcagttcctatccctgtgattggactgagggacgaagaaaaggtgttcgtgaacaacacgacgtgcgtgctcaacgacccaaatttcgttcttattgggtccttcgtagctttcttcataccgctgacgattatggtgattacgtattgcctgaccatctacgttctgcgccgacaagctttgatgttactgcacggccacaccgaggaaccgcctggactaagtctggatttcctgaagtgctgcaagaggaatacggccgaggaagagaactctgcaaaccctaaccaagaccagaacgcacgccgaagaaagaagaaggagagacgtcctaggggcaccatgcaggctatcaacaatgaaagaaaagcttcgaaagtccttgggattgttttctttgtgtttctgatcatgtggtgcccatttttcattaccaatattctgtctgttctttgtgagaagtcctgtaaccaaaagctcatggaaaagcttctgaatgtgtttgtttggattggctatgtttgttcaggaatcaatcctctggtgtatactctgttcaacaaaatttaccgaagggcattctccaactatttgcgttgcaattataaggtagagaaaaagcctcctgtcaggcagattccaagagttgccgccactgctttgtctgggagggagcttaatgttaacatttatcggcataccaatgaaccggtgatcgagaaagccagtgacaatgagcccggtatagagatgcaagttgagaatttagagttaccagtaaatccctccagtgtggttagcgaaaggattagcagtgtgtgagaaagaacagcacagtcttttcctacggtacaagctacatatgtaggaaaattttcttctttaatttttctgttggtcttaactaatgtaaatattgctgtctgaaaaagtgtttttacatatagctttgcaaccttgtactttacaatcatgcctacattagtgagatttagggttctatatttactgtttataataggtggagactaacttattttgattgtttgatgaataaaatgtttatttttgctctccctcccttctttccttccttttttcctttcttccttcctttctctctttcttttgtgcatatggcaacgttcatgttcatctcaggtggcatttgcaggtgaccagaatgaggcacatgacagtggttatatttcaaccacacctaaattaacaaattcagtggacatttgttctgggttaacagtaaatatacactttacattcttgctctgctcatctacacatataaacacagtaagataggttctgctttctgatacatctgtcagtgagtcagaggcagaacctagtcttgttgttcatataggggcaaaaatttgacattgtcagaatgttgtgttggtatttactgcaatgtctgtccctaaacatagtggtattttaacatagcagctggttaaccgggactacagaagtggaaggataatgagatgtaatacaccaaatagcttttcacttcttaaggacagtgttcaaattctgattattacaacaagcaaactgaaattagtgttttcattctggtccttagtaaattcctaattctatgattaaactgggaaatgagatcccagagttatttcccaacccaggattcaacatcaattgggttttgatctcagcatcctggaaatttgtgtgcttcacacaaagtgaaattagtattttgagccttattaaaatattttcttaattatggtacctctgtctataggacttaatttagcagtccatttttgagtaaaacttgtattggaagtatagatggtagaaactttggaagttttacttgattaaggactacagaattgggcccttagaatgtgaaaaaaaaaagtaattaaaaagacacttttaccgaactcgggattacagaaacacggagtttccatttggattttaaacaaaatttatgtcattttcagatccttccaaactctctagtgcaggaaaaggctgcagctaatttgtgaaagtggcaagctcttcattgcactgcagttatttaccagaagtttaaatctttgttaaaatatagtgttgtgttacaataagtgttggccatcatttcattcgtgggcctgctgctctctaagaattcagtagcattttaatagtttctaaaccatgaaaagttttcaagcattgctaaagtcaggccattcagtctatgctgtgtgcagagtatacaagtgtttctagtaacagtatttccatacgtgcccatttcacacaactgtggataaattttggaagaattcatgatgctagttcttacgcttgacagttacttacacacctgagaatgtgcctctcagtatcttaaaattggttaatgaaaaatctgaatttctaaaacccttggtctgtgttctcaacacacagtatagataaatccaatagtctgccacaagggcagtggaagagctgctgtatttgaggaaactcatacagtctctatttgatttgcaacactgccaaacatcagtcaattgcttgagcatgcccaaatataacatgaaagtcaagtctacctgccttgcctgttaggtctgttgaagtgcatgttaaaataattatatgaagcagaatgagatgatttaattcttaccgaaatgaaaatggctgaagaaacacagcatgcatttagcatgagttctgcacatacagatggtgtcctgcatgtatgccatgtatgttgcatgaatccatcgatttgtattaatgtagggcagaatagctgatagaagaaggactgaagaaaatccttcagcaatccttaaaaagaccatgcattcagatctgaagtagtgtgagtgttagaaaaaactggaaacatctgatttctgaactatcagggcaagctcatagcacatgttttacaaagaaacaaaatataaatcacagatttccaaaagtactagcaataagttgaatgataatagctcacagcacatttgttaatgattcttgtgtcatcaagtagtagtacttaatagtacccaacctggtaattatcctcaagttgtgtgctattcgtaagttctgtgcagtttggtatgaaacaaatatactcatttggatataaatcttacccttcaatgttaaatctacaaacttttataaatgttttaaagaagtccatgtgataattgtaaaggtgatgaatttaccatcaaacaaatcattttgatgtattattatatatgtatatctgtgtaagacacgtgcaacagactgccttatattattttctgtaattcttctcctttgtcaaatggtattttttgtgaatggttgcaaagtgttgtcttattcctaattcctgtatgttatccactacaggttttatgagacttcctattaatttattaaatttattaaatgttg

SEQ ID NO: 30292 - protein, 293 aa, Homo sapiens [sequence omitted]

SEQ ID NO: 30293 - DNA, 433 bp, Homo sapiens
actattgaagacacctcatgtgacatcacaaacagctttcttggactctccagggaggtggagcaagatggctgaatagaagcctccagcaattgtcccccactcacaggaacaccaaattgaacaactatccacacacaaaaaaaagcaccttcatacaaagaaaaatcaggcctggaacagatcagcctccctgcaggaatcaactgagaaagaattaatgacactttcgaaagctttaaattccaatgagaaattgaagccctgggaatatctgcctcaacattttatagggtgtatgcctgcagtcagtgagaagcacgaggatattccgttccttgtaagtgtaaagtatgataaaacattaatcttaaatctcttacatagtaacaaaacaagacctacactaaaatatttggcattctgtggcaca

SEQ ID NO: 30294 - protein, 70 aa, Homo sapiens
MTLSKALNSNEKLKPWEYLPQHFIGCMPAVSEKHEDIPFLVSVKYDKTLILNLLHSNKTRPTLKYLAFCG

SEQ ID NO: 30295 - DNA, 1498 bp, Homo sapiens
taaaaatttgatcctaagattctataaagtagccattgaggcttaccaaagttacaatattacagatggatcaggggagacggttgctatggagatggatgatatcataactccattgtgaaccagtaagaacactctcgtgagtctaacggtcttccggatgaaggctatttgaagtcgccataacctggtcagaagtgtgcctgtcggcggggagagaggcaatatcaaggttttaaatctcggagaaatggctttcgtttgcttggctatcggatgcttatatacctttctgataagcacaacatttggctgtacttcatcttcagacaccgagataaaagttaaccctcctcaggattttgagatagtggatcccggatacttaggttatctctatttgcaatggcaacccccactgtctctggatcattttaaggaatgcacagtggaatatgaactaaaataccgaaacattggtagtgaaacatggaagaccatcattactaagaatctacattacaaagatgggtttgatcttaacaagggcattgaagcgaagatacacacgcttttaccatggcaatgcacaaatggatcagaagttcaaagttcctgggcagaaactacttattggatatcaccacaaggaattccagaaactaaagttcaggatatggattgcgtatattacaattggcaatatttactctgttcttggaaacctggcataggtgtacttcttgataccaattacaacttgttttactggtatgagggcttggatcatgcattacagtgtgttgattacatcaaggctgatggacaaaatataggatgcagatttccctatttggaggcatcagactataaagatttctatatttgtgttaatggatcatcagagaacaagcctatcagatccagttatttcacttttcagcttcaaaatatagttaaacctttgccgccagtctatcttacttttactcgggagagttcatgtgaaattaagctgaaatggagcatacctttgggacctattccagcaaggtgttttgattatgaaattgagatcagagaagatgatactaccttggtgactgctacagttgaaaatgaaacatacaccttgaaaacaacaaatgaaacccgacaattatgctttgtagtaagaagcaaagtgaatatttattgctcagatgacggaatttggagtgagtggagtgataaacaatgctgggaaggtgaagacctatcgaagaaaactttgctacgtttctggctaccatttggtttcatcttaatattagttatatttgtaaccggtctgcttttgcgtaagccaaacacctacccaaaaatgattccagaatttttctgtgatacatgaagactttccatatcaagagacatggtattgactcaacagtttccagtcatggccaaatgttcaatatgagtctcaataaactgaatttttcttgcgaatgttgaa

SEQ ID NO: 30296 - protein, 380 aa, Homo sapiens; identical to SEQ ID NO: 4223

SEQ ID NO: 30297 - DNA, 1595 bp, Homo sapiens
tattacagaatttggttacaactggacacattgttcatatagagtccccctggtccttgtgaaaaactccggtgttcctggtaaccacatagtgtataaagcccctcattgcactagtgacaatcctgtaacccagaagcaaaggagagaattgtctttgtgttcatttgggggagacggttgctatggagatggatgatatcataactccattgtgaaccagtaagaacactctcgtgagtctaacggtcttccggatgaaggctatttgaagtcgccataacctggtcagaagtgtgcctgtcggcggggagagaggcaatatcaaggttttaaatctcggagaaatggctttcgtttgcttggctatcggatgcttatatacctttctgataagcacaacatttggctgtacttcatcttcagacaccgagataaaagttaaccctcctcaggattttgagatagtggatcccggatacttaggttatctctatttgcaatggcaacccccactgtctctggatcattttaaggaatgcacagtggaatatgaactaaaataccgaaacattggtagtgaaacatggaagaccatcattactaagaatctacattacaaagatgggtttgatcttaacaagggcattgaagcgaagatacacacgcttttaccatggcaatgcacaaatggatcagaagttcaaagttcctgggcagaaactacttattggatatcaccacaaggaattccagaaactaaagttcaggatatggattgcgtatattacaattggcaatatttactctgttcttggaaacctggcataggtgtacttcttgataccaattacaacttgttttactggtatgagggcttggatcatgcattacagtgtgttgattacatcaaggctgatggacaaaatataggatgcagatttccctatttggaggcatcagactataaagatttctatatttgtgttaatggatcatcagagaacaagcctatcagatccagttatttcacttttcagcttcaaaatatagttaaacctttgccgccagtctatcttacttttactcgggagagttcatgtgaaattaagctgaaatggagcatacctttgggacctattccagcaaggtgttttgattatgaaattgagatcagagaagatgatactaccttggtgactgctacagttgaaaatgaaacatacaccttgaaaacaacaaatgaaacccgacaattatgctttgtagtaagaagcaaagtgaatatttattgctcagatgacggaatttggagtgagtggagtgataaacaatgctgggaaggtgaagacctatcgaagaaaactttgctacgtttctggctaccatttggtttcatcttaatattagttatatttgtaaccggtctgcttttgcgtaagccaaacacctacccaaaaatgattccagaatttttctgtgatacatgaagactttccatatcaagagacatggtattgactcaacagtttccagtcatggccaaatgttcaatatgagtctcaataaactgaatttttcttgcgaatgttgaa

SEQ ID NO: 30298 - protein, 380 aa, Homo sapiens; identical to SEQ ID NO: 4223

SEQ ID NO: 30299 - DNA, 4932 bp, Homo sapiens
attgtcgggggctattctctctcccaggaacatggcggcgagtcagggaggaggcggtaacagtgggggcggcggttgtggtggaggtggaagtagcggtggctgtggcacggctggagggggaggtggcggggctggagggggaggcggcggcggcggcgggaccctggtggtccccatcccggtaccgactcttttcggtcagccgttccccaacgggccgccgtggaacccggggagcctgcagcctcagcacaccgtgaggagcctggaccgggccctggaagaggcgggcagctccggcatcctgagcctcagtggtcggaaactccgagacttcccgggcagcggctacgacctgacggacaccacccaagcagatctttccagaaatcgttttacagaaattccttctgatgtctggttatttgcaccccttgaaacattaaatttatatcataattgcatcaaaaccattcctgaagccattaaaaatctgcagatgttaacataccttaacattagccgaaatcttttatcaacattgccaaaatacctatttgatcttccccttaaagttttggtcgtcagtaataataaactggtatccattccagaagaaattgggaagttaaaagatttaatggaattggatattagctgcaatgagattcaagtccttccccaacaaatgggaaaattacattcacttagagagctaaatataagaagaaataatcttcatgttttgccagatgaattaggagaccttcccttagtcaagctggatttctcttgtaataaagtgaccgaaattccagtttgttacagaaagctgcatcatttacaagtaataattttggataacaatccattgcaagtaccaccagcacagatatgtttaaagggtaaggtgcacatatttaagtacttaaatattcaagcatgttgcagaatggataagaaaccagattccctggatcttccatcattgagtaaacgaatgccctcacagcctctcacagacagtatggaagatttttatccaaataaaaatcatggccctgactctggaattggaagtgataatggagagaaacgattatccacaacagaaccatcagatgatgacacagtcagccttcattctcaagtctcagaatcaaatagagagcagacatcaagaaatgacagtcacataataggaagtaagactgattctcagaaagaccaggaggtatatgattttgttgaccccaacacagaagatgtagcagttcctgaacagggaaatgcacatattggatcatttgtatcattctttaagggaaaagaaaaatgttctgaaaaatctcggaaaaatgaagaattaggagatgaaaaaagacttgagaaagaacagttactggcagaggaagaggatgatgatttgaaggaagtaactgatttgaggaaaatagctgctcagttattgcagcaagaacagaagaacaggattcttaatcattcaacttctgtgatgagaaacaagccaaaacaaactgtggaatgtgaaaagagtgtctcagcagatgaagttaattcaccattatcacccctcacctggcagcccttagaaaatcagaaggatcaaatagatgaacaaccgtggccagaatctcaccctataatctggcagagtgaagaaaggaggcggagcaaacagattagaaaagaatatttcaagtataaatcaatgaggaagagttcaagtggcaatgaaaatgatgagcaagacagtgataatgctaatatgtcaacacaatctccagtatcatctgaggaatatgacagaactgatggtttttcacacagtccctttggcttgaagcctagatcagcttttagccgctcatctcgccaagaatatggggcagcagatccaggatttacaatgagaagaaagatggaacatttacgggaagagcgagagcaaatacgacaacttcgcaacaatcttgaatccaggttaaaagtaattttgcctgatgacattggagctgcactgatggatggggttgttctttgccatttagccaatcatataaggccacgttctgttgctagtattcatgtaccatcaccagcagtgcccaaactgagcatggcaaaatgtcgaagaaatgtagaaaattttcttgatgcttgtaaaaagttgggtgtctcacaggaaagactttgtttgcctcatcatattttggaagaacgaggacttgtgaaagttggtgtcacagttcaggcgctccttgaattaccaacaaccaaggcatctcagctttctgtggcttaatataacattttaaaattctaagtgtatagtttcatttatttgaagtgatttcaaatatttcaaattcatgaataagaatattccgtcaaaaatagtttgccttaggtcacgccttaggattttaaaaaaattacattgaaacatcaaacttaaacattgaattgcccgaacttctttgggggaaaactggattaacttaataagagtatttgataaactcaaattctctttttactaagtcagttgataatcttgattatttttcagaaagcagactgatactaaatttaaaatgtagtttcaatttaataatcacattaggtttaatttttttacatcatagcatattagtaaacatctggataaaggtaattttttttagcaatttagagcaattctatatttgagttatttaatacacttctaattctagtttatacacaatttcttcaatctttggtcttagttttctagaaaaaaggagtagaaaaaacaattctggctttatattaaattcttttagtattataggttggtgccaaaatattttcagttgtactgtagattgtttacatgtgaagtgcctgtgtaattgatgactcttacatagtcttaagcatttttgcaattttttaaatgtattaatagagtcaatggaactttaaaatattttagtagattttgtaaagtcagtaatatgtgaggatttaaatgagcctcacattgtgacatttgtggttttttagttagtccattgcagtttcccttaaattggttatttcatgttgtcaaaaataccaatgttaatatgattaatttatgctatttaattttgtgaaacttaatcatcttttaaaatgtattatttgaagagtattttatttctgtattgaaaatgttacacaaagcagtaaagtttttgagaactagtgaagtactaattatcaaggacattttgataaaactgccaaagtttgggtttatatcttccctttgagcagcattctatcagtgctgcctttagctatactcagagagcagcagttgaggaataggtttttactcaaaatctggccatttgtgaatcctgtaaaccttgtgatcttcaattactttgatgttaaattaaacacagactcttctataaatattttcatgagatactgtgttacacaaagtccttgttttaacttaggtatgggtaaatttacattggtggtattgcaggaatttttcaaaaacattactgtaatgaataactgagtttcctatagaagaacctgaataattacttttgtagtaaccaagcaagcatcatatcttaagtatgtgatcatttgcacttgttacctcttaatatggatgcaacttattaaaaatgttggcctgggtatttcaaagggtatatataaaaggtaaaaaactagtgtgccaaatggtataggaacaactgtactttttttgatcagttggcatgaagccatagaattaaattttggctttagaatacagatgtgttcattacattccccaagggtcaaattggagcttttaaagaattaaagcttctatgagtatatggtttaagaattaaattattagtaatttattattttaaatatttgacctcattagttgttaattttttagttggataaaaaaaaaactcgctgacataatctccctagtgaaaacttgggtaatatatgtaagaaatggcaaataaataccttagttaatgactttttatgtagaaatttgacagcattacaaattaagtgaccattaaaaacacagcaatcattcatactgctttcataggtgttatgatagtctctgattaatcaatctagtatgaattattttacaagtgttgtcctgtttcatatctttgaagtagtagtgaaattgtaggccattttcttataacatttcagttacttttcagttaattattcctttaaaaagaaaatacagcagaacctcactgtagcattctttactgcagagcaaaattcaatttaagatgggcttctctgaggtccacatcatggcagttcatttactcttgtgccaaatggcaacaccacgtctaaagcagtttcacagcatggtcccctacaatgttataccaaggctctgatgtatttcttttagtagtttctaagtgtaaaatttattctaaatgtttttatggctattatctatttcatcagttattgaattaagaatgattttcattacttgagtgggatttgtgatttaatgacagttgaataatcaaaaatattttattaggcccccaaaatttaatagatatctatttctgttacattttattactgtatggcacaagaaagaagtgacattgggtatgttagaaatgaaataaggagtaaaaatgcattaccatttgtttaataattatctttacagaatgctagtttaatgacttttttaactgaattttttgaataaatcagaaatgtttgtattggtcacagatctatcataattgcttttctgatgcatttaaaaataaatggaacacttaaatgtatattaccgatgcaaactgtggataaagttgaaagaaaaaattt
